(19) United States
(12) Patent Application Publication
(10) Pub. No.: US 2002/0132767 A1
(43) Pub. Date: Sep. 19, 2002

(54) Nucleic acids, proteins, and antibodies

(76) Inventors: Craig A. Rosen, Laytonsville, MD (US); Steven M. Ruben, Olney, MD (US); Steven C. Barash, Rockville, MD (US)

Correspondence Address: HUMAN GENOME SCIENCES INC, 9410 KEY WEST AVENUE, ROCKVILLE, MD, 20850

(21) Appl. No.: 09/764,847

(22) Filed: Jan. 17, 2001

Related U.S. Application Data
(60) Provisional application No. 60/179,065, filed on Jan. 31, 2000.

(51) Int. Cl. A61K 38/17; C07H 21/04; C12N 9/00; C07K 14/435; C12P 21/02; C12N 5/06

(52) U.S. Cl. 514/12; 435/183; 435/69.1; 435/320.1; 435/325; 536/23.1

(57) ABSTRACT

The present invention relates to novel respiratory system related polynucleotides and the polypeptides encoded by these polynucleotides herein collectively known as “respiratory system antigens,” and the use of such respiratory system antigens for detecting disorders of the respiratory system, particularly the presence of cancer of respiratory system tissues and cancer metastases. More specifically, isolated respiratory system associated nucleic acid molecules are provided encoding novel respiratory system associated polypeptides. Novel respiratory system polypeptides and antibodies that bind to these polypeptides are provided. Also provided are vectors, host cells, and recombinant and synthetic methods for producing human respiratory system associated polynucleotides and/or polypeptides. The invention further relates to diagnostic and therapeutic methods useful for diagnosing, treating, preventing and/or prognosing disorders related to the respiratory system, including cancer of respiratory system tissues, and therapeutic methods for treating such disorders. The invention further relates to screening methods for identifying agonists and antagonists of polynucleotides and polypeptides of the invention. The present invention further relates to methods and/or compositions for inhibiting the production and function of the polypeptides of the present invention.

### STATEMENT UNDER 37 C.F.R. § 1.77(b)(4)

[0001] This application refers to a “Sequence Listing” listed below, which is provided as an electronic document on two identical compact discs (CD-R), labeled “Copy 1” and “Copy 2.” These compact discs each contain the following files, which are hereby incorporated in their entirety herein:

| | | Size | |
|---|---|---|---|
| Document | File Name | in bytes | Date of Creation |
| Sequence Listing | PC009_seqList.txt | 4,080,465 | 01/15/2001 |
| V Viewer Setup File | SetupDLL.exe | 695,808 | 12/19/2000 |
| V Viewer Help | v.cnt | 7,984 | 01/05/2001 |
| File Controller | | | |
| V Viewer | v.exe | 753,664 | 12/19/2000 |
| Program File | | | |
| V Viewer Help File | v.hlp | 447,766 | 01/05/2001 |

[0002] The Sequence Listing may be viewed on an IBM-PC machine running the MS-Windows operating system by using the V viewer software, licensed by HGS, Inc., included on the compact discs (see World Wide Web URL: http://www.fileviewer.com).

### FIELD OF THE INVENTION

[0003] The present invention relates to novel connective tissue related polynucleotides, the polypeptides encoded by these polynucleotides herein collectively referred to as “connective tissue antigens,” and antibodies that immunospecifically bind these polypeptides, and the use of such connective tissue polynucleotides, antigens, and antibodies for detecting, treating, preventing and/or prognosing disorders of connective tissue(s), including, but not limited to, the presence of cancer and cancer metastases. More specifically, isolated connective tissue nucleic acid molecules are provided encoding novel connective tissue polypeptides. Novel connective tissue polypeptides and antibodies that bind to these polypeptides are provided. Also provided are vectors, host cells, and recombinant and synthetic methods for producing human connective tissue polynucleotides, polypeptides, and/or antibodies. The invention further relates to diagnostic and therapeutic methods useful for diagnosing, treating, preventing and/or prognosing disorders related to connective tissue(s), including cancer, and therapeutic methods for treating such disorders. The invention further relates to screening methods for identifying agonists and antagonists of polynucleotides and polypeptides of the invention. The invention further relates to methods and/or compositions for inhibiting or promoting the production and/or function of the polypeptides of the invention.

### BACKGROUND OF THE INVENTION

[0004] Connective tissues include those tissues that support and connect the various parts of the body. These tissues originate primarily in the cells of the mesodermal (middle tissue) layer of the embryo, and comprise the fibrous and elastic connective tissues, the adipose (fatty) tissues, and cartilage and bone. Connective tissues are composed of a variable structure of cells and fibers surrounded by an intercellular matrix that may be a fluid, solid, or gel, depending on the function of the particular connective tissue. White fibrous connective tissue forms most of the tendons and ligaments. Yellow elastic connective tissue forms such structures as the pads between the vertebrae and the elastic elements of the arterial walls and the trachea. Among other types of connective tissue, cartilage takes part in the formation of joints and the development of bone, and fat tissue provides a cushion for the support of such vital organs as the kidneys and stores excess food for use when needed. Lymphatic tissue and blood are also related in embryonic development to the connective tissues.

[0005] Disorders that affect joints and their components—muscles, bones, cartilage, and tendons—are considered connective tissue diseases because these structures contain large amounts of connective tissue. However, many connective tissue diseases are also a type of autoimmune disease, involving immune reactions in which something triggers the immune system to react against the body's own tissues and to produce abnormal antibodies that attack these tissues (autoantibodies).

[0006] Diseases of connective tissue may be due to genetic inheritance (such as, e.g., Marfan syndrome, and Ehlers-Danlos syndrome); or alternatively may not have inheritance which can be defined by gene abnormalities (such as, e.g., systemic lupus erythematosus, rheumatoid arthritis, scleroderma, polymyositis, and dermatomyositis).

[0007] A connective tissue disorder developing in about 1 percent of the population, Rheumatoid arthritis, is an autoimmune disease in which joints, usually including those of the hands and feet, are symmetrically inflamed, resulting in swelling, pain, and often the eventual destruction of the joint's interior. Its exact cause isn't known, but many different factors, including genetic predisposition, may influence the autoimmune reaction. In this disease, the immune system attacks the tissue that lines and cushions joints. Eventually, the cartilage, bone, and ligaments of the joint erode, causing scars to form within the joint. The joints deteriorate at a highly variable rate. Rheumatoid arthritis may produce a low-grade fever and occasionally an inflammation of blood vessels (vasculitis) that causes nerve damage or leg sores (ulcers). Inflammation of the membranes around the lungs (pleurisy) or the sac surrounding the heart (pericarditis) or inflammation and scarring of the lungs can lead to chest pain, difficulty in breathing, and abnormal heart function. Some people develop swollen lymph nodes, Sjögren's syndrome, or an eye inflammation. Still's disease is a variation of rheumatoid arthritis in which high fever and other generalized symptoms develop first. Many people with rheumatoid arthritis have distinctive antibodies in their blood, for example, rheumatoid factor. Usually, the higher the level of rheumatoid factor in the blood, the more severe the rheumatoid arthritis and the poorer the prognosis.

[0008] Psoriatic arthritis is a form of arthritis that occurs in people who have psoriasis of the skin or nails. The disease resembles rheumatoid arthritis but doesn't produce the antibodies characteristic of rheumatoid arthritis. Psoriasis (a skin condition causing flare-ups of red, scaly rashes and thickened, pitted nails) may precede or follow the joint inflammation. The arthritis usually affects joints of the fingers and toes, although other joints, including the hips and spine, are often affected as well. The joints may become swollen and deformed when inflammation is chronic. The skin and joint symptoms may appear and disappear together. The prognosis for psoriatic arthritis is usually better than that for rheumatoid arthritis because fewer joints are affected. Nonetheless, the joints can be severely damaged.

[0009] A chronic, recurring disorder of unknown cause, discoid lupus erythematosus, is characterized by clearly defined round, red patches on the skin. The disorder is more common in females, most often women in their 30s. The characteristic rash may persist or may come and go for years and the appearance of the patches changes over time. Mouth sores are very common. If the disorder isn't treated, each patch gradually spreads outward. The central area degenerates, leaving a scar. In particularly scaly areas, the plugged hair follicles dilate, leaving pits shaped like carpet tacks. Scarring can cause widespread hair loss. The rash may be accompanied by achy joints and a decreased number of white blood cells but is only infrequently accompanied by the more severe symptoms of systemic lupus erythematosus.

[0010] Systemic lupus erythematosus (lupus) is an autoimmune disease that results in episodes of inflammation in joints, tendons, and other connective tissues and organs. Different tissues and organs become inflamed in different people, and the severity of the disease ranges from mild to debilitating, depending on the number and variety of antibodies that appear and the organs affected. About 90 percent of the people who have lupus are young women in their late teens to 30s, but children, mostly girls, and older men and women can also be affected. Occasionally, certain heart drugs (hydralazine, procainamide, and beta-blockers) can cause a lupus-like syndrome that disappears after the drug is discontinued. The number and variety of antibodies that can appear in lupus are greater than those in any other disease, and they, along with other unknown factors, determine which symptoms develop. Lupus can be quite mild, or it can be devastating, disabling, or fatal. Because symptoms vary greatly, lupus may resemble many other diseases. For example, the connective tissue of joints is commonly affected in lupus, and the arthritis that results may resemble rheumatoid arthritis. Lupus may resemble epilepsy or some psychologic disorders when the brain is affected. Although lupus can be chronic and ongoing, it usually flares up intermittently. What triggers a flare-up of lupus in people who are predisposed to it often isn't known, although sunlight seems to be one factor. About 90 percent of people with lupus have joint inflammation, which ranges from intermittent mild aches to severe arthritis in several joints. Years of joint symptoms may precede other symptoms. Long-standing joint inflammation can lead to deformity and permanent damage to the joint and surrounding tissue, but the bone doesn't erode as it does in rheumatoid arthritis.

[0011] A chronic disease of unknown cause, Scleroderma (systemic scleroisis), is characterized by degenerative changes and scarring in the skin, joints, and internal organs and by blood vessel abnormalities. Fortunately, scleroderma is relatively rare. Approximately 300,000 people in the United States have the condition, which is more common in women, and those between the ages of 20 and 40. This disease is not contagious, nor is it inherited. Scleroderma results from an overproduction of collagen, the main supportive (connective tissue) protein in the body. While several theories exist as to why this occurs, no definitive cause has been established. Scleroderma may occur as part of mixed connective tissue disease. The usual initial symptoms are thickening and swelling of the ends of the fingers. Raynaud's phenomenon, in which the fingers suddenly become very pale and tingle or become numb in response to cold or emotional upset, is also common. Aches and pains in several joints often accompany early symptoms. Heartburn, difficulty in swallowing, and shortness of breath are occasionally the first symptoms of scleroderma, but usually they appear later, if the esophagus, heart, and lungs become damaged.

[0012] The CREST syndrome, also called limited cutaneous sclerosis (scleroderma), is usually a less severe form of the disease that's less likely to cause serious internal organ damage. The acronym CREST applies to the following manifestations: calcinosis (calcification in the skin); Raynaud's phenomenon (a sequence of color changes in the skin in response to cold); esophageal dysfunction (such as reflux or difficulty in swallowing); sclerodactyly (hardening of the skin of the fingers or toes); and telangiectasia (dilatation of tiny blood vessels, particularly of the skin). Skin damage is limited to the fingers. People who have the CREST syndrome can develop pulmonary hypertension, which can cause heart and respiratory failure. The course of scleroderma is variable and unpredictable. Sometimes scleroderma worsens rapidly and becomes fatal. At other times, it affects only the skin for decades before affecting internal organs, although some damage to internal organs such as the esophagus is almost inevitable, even in the CREST syndrome. The prognosis is worst for those who have early symptoms of heart, lung, or kidney damage. No drug can stop the progression of scleroderma.

[0013] A chronic inflammatory disorder characterized by excessive dryness of the eyes, mouth, and other mucous membranes, is Sjögren's syndrome. This syndrome is often associated with other symptoms more characteristic of rheumatoid arthritis or systemic lupus erythematosus (lupus). Sjögren's syndrome is thought to be an autoimmune disease, but its cause isn't known. It's less common than rheumatoid arthritis and more prevalent in women than in men. Lymphoma, a cancer of the lymphatic system, is 44 times more common in people who have Sjögren's syndrome than in the general population. The prognosis depends on the potential of the antibodies to damage vital organs. Rarely, pneumonia, kidney failure, or lymphoma is fatal. No cure for Sjögren's syndrome is available, but symptoms can be relieved.

[0014] Polymyositis is a chronic connective tissue disease characterized by painful inflammation and degeneration of the muscles; dermatomyositis is polymyositis accompanied by skin inflammation. These diseases result in disabling muscle weakness and deterioration. The weakness typically occurs in the shoulders and hips but can affect muscles symmetrically throughout the body. Polymyositis and dermatomyositis usually occur in adults from ages 40 to 60 or in children from ages 5 to 15 years. Women are twice as likely as men to develop either disease. In adults, these diseases may occur alone or as part of other connective tissue diseases. The cause is unknown. Viruses or autoimmune reactions may play a role. Cancer may also trigger the diseases-an autoimmune reaction against cancer may be directed against a substance in the muscles as well. Symptoms, which may begin during or just after an infection, include muscle weakness (particularly in the upper arms, hips, and thighs), muscle and joint pain, Raynaud's phenomenon, a rash, difficulty in swallowing, a fever, fatigue, and weight loss. In dermatomyositis, rashes tend to appear at the same time as periods of muscle weakness and other symptoms.

[0015] Mixed connective tissue disease is a collection of symptoms similar to those of several connective tissue diseases: systemic lupus erythematosus, scleroderma, polymyositis, and dermatomyositis. About 80 percent of the people who have this disease are women. It affects people from ages 5 to 80. Its cause is unknown, though an autoimmune reaction is likely. The typical symptoms are Raynaud's phenomenon (hands and feet that become white in spots and painful when chilled), joint aches or arthritis, swollen hands, muscle weakness, difficulty in swallowing, heartburn, and shortness of breath. Raynaud's phenomenon may precede other symptoms by many years. Regardless of how this disease starts, it tends to worsen, and symptoms spread to several parts of the body. Mixed connective tissue disease damages the muscle fibers, so the muscles may feel weak and sore, especially in the shoulders and hips. Although the esophagus is usually affected, it seldom causes difficulty in swallowing and isn't painful. Fluid may collect in or around the lungs. In some people, lung dysfunction is the most serious problem, causing shortness of breath during exertion and heart strain. Sjögren's syndrome may develop. Over time, most people develop symptoms that are more typical of lupus or scleroderma.

[0016] Relapsing polychondritis is an uncommon disorder characterized by episodes of painful, destructive inflammation of the cartilage and other connective tissues in the ears, joints, nose, voice box (larynx), windpipe (trachea), bronchi, eyes, heart valves, kidneys, and blood vessels. This disorder affects men and women equally, usually in middle age.

[0017] Vasculitis is an inflammation of blood vessels. Vasculitis is not a disease but rather a disease process that occurs in a number of autoimmune connective tissue diseases, such as rheumatoid arthritis and systemic lupus erythematosus. Vasculitis can also occur without connective tissue involvement. No one knows what triggers vasculitis in most people, but in some, hepatitis viruses are involved. Cells of the immune system, which cause inflammation, surround and infiltrate the affected blood vessels, destroying them and possibly damaging the tissues they supply. The blood vessels can become leaky or clogged; either condition disrupts blood flow to nerves, organs, and other parts of the body. Symptoms may result from direct damage to the blood vessels or damage to tissues whose blood supply is impaired. Vasculitis may be limited to veins, large arteries, small arteries, or capillaries, or it may be limited to vessels in one part of the body, such as the head, leg, or kidney. Disorders such as the Henoch-Schönlein syndrome, erythema nodosum, polyarteritis nodosa, temporal (giant cell) arteritis, and Takayasu's arteritis are characterized by vasculitis limited to blood vessels of a particular size or depth.

[0018] Polyarteritis nodosa is a disease in which segments of medium-sized arteries become inflamed and damaged, reducing the blood supply to the organs they supply. This disease is often fatal if not treated adequately. It usually develops at 40 to 50 years of age but can occur at any age. Men are three times more likely than women to develop it. Its cause is unknown, but reactions to some drugs and vaccines may cause it. Viral and bacterial infections sometimes appear to trigger the inflammation, but most often no triggering event or substance can be found. The disease can be mild at first but fatal within several months, or it can develop subtly as a chronic debilitating disease.

[0019] Connective tissue disorders futher include, but are not limited to, Wegener's granulomatosis, an uncommon disease that often begins with an inflammation of the lining of the nose, sinuses, throat, or lungs and may progress to an inflammation of blood vessels throughout the body (generalized vasculitis) or fatal kidney disease; Reiter's syndrome, an inflammation of the joints and tendon attachments at the joints, often accompanied by an inflammation of the eye's conjunctiva and the mucous membranes, such as those of the mouth, urinary tract, vagina, and penis, and by a distinctive rash; Behçet's syndrome, a chronic, relapsing inflammatory disease that can produce recurring, painful mouth sores, skin blisters, genital sores, and swollen joints; and Ankylosing spondylitis, a disease characterized by an inflammation of the spine and large joints, resulting in stiffness and pain.

[0020] Connective disorders can also involve the skin. For example, cellulitis, is an acute noncontagious inflammation of the connective tissue of the skin, resulting from Staphylococcus, Streptococcus, or other bacterial infection. Keloids develop from an overgrowth of scar tissue at the site of a skin injury.

[0021] Ehler Danlos syndrome is one of the inheritable connective tissues disorders along with: Marfan syndrome, pseudoxantoma elasticum, osteogenese imperfecta, chondrodysplasias, epidermolysis bullosa and Alport syndrome. It comprises a group of ten different subtypes. The main clinical manifestations are skin fragility, abnormal scar formation, excessive bruising, joint laxity and sometimes rupture of viscera and arteries. The basic defect is in the synthesis of collagen type I and III, leading to low tensile strength of skin and artery wall.

[0022] Cutis laxa is a rare, inherited or acquired connective tissue disorder in which skin becomes inelastic and hangs loosely in folds. Clinical presentation and the mode of inheritance show considerable heterogeneity; and autosomal dominant, autosomal recessive, and X-linked recessive patterns have been noted in inherited forms. The precise cause is unknown, but may be due to abnormal elastin metabolism resulting in markedly reduced dermal elastin content.

[0023] The discovery of new human connective tissue associated polynucleotides, the polypeptides encoded by them, and antibodies that immunospecifically bind these polypeptides, satisfies a need in the art by providing new compositions which are useful in the diagnosis, treatment, prevention and/or prognosis of disorders of connective tissues, including, but not limited to, rheumatoid arthritis, psoriatic arthritis, discoid lupus erythematosus, systemic lupus erythematosus, scleroderma, CREST syndrome, Sjogren's syndrome, polymyositis, dermatomyositis, mixed connective tissue disease, relapsing polychondritis, vasculitis, Henoch-Schonlein syndrome, erythema nodosum, polyarteritis nodosa, temporal (giant cell) arteritis, Takayasu's arteritis, Wegener's granulomatosis, Reiter's syndrome, Behcet's syndrome, ankylosing spondylitis, cellulitis, keloids, Ehler Danlos syndrome, Marfan syndrome, pseudoxantoma elasticum, osteogenese imperfecta, chondrodysplasias, epidermolysis bullosa, Alport syndrome, cutis laxa, genetic disorders affecting skeleton, skin and muscles; formation of excessive scar tissue; deposition of pathological amounts of connective tissue in body organs, including kidney, intestines and heart, and in liver by liver cirrhosis, in skin by scleroderma, in lung by lung fibrosis, in bone marrow by leukemia, in blood vessels by atherosclerosis, and in joints by rheumatic diseases.

### SUMMARY OF THE INVENTION

[0024] The present invention relates to novel connective tissue related polynucleotides, the polypeptides encoded by these polynucleotides herein collectively referred to as “connective tissue antigens,” and antibodies that immunospecifically bind these polypeptides, and the use of such connective tissue polynucleotides, antigens, and antibodies for detecting, treating, preventing and/or prognosing disorders of the connective tissue, including, but not limited to, the presence of cancer and cancer metastases. More specifically, isolated connective tissue nucleic acid molecules are provided encoding novel connective tissue polypeptides. Novel connective tissue polypeptides and antibodies that bind to these polypeptides are provided. Also provided are vectors, host cells, and recombinant and synthetic methods for producing human connective tissue polynucleotides, polypeptides, and/or antibodies. The invention further relates to diagnostic and therapeutic methods useful for diagnosing, treating, preventing and/or prognosing disorders related to connective tissue, including cancer, and therapeutic methods for treating such disorders. The invention further relates to screening methods for identifying agonists and antagonists of polynucleotides and polypeptides of the invention. The invention further relates to methods and/or compositions for inhibiting or promoting the production and/or function of the polypeptides of the invention.

### DETAILED DESCRIPTION

[0025] Tables

[0026] Table 1A summarizes some of the polynucleotides encompassed by the invention (including cDNA clones related to the sequences (Clone ID NO:Z), contig sequences (contig identifier (Contig ID:) and contig nucleotide sequence identifier (SEQ ID NO:X)) and further summarizes certain characteristics of these polynucleotides and the polypeptides encoded thereby. The first column provides a unique clone identifier, “Clone ID NO:Z”, for a cDNA plasmid related to each connective tissue associated contig sequence disclosed in Table 1A. The second column provides a unique contig identifier, “Contig ID:” for each of the contig sequences disclosed in Table 1A. The third column provides the sequence identifier, “SEQ ID NO:X”, for each of the contig polynucleotide sequences disclosed in Table 1A. The fourth column, “ORF (From-To)”, provides the location (i.e., nucleotide position numbers) within the polynucleotide sequence of SEQ ID NO:X that delineate the preferred open reading frame (ORF) shown in the sequence listing and referenced in Table 1A as SEQ ID NO:Y (column 5). Column 6 lists residues comprising predicted epitopes contained in the polypeptides encoded by each of the preferred ORFs (SEQ ID NO:Y). Identification of potential immunogenic regions was performed according to the method of Jameson and Wolf (CABIOS, 4:181-186 (1988)); specifically, the Genetics Computer Group (GCG) implementation of this algorithm, embodied in the program PEPTIDESTRUCTURE (Wisconsin Package v10.0, Genetics Computer Group (GCG), Madison, Wis.). This method returns a measure of the probability that a given residue is found on the surface of the protein. Regions where the antigenic index score is greater than 0.9 over at least 6 amino acids are indicated in Table 1A as “Predicted Epitopes.” In particular embodiments, connective tissue associated polypeptides of the invention comprise, or alternatively consist of, one, two, three, four, five or more of the predicted epitopes described in Table 1A. It will be appreciated that depending on the analytical criteria used to predict antigenic determinants, the exact address of the determinant may vary slightly. Column 7, “Tissue Distribution” shows the expression profile of tissue, cells, and/or cell line libraries which express the polynucleotides of the invention. The first number in column 7 (preceding the colon), represents the tissue/cell source identifier code corresponding to the code and description provided in Table 4. Expression of these polynucleotides was not observed in the other tissues and/or cell libraries tested. For those identifier codes in which the first two letters are not “AR”, the second number in column 7 (following the colon), represents the number of times a sequence corresponding to the reference polynucleotide sequence (e.g., SEQ ID NO:X) was identified in the tissue/cell source. Those tissue/cell source identifier codes in which the first two letters are “AR” designate information generated using DNA array technology. Utilizing this technology, cDNAs were amplified by PCR and then transferred, in duplicate, onto the array. Gene expression was assayed through hybridization of first strand cDNA probes to the DNA array. cDNA probes were generated from total RNA extracted from a variety of different tissues and cell lines. Probe synthesis was performed in the presence of ³³P dCTP, using oligo(dT) to prime reverse transcription. After hybridization, high stringency washing conditions were employed to remove non-specific hybrids from the array. The remaining signal, emanating from each gene target, was measured using a Phosphorimager. Gene expression was reported as Phosphor Stimulating Luminescence (PSL) which reflects the level of phosphor signal generated from the probe hybridized to each of the gene targets represented on the array. A local background signal subtraction was performed before the total signal generated from each array was used to normalize gene expression between the different hybridizations. The value presented after “[array code]:” represents the mean of the duplicate values, following background subtraction and probe normalization. One of skill in the art could routinely use this information to identify normal and/or diseased tissue(s) which show a predominant expression pattern of the corresponding polynucleotide of the invention or to identify polynucleotides which show predominant and/or specific tissue and/or cell expression. Column 8, “Cytologic Band,” provides the chromosomal location of polynucleotides corresponding to SEQ ID NO:X. Chromosomal location was determined by finding exact matches to EST and cDNA sequences contained in the NCBI (National Center for Biotechnology Information) UniGene database. Given a presumptive chromosomal location, disease locus association was determined by comparison with the Morbid Map, derived from Online Mendelian Inheritance in Man (Online Mendelian Inheritance in Man, OMIM™. McKusick-Nathans Institute for Genetic Medicine, Johns Hopkins University (Baltimore, Md.) and National Center for Biotechnology Information, National Library of Medicine (Bethesda, Md.) 2000. World Wide Web URL: http://www.ncbi.nlm.nih.gov/omim/). If the putative chromosomal location of the Query overlapped with the chromosomal location of a Morbid Map entry, an OMIM identification number is provided in Table 1A, column 9 labeled “OMIM Disease Reference(s)”. A key to the OMIM reference identification numbers is provided in Table 5.

[0027] Table 2 summarizes homology and features of some of the polypeptides of the invention. The first column provides a unique clone identifier, “Clone ID NO:Z”, corresponding to a cDNA disclosed in Table 1A. The second column provides the unique contig identifier, “Contig ID:” corresponding to contigs in Table 1A and allowing for correlation with the information in Table 1A. The third column provides the sequence identifier, “SEQ ID NO:X”, for the contig polynucleotide sequences. The fourth column provides the analysis method by which the homology/identity disclosed in the row was determined. Comparisons were made between polypeptides encoded by the polynucleotides of the invention and either a non-redundant protein database (herein referred to as “NR”), or a database of protein families (herein referred to as “PFAM”) as further described below. The fifth column provides a description of PFAM/NR hits having significant matches to a polypeptide of the invention. Column six provides the accession number of the PFAM/NR hit disclosed in the fifth column. Column seven, “Score/Percent Identity”, provides a quality score or the percent identity, of the hit disclosed in column five. Columns 8 and 9, “NT From” and “NT To” respectively, delineate the polynucleotides in “SEQ ID NO:X” that encode a polypeptide having a significant match to the PFAM/NR database as disclosed in the fifth column. In specific embodiments, polypeptides of the invention comprise, or alternatively consist of, an amino acid sequence encoded by the polynucleotides in SEQ ID NO:X as delineated in columns 8 and 9, or fragments or variants thereof.

[0028] Table 3 provides polynucleotide sequences that may be disclaimed according to certain embodiments of the invention. The first column provides a unique clone identifier, “Clone ID NO:Z”, for a cDNA clone related to connective tissue associated contig sequences disclosed in Table 1A. The second column provides the sequence identifier, “SEQ ID NO:X”, for contig polynucleotide sequences disclosed in Table 1A. The third column provides the unique contig identifier, “Contig ID”, for contigs disclosed in Table 1A. The fourth column provides a unique integer ‘a’ where ‘a’ is any integer between 1 and the final nucleotide minus 15 of SEQ ID NO:X, represented as “Range of a”, and the fifth column provides a unique integer ‘b’ where ‘b’ is any integer between 15 and the final nucleotide of SEQ ID NO:X, represented as “Range of b”, where both a and b correspond to the positions of nucleotide residues shown in SEQ ID NO:X, and where b is greater than or equal to a+14. For each of the polynucleotides shown as SEQ ID NO:X, the uniquely defined integers can be substituted into the general formula of a−b, and used to describe polynucleotides which may be preferably excluded from the invention. In certain embodiments, preferably excluded from the polynucleotides of the invention (including polynucleotide fragments and variants as described herein and diagnostic and/or therapeutic uses based on these polynucleotides) are at least one, two, three, four, five, ten, or more of the polynucleotide sequence(s) having the accession number(s) disclosed in the sixth column of this Table (including for example, published sequence in connection with a particular BAC clone). In further embodiments, preferably excluded from the invention are the specific polynucleotide sequence(s) contained in the clones corresponding to at least one, two, three, four, five, ten, or more of the available material having the accession numbers identified in the sixth column of this Table (including for example, the actual sequence contained in an identified BAC clone).

[0029] Table 4 provides a key to the tissue/cell source identifier code disclosed in Table IA, column 7. Column 1 provides the key to the tissue/cell source identifier code disclosed in Table 1A, Column 7. Columns 2-5 provide a description of the tissue or cell source. Codes corresponding to diseased tissues are indicated in column 6 with the word “disease”. The use of the word “disease” in column 6 is non-limiting. The tissue or cell source may be specific (e.g. a neoplasm), or may be disease-associated (e.g., a tissue sample from a normal portion of a diseased organ). Furthermore, tissues and/or cells lacking the “disease” designation may still be derived from sources directly or indirectly involved in a disease state or disorder, and therefore may have a further utility in that disease state or disorder. In numerous cases where the tissue/cell source is a library, column 7 identifies the vector used to generate the library.

[0030] Table 5 provides a key to the OMIM™ reference identification numbers disclosed in Table 1A, column 9. OMIM reference identification numbers (Column 1) were derived from Online Mendelian Inheritance in Man (Online Mendelian Inheritance in Man, OMIM™. McKusick-Nathans Institute for Genetic Medicine, Johns Hopkins University (Baltimore, Md.) and National Center for Biotechnology Information, National Library of Medicine, (Bethesda, Md.) 2000. World Wide Web URL: http://www.ncbi.nlm.nih.gov/omim/). Column 2 provides diseases associated with the cytologic band disclosed in Table 1A, column 8, as determined from the Morbid Map database.

[0031] Table 6 summarizes ATCC Deposits, Deposit dates, and ATCC designation numbers of deposits made with the ATCC in connection with the present application.

[0032] Table 7 shows the cDNA libraries sequenced, tissue source description, vector information and ATCC designation numbers relating to these cDNA libraries.

[0033] Table 8 provides a physical characterization of clones encompassed by the invention. The first column provides the unique clone identifier, “Clone ID NO:Z”, for certain cDNA clones of the invention, as described in Table 1A. The second column provides the size of the cDNA insert contained in the corresponding cDNA clone.

[0034] Definitions

[0035] The following definitions are provided to facilitate understanding of certain terms used throughout this specification.

[0036] In the present invention, “isolated” refers to material removed from its original environment (e.g., the natural environment if it is naturally occurring), and thus is altered “by the hand of man” from its natural state. For example, an isolated polynucleotide could be part of a vector or a composition of matter, or could be contained within a cell, and still be “isolated” because that vector, composition of matter, or particular cell is not the original environment of the polynucleotide. The term “isolated” does not refer to genomic or cDNA libraries, whole cell total or mRNA preparations, genomic DNA preparations (including those separated by electrophoresis and transferred onto blots), sheared whole cell genomic DNA preparations or other compositions where the art demonstrates no distinguishing features of the polynucleotide sequences of the present invention.

[0037] As used herein, a “polynucleotide” refers to a molecule having a nucleic acid sequence encoding SEQ ID NO:Y or a fragment or variant thereof, a nucleic acid sequence contained in SEQ ID NO:X (as described in column 3 of Table 1A) or the complement thereof, a cDNA sequence contained in Clone ID NO:Z (as described in column 1 of Table 1A and contained within a library deposited with the ATCC); a nucleotide sequence encoding the polypeptide encoded by a nucleotide sequence in SEQ ID NO:B as defined in column 6 of Table 1B or a fragment or variant thereof, or a nucleotide coding sequence in SEQ ID NO:B as defined in column 6 of Table 1B or the complement thereof. For example, the polynucleotide can contain the nucleotide sequence of the full length cDNA sequence, including the 5′ and 3′ untranslated sequences, the coding region, as well as fragments, epitopes, domains, and variants of the nucleic acid sequence. Moreover, as used herein, a “polypeptide” refers to a molecule having an amino acid sequence encoded by a polynucleotide of the invention as broadly defined (obviously excluding poly-Phenylalanine or poly-Lysine peptide sequences which result from translation of a polyA tail of asequence corresponding to a cDNA).

[0038] As used herein, a “connective tissue antigen” refers collectively to any polynucleotide disclosed herein (e.g., a nucleic acid sequence contained in SEQ ID NO:X or the complement therof, or cDNA sequence contained in Clone ID NO:Z, or a nucleotide sequence encoding the polypeptide encoded by a nucleotide sequence in SEQ ID NO:B as defined in column 6 of Table 1B, or a nucleotide coding sequence in SEQ ID NO:B as defined in column 6 of Table 1B or the complement thereof and fragments or variants thereof as described herein) or any polypeptide disclosed herein (e.g., an amino acid sequence contained in SEQ ID NO:Y, an amino acid sequence encoded by SEQ ID NO:X, or the complement thereof, an amino acid sequence encoded by the cDNA sequence contained in Clone ID NO:Z, an amino acid sequence encoded by SEQ ID NO:B, or the complement thereof, and fragments or variants thereof as described herein). These connective tissue antigens have been determined to be predominantly expressed in connective tissues, including normal or diseased tissues (as shown in Table 1A column 7 and Table 4).

[0039] In the present invention, “SEQ ID NO:X” was often generated by overlapping sequences contained in multiple clones (contig analysis). A representative clone containing all or most of the sequence for SEQ ID NO:X is deposited at Human Genome Sciences, Inc. (HGS) in a catalogued and archived library. As shown, for example, in column 1 of Table 1A, each clone is identified by a cDNA Clone ID (identifier generally referred to herein as Clone ID NO:Z). Each Clone ID is unique to an individual clone and the Clone ID is all the information needed to retrieve a given clone from the HGS library. Furthermore, certain clones disclosed in this application have been deposited with the ATCC on Oct. 5, 2000, having the ATCC designation numbers PTA 2574 and PTA 2575; and on Jan. 5, 2001, having the depositor reference numbers TS-1, TS-2, AC-1, and AC-2. In addition to the individual cDNA clone deposits, most of the cDNA libraries from which the clones were derived were deposited at the American Type Culture Collection (hereinafter “ATCC”). Table 7 provides a list of the deposited cDNA libraries. One can use the Clone ID NO:Z to determine the library source by reference to Tables 6 and 7. Table 7 lists the deposited cDNA libraries by name and links each library to an ATCC Deposit. Library names contain four characters, for example, “HTWE.” The name of a cDNA clone (Clone ID NO:Z) isolated from that library begins with the same four characters, for example “HTWEP07”. As mentioned below, Table 1A correlates the Clone ID NO:Z names with SEQ ID NO:X. Thus, starting with an SEQ ID NO:X, one can use Tables 1A, 6 and 7 to determine the corresponding Clone ID NO:Z, which library it came from and which ATCC deposit the library is contained in. Furthermore, it is possible to retrieve a given cDNA clone from the source library by techniques known in the art and described elsewhere herein. The ATCC is located at 10801 University Boulevard, Manassas, Va. 20110-2209, USA. The ATCC deposits were made pursuant to the terms of the Budapest Treaty on the international recognition of the deposit of microorganisms for the purposes of patent procedure.

[0040] In specific embodiments, the polynucleotides of the invention are at least 15, at least 30, at least 50, at least 100, at least 125, at least 500, or at least 1000 continuous nucleotides but are less than or equal to 300 kb, 200 kb, 100 kb, 50 kb, 15 kb, 10 kb, 7.5 kb, 5 kb, 2.5 kb, 2.0 kb, or 1 kb, in length. In a further embodiment, polynucleotides of the invention comprise a portion of the coding sequences, as disclosed herein, but do not comprise all or a portion of any intron. In another embodiment, the polynucleotides comprising coding sequences do not contain coding sequences of a genomic flanking gene (i.e., 5′ or 3′ to the gene of interest in the genome). In other embodiments, the polynucleotides of the invention do not contain the coding sequence of more than 1000, 500, 250, 100, 50, 25, 20, 15, 10, 5, 4, 3, 2, or 1 genomic flanking gene(s).

[0041] A “polynucleotide” of the present invention also includes those polynucleotides capable of hybridizing, under stringent hybridization conditions, to sequences contained in SEQ ID NO:X, or the complement thereof (e.g., the complement of any one, two, three, four, or more of the polynucleotide fragments described herein), the polynucleotide sequence delineated in columns 8 and 9 of Table 2 or the complement thereof, and/or cDNA sequences contained in Clone ID NO:Z (e.g., the complement of any one, two, three, four, or more of the polynucleotide fragments, or the cDNA clone within the pool of cDNA clones deposited with the ATCC, described herein) and/or the polynucleotide sequence delineated in column 6 of Table 1B or the complement thereof. “Stringent hybridization conditions” refers to an overnight incubation at 42 degree C. in a solution comprising 50% formamide, 5× SSC (750 mM NaCl, 75 mM trisodium citrate), 50 mM sodium phosphate (pH 7.6), 5× Denhardt's solution, 10% dextran sulfate, and 20 μg/ml denatured, sheared salmon sperm DNA, followed by washing the filters in 0.1× SSC at about 65 degree C.

[0042] Also contemplated are nucleic acid molecules that hybridize to the polynucleotides of the present invention at lower stringency hybridization conditions. Changes in the stringency of hybridization and signal detection are primarily accomplished through the manipulation of formamide concentration (lower percentages of formamide result in lowered stringency), salt conditions, or temperature. For example, lower stringency conditions include an overnight incubation at 37 degree C. in a solution comprising 6× SSPE (20× SSPE=3M NaCl; 0.2M NaH₂PO₄; 0.02M EDTA, pH 7.4), 0.5% SDS, 30% formamide, 100 ug/ml salmon sperm blocking DNA; followed by washes at 50 degree C. with 1×SSPE, 0.1% SDS. In addition, to achieve even lower stringency, washes performed following stringent hybridization can be done at higher salt concentrations (e.g. 5× SSC).

[0043] Note that variations in the above conditions may be accomplished through the inclusion and/or substitution of alternate blocking reagents used to suppress background in hybridization experiments. Typical blocking reagents include Denhardt's reagent, BLOTTO, heparin, denatured salmon sperm DNA, and commercially available proprietary formulations. The inclusion of specific blocking reagents may require modification of the hybridization conditions described above, due to problems with compatibility.

[0044] Of course, a polynucleotide which hybridizes only to polyA+ sequences (such as any 3′ terminal polyA+ tract of a cDNA shown in the sequence listing), or to a complementary stretch of T (or U) residues, would not be included in the definition of “polynucleotide,” since such a polynucleotide would hybridize to any nucleic acid molecule containing a poly (A) stretch or the complement thereof (e.g., practically any double-stranded cDNA clone generated using oligo dT as a primer).

[0045] The polynucleotide of the present invention can be composed of any polyribonucleotide or polydeoxribonucleotide, which may be unmodified RNA or DNA or modified RNA or DNA. For example, polynucleotides can be composed of single- and double-stranded DNA, DNA that is a mixture of single- and double-stranded regions, single- and double-stranded RNA, and RNA that is mixture of single- and double-stranded regions, hybrid molecules comprising DNA and RNA that may be single-stranded or, more typically, double-stranded or a mixture of single- and double-stranded regions. In addition, the polynucleotide can be composed of triple-stranded regions comprising RNA or DNA or both RNA and DNA. A polynucleotide may also contain one or more modified bases or DNA or RNA backbones modified for stability or for other reasons. “Modified” bases include, for example, tritylated bases and unusual bases such as inosine. A variety of modifications can be made to DNA and RNA; thus, “polynucleotide” embraces chemically, enzymatically, or metabolically modified forms.

[0046] The polypeptide of the present invention can be composed of amino acids joined to each other by peptide bonds or modified peptide bonds, i.e., peptide isosteres, and may contain amino acids other than the 20 gene-encoded amino acids. The polypeptides may be modified by either natural processes, such as posttranslational processing, or by chemical modification techniques which are well known in the art. Such modifications are well described in basic texts and in more detailed monographs, as well as in a voluminous research literature. Modifications can occur anywhere in a polypeptide, including the peptide backbone, the amino acid side-chains and the amino or carboxyl termini. It will be appreciated that the same type of modification may be present in the same or varying degrees at several sites in a given polypeptide. Also, a given polypeptide may contain many types of modifications. Polypeptides may be branched, for example, as a result of ubiquitination, and they may be cyclic, with or without branching. Cyclic, branched, and branched cyclic polypeptides may result from posttranslation natural processes or may be made by synthetic methods. Modifications include acetylation, acylation, ADP-ribosylation, amidation, covalent attachment of flavin, covalent attachment of a heme moiety, covalent attachment of a nucleotide or nucleotide derivative, covalent attachment of a lipid or lipid derivative, covalent attachment of phosphotidylinositol, cross-linking, cyclization, disulfide bond formation, demethylation, formation of covalent cross-links, formation of cysteine, formation of pyroglutamate, formylation, gamma-carboxylation, glycosylation, GPI anchor formation, hydroxylation, iodination, methylation, myristoylation, oxidation, pegylation, proteolytic processing, phosphorylation, prenylation, racemization, selenoylation, sulfation, transfer-RNA mediated addition of amino acids to proteins such as arginylation, and ubiquitination. (See, for instance, PROTEINS—STRUCTURE AND MOLECULAR PROPERTIES, 2nd Ed., T. E. Creighton, W. H. Freeman and Company, New York (1993); POSTTRANSLATIONAL COVALENT MODIFICATION OF PROTEINS, B. C. Johnson, Ed., Academic Press, New York, pgs. 1-12 (1983); Seifter et al., Meth. Enzymol. 182:626-646 (1990); Rattan et al., Ann. N.Y. Acad. Sci. 663:48-62 (1992).)

[0047] “SEQ ID NO:X” refers to a polynucleotide sequence described, for example, in Tables 1A or 2, while “SEQ ID NO:Y” refers to a polypeptide sequence described in column 5 of Table 1A. SEQ ID NO:X is identified by an integer specified in column 3 of Table 1A. The polypeptide sequence SEQ ID NO:Y is a translated open reading frame (ORF) encoded by polynucleotide SEQ ID NO:X. “Clone ID NO:Z” refers to a cDNA clone described in column 1 of Table 1A.

[0048] “A polypeptide having biological activity” refers to a polypeptide exhibiting activity similar to, but not necessarily identical to, an activity of a polypeptide of the present invention, including mature forms, as measured in a particular biological assay, with or without dose dependency. In the case where dose dependency does exist, it need not be identical to that of the polypeptide, but rather substantially similar to the dose-dependence in a given activity as compared to the polypeptide of the present invention (i.e., the candidate polypeptide will exhibit greater activity or not more than about 25-fold less and, preferably, not more than about tenfold less activity, and most preferably, not more than about three-fold less activity relative to the polypeptide of the present invention).

[0049] Table 1A summarizes some of the polynucleotides encompassed by the invention (including contig sequences (SEQ ID NO:X) and clones (Clone ID NO:Z) and further summarizes certain characteristics of these polynucleotides and the polypeptides encoded thereby.

[0050] Polynucleotides and Polypeptides

TABLE 1A

| | | | | AA | | Tissue Distribution | | |
|---|---|---|---|---|---|---|---|---|
| | | | | SEQ | | Library code: count | | OMIM |
| Clone ID | Contig | SEQ ID | ORF | ID | | (see Table IV for | Cytologic | Disease |
| NO: Z | ID: | NO: X | (From-To) | NO: Y | Predicted Epitopes | Library Codes) | Band | Reference(s): |
| HABGB54 | 952557 | 11 | 1-156 | 500 | | S0348: 5 | | |
| HACAD23 | 926345 | 12 | 3-341 | 501 | Gln-25 to Lys-30. | AR050: 11, AR054: | | |
| | | | | | | 11, AR051: 10 | | |
| | | | | | | H0593: 2, S6022: 1, | | |
| | | | | | | L0435: 1 and L0438: 1. | | |
| | 926346 | 492 | 1-213 | 981 | Gly-1 to Ala-6. | | | |
| HACAI48 | 575814 | 13 | 3-200 | 502 | | S6022: 2 | | |
| HACBA49 | 722875 | 14 | 253-426 | 503 | Ser-11 to Gly-16, | S0280: 2 | | |
| | | | | | Gln-21 to Ser-26. | | | |
| HACBT81 | 855720 | 15 | 75-323 | 504 | Gly-20 to Asp-30, | S0280: 2 | | |
| | | | | | Ser-36 to Gly-59. | | | |
| HACCY20 | 845144 | 16 | 15-356 | 505 | | S0280: 3 | | |
| HADAM37 | 731696 | 17 | 161-319 | 506 | Ser-6 to Asn-16. | H0427: 2 | | |
| HADAM69 | 699190 | 18 | 198-353 | 507 | Ile-1 to Pro-7, | H0427: 2 | | |
| | | | | | Lys-28 to Thr-33. | | | |
| HADAR35 | 705743 | 19 | 3-158 | 508 | Gly-32 to Thr-42. | H0427: 3 | | |
| HADCK83 | 609846 | 20 | 172-540 | 509 | Phe-9 to Lys-14, | H0427: 2 | | |
| | | | | | Ser-87 to Ile-93, | | | |
| | | | | | Lys-113 to His-123. | | | |
| | 883471 | 493 | 196-2 | 982 | Arg-10 to Asn-19, | | | |
| | | | | | Pro-25 to Phe-31, | | | |
| | | | | | Asn-35 to Phe-48. | | | |
| HADCL22 | 674427 | 21 | 182-334 | 510 | Cys-20 to Lys-28, | L0769: 4 and H0427: | | |
| | | | | | Cys-36 to Gly-41. | 2. | | |
| HADCO14 | 657572 | 22 | 61-288 | 511 | Lys-1 to Leu-8, | H0427: 2 | | |
| | | | | | Lys-25 to Gly-32, | | | |
| | | | | | Pro-62 to Gly-71. | | | |
| HADCO44 | 716559 | 23 | 65-202 | 512 | | H0427: 2 | | |
| HADCO48 | 865306 | 24 | 13-183 | 513 | Asn-14 to Val-19. | H0427: 2 | | |
| HADCO54 | 467197 | 25 | 198-368 | 514 | Val-15 to Glu-27. | H0427: 2 | | |
| HADCO57 | 734705 | 26 | 1-147 | 515 | | H0427: 2 | | |
| HADCQ37 | 970564 | 27 | 2-556 | 516 | | H0427: 2 and H0600: | | |
| | | | | | | 1. | | |
| HADCU18 | 666360 | 28 | 2-448 | 517 | His-9 to Pro-15, | H0427: 2 | | |
| | | | | | Met-34 to Gln-39, | | | |
| | | | | | Pro-68 to Arg-73, | | | |
| | | | | | Lys-105 to Gln-118, | | | |
| | | | | | Gln-130 to Ala-135. | | | |
| HADCW65 | 719810 | 29 | 111-272 | 518 | | H0427: 2 | | |
| HADCX38 | 705751 | 30 | 161-325 | 519 | Arg-13 to Leu-20. | H0427: 2 | | |
| HADDB75 | 757028 | 31 | 188-433 | 520 | Asn-69 to Gly-81. | H0587: 1 and H0427: | | |
| | | | | | | 1. | | |
| HADDC66 | 787301 | 32 | 303-485 | 521 | Lys-28 to Arg-34. | H0427: 2 | | |
| HADDE78 | 773552 | 33 | 131-319 | 522 | Phe-36 to Ser-43. | H0427: 2 | | |
| HADDF89 | 786876 | 34 | 1-165 | 523 | Thr-12 to Cys-21, | H0427: 2 | | |
| | | | | | Glu-28 to Glu-39. | | | |
| HADDQ25 | 849002 | 35 | 129-386 | 524 | Arg-1 to Cys-8, | H0427: 2 | | |
| | | | | | Cys-28 to Arg-34. | | | |
| HADEU56 | 733346 | 36 | 300-473 | 525 | Pro-47 to Asn-55. | H0427: 2 | | |
| HADFG58 | 727536 | 37 | 8-187 | 526 | Arg-1 to Gln-6, | H0427: 2 | | |
| | | | | | Thr-26 to Glu-31, | | | |
| | | | | | Arg-52 to Lys-58. | | | |
| HADFX30 | 970565 | 38 | 1-420 | 527 | Arg-1 to Pro-8. | H0427: 3 | | |
| HADFX35 | 675830 | 39 | 154-360 | 528 | Thr-35 to Asn-44. | H0427: 2 | | |
| HADGA36 | 705766 | 40 | 3-155 | 529 | Ser-23 to Gly-30. | H0427: 2 and L0662: | | |
| | | | | | | 1. | | |
| HADGD54 | 729761 | 41 | 1-183 | 530 | Pro-9 to Pro-14. | T0060: 1 and H0427: | | |
| | | | | | | 1. | | |
| HADGE37 | 744768 | 42 | 1-261 | 531 | | H0600: 1 and H0427: | | |
| | | | | | | 1. | | |
| HADGR61 | 848971 | 43 | 210-467 | 532 | Pro-13 to Ser-18. | H0427: 3 | | |
| HADXA61 | 741926 | 44 | 204-302 | 533 | Gln-27 to Gly-32. | H0443: 2 | | |
| HARMG09 | 705996 | 45 | 49-222 | 534 | | H0592: 2 | | |
| HARMG60 | 933284 | 46 | 1-165 | 535 | | H0592: 2 | | |
| HARMM43 | 714763 | 47 | 3-251 | 536 | | H0592: 2 | | |
| HARMP39 | 705255 | 48 | 329-598 | 537 | Asn-1 to Tyr-7. | H0592: 2 | | |
| HARMP42 | 713247 | 49 | 292-453 | 538 | | H0592: 2 | | |
| HARMS39 | 933273 | 50 | 3-494 | 539 | Ser-1 to Leu-11, | H0592: 1 and H0587: | | |
| | | | | | Ser-67 to Phe-73, | 1. | | |
| | | | | | Ser-112 to Ser-120. | | | |
| HARMS77 | 752659 | 51 | 2-184 | 540 | | H0592: 2 | | |
| HARMU03 | 923179 | 52 | 41-145 | 541 | | H0592: 2 | | |
| HARMX01 | 915475 | 53 | 131-394 | 542 | Asn-18 to Arg-25, | H0592: 2, L0385: 1 | | |
| | | | | | Ile-48 to Ala-53, | and L0731: 1. | | |
| | | | | | Gln-78 to Thr-84. | | | |
| HARMX35 | 759963 | 54 | 3-284 | 543 | Lys-1 to Pro-6, | H0592: 2 | | |
| | | | | | Lys-8 to Lys-15, | | | |
| | | | | | Phe-33 to Ile-40, | | | |
| | | | | | Asn-50 to Glu-58. | | | |
| HARNC40 | 710613 | 55 | 143-268 | 544 | Ser-21 to Gly-28. | H0592: 2 | | |
| HARND80 | 864604 | 56 | 3-623 | 545 | Phe-47 to Val-57, | H0592: 1, H0586: 1 | | |
| | | | | | Leu-68 to Asn-78, | and L0749: 1. | | |
| | | | | | Trp-104 to Gly-110. | | | |
| HARNH15 | 687972 | 57 | 374-568 | 546 | Tyr-2 to Pro-7, | H0592: 2 | | |
| | | | | | Cys-11 to Ser-16. | | | |
| HARNH52 | 726277 | 58 | 1-132 | 547 | | H0592: 2 | | |
| HARNO29 | 690043 | 59 | 392-219 | 548 | | H0592: 2 | | |
| HAWAD93 | 508724 | 60 | 2-190 | 549 | Thr-1 to Trp-7. | T0060: 2 | | |
| HAWAP49 | 537199 | 61 | 226-375 | 550 | | H0587: 1, T0060: 1, | | |
| | | | | | | T0004: 1, L0667: 1 and | | |
| | | | | | | L0750: 1. | | |
| HBIMG05 | 930827 | 62 | 3-518 | 551 | | H0494: 1 and H0593: | | |
| | | | | | | 1. | | |
| HBIMS01 | 913827 | 63 | 379-570 | 552 | | H0494: 1 and H0593: | | |
| | | | | | | 1. | | |
| HBIOO63 | 969020 | 64 | 1-261 | 553 | Gly-1 to Gly-6, | H0593: 2 | | |
| | | | | | His-23 to Gly-28, | | | |
| | | | | | Ser-41 to Leu-51, | | | |
| | | | | | Thr-53 to Ser-65. | | | |
| HBIOP02 | 918022 | 65 | 28-111 | 554 | | H0593: 2 | | |
| HBIOS05 | 930776 | 66 | 3-437 | 555 | Met-44 to Gly-49, | AR089: 4, AR061: 2 | | |
| | | | | | Gln-105 to Gln-120. | H0593: 4 | | |
| HBIOX83 | 965609 | 67 | 55-315 | 556 | Thr-8 to Val-19, | H0593: 4 and H0023: | | |
| | | | | | Arg-62 to Thr-76. | 1. | | |
| HERAC86 | 973654 | 68 | 416-685 | 557 | Pro-1 to Phe-14, | H0345: 2 | | |
| | | | | | Ala-25 to Arg-31, | | | |
| | | | | | Glu-44 to Gln-49. | | | |
| HERAC92 | 973454 | 69 | 225-422 | 558 | Asn-8 to Lys-24, | H0345: 2 | | |
| | | | | | Ala-45 to Phe-53. | | | |
| HERAD04 | 927788 | 70 | 109-300 | 559 | | H0345: 2 | | |
| HERAD10 | 973489 | 71 | 228-374 | 560 | His-1 to Ser-17, | H0345: 2 | | |
| | | | | | Ser-29 to Gly-38. | | | |
| HERAD21 | 954708 | 72 | 2-268 | 561 | Ala-1 to Gln-17, | H0345: 2 | | |
| | | | | | Pro-56 to Thr-62. | | | |
| HERAG57 | 973668 | 73 | 50-196 | 562 | Ser-1 to Trp-7, | H0345: 2 | | |
| | | | | | Tyr-17 to Ser-22. | | | |
| HERAJ78 | 973676 | 74 | 392-589 | 563 | | H0345: 2 | | |
| HERAL93 | 974497 | 75 | 250-534 | 564 | Lys-1 to Cys-17. | H0345: 2 | | |
| HERAM84 | 529193 | 76 | 1-180 | 565 | Thr-6 to Gly-12, | H0345: 2 | | |
| | | | | | Ala-42 to Arg-48. | | | |
| HERAN13 | 973709 | 77 | 360-542 | 566 | Lys-32 to Lys-37, | H0345: 2 | | |
| | | | | | Gln-46 to Asn-51. | | | |
| HERAR12 | 735275 | 78 | 240-326 | 567 | | H0345: 2 | | |
| HESAD92 | 537451 | 79 | 229-381 | 568 | | H0086: 2 | | |
| HESAT22 | 537449 | 80 | 110-352 | 569 | Arg-1 to Lys-14, | H0086: 2 | | |
| | | | | | Pro-19 to Gly-29, | | | |
| | | | | | Glu-32 to Glu-60. | | | |
| HESAT88 | 537446 | 81 | 136-222 | 570 | | H0086: 2 | | |
| HFEAG37 | 705454 | 82 | 89-193 | 571 | Leu-5 to Val-12, | H0081: 2 | | |
| | | | | | Ala-23 to Gly-34. | | | |
| HFEAH35 | 504585 | 83 | 74-259 | 572 | Ala-1 to Thr-7. | H0081: 2 | | |
| HFEAN02 | 932828 | 84 | 51-209 | 573 | | H0081: 2 | | |
| HFEAN43 | 524355 | 85 | 2-163 | 574 | | H0081: 2 | | |
| HFEAO67 | 954402 | 86 | 3-344 | 575 | | H0081: 2 | | |
| HFEAQ11 | 530368 | 87 | 93-242 | 576 | Gly-7 to His-17. | H0081: 2 | | |
| HFEAS89 | 960624 | 88 | 52-309 | 577 | | H0081: 2 | | |
| HFEBB19 | 974533 | 89 | 56-328 | 578 | Gly-1 to Glu-7, | H0081: 2 | | |
| | | | | | Gly-15 to Gly-24, | | | |
| | | | | | Gln-31 to Gly-41. | | | |
| HFEBB35 | 974535 | 90 | 1-336 | 579 | Gly-1 to His-9, | H0081: 2 | | |
| | | | | | Ser-28 to Ser-34, | | | |
| | | | | | Leu-68 to Met-74, | | | |
| | | | | | Ser-81 to Trp-87. | | | |
| HFEBD62 | 789763 | 91 | 210-398 | 580 | Asp-1 toSer-7, | H0081: 1 and H0494: | | |
| | | | | | Ala-19 to Phe-27, | 1. | | |
| | | | | | Asn-40 to Asn-46. | | | |
| HFEBF21 | 974270 | 92 | 237-596 | 581 | Gly-5 to Gly-14, | H0081: 3 | | |
| | | | | | Glu-21 to Asp-27, | | | |
| | | | | | Asp-34 to Cys-39, | | | |
| | | | | | Asn-77 to Pro-83, | | | |
| | | | | | Gly-109 to Arg-118. | | | |
| HFEBG06 | 935683 | 93 | 251-412 | 582 | | H0081: 2 | | |
| HFEBL88 | 766085 | 94 | 12-359 | 583 | | H0586: 1 and H0081: | | |
| | | | | | | 1. | | |
| HFJAA51 | 725626 | 95 | 1-51 | 584 | Glu-1 to Gly-7. | H0548: 2 | | |
| HFJAA62 | 855107 | 96 | 1-330 | 585 | | H0548: 2 | | |
| HKAAU11 | 966953 | 97 | 155-430 | 586 | Leu-4 to Asn-11, | H0586: 1 and H0494: | | |
| | | | | | Tyr-33 to Ala-39. | 1. | | |
| HKABE64 | 879492 | 98 | 242-493 | 587 | Ala-1 to Ala-14. | H0494: 2 | | |
| HKABR48 | 702372 | 99 | 1-504 | 588 | Pro-15 to Gly-21, | H0494: 2, L0751: 2, | | |
| | | | | | Arg-30 to Leu-42, | L0806: 1, L0789: 1 and | | |
| | | | | | Arg-93 to Gln-99, | L0780: 1. | | |
| | | | | | Thr-102 to Gly-108, | | | |
| | | | | | Asp-116 to Thr-121. | | | |
| HKACB30 | 466848 | 100 | 290-469 | 589 | Arg-1 to Tyr-20. | L0754: 2, H0586: 1 | | |
| | | | | | | and H0494: 1. | | |
| HKACG80 | 750256 | 101 | 3-173 | 590 | Pro-1 to Asn-17, | H0494: 2 | | |
| | | | | | Pro-36 to Thr-45, | | | |
| | | | | | Glu-47 to Tyr-52. | | | |
| HKACL95 | 973360 | 102 | 1-396 | 591 | | H0494: 2 | | |
| HKACM63 | 952653 | 103 | 101-352 | 592 | Ser-32 to Gly-38. | H0587: 1 and H0494: | | |
| | | | | | | 1. | | |
| HKACU93 | 908022 | 104 | 2-484 | 593 | Leu-2 to Pro-9, | H0494: 2, L0794: 1 | | |
| | | | | | Arg-14 to His-20, | and L0743: 1. | | |
| | | | | | Arg-26 to Thr-32, | | | |
| | | | | | Met-66 to Thr-75, | | | |
| | | | | | Leu-77 to Lys-82. | | | |
| HKACY54 | 862787 | 105 | 36-269 | 594 | Arg-18 to Leu-31, | H0494: 2 | 11q13 | 102200, |
| | | | | | Leu-56 to Trp-70. | | | 106100, |
| | | | | | | | | 131100, |
| | | | | | | | | 131100, |
| | | | | | | | | 131100, |
| | | | | | | | | 133780, |
| | | | | | | | | 147050, |
| | | | | | | | | 153700, |
| | | | | | | | | 161015, |
| | | | | | | | | 164009, |
| | | | | | | | | 168461, |
| | | | | | | | | 168461, |
| | | | | | | | | 168461, |
| | | | | | | | | 180721, |
| | | | | | | | | 180840, |
| | | | | | | | | 191181, |
| | | | | | | | | 193235, |
| | | | | | | | | 209901, |
| | | | | | | | | 232600, |
| | | | | | | | | 259700, |
| | | | | | | | | 259770, |
| | | | | | | | | 600045, |
| | | | | | | | | 600319, |
| | | | | | | | | 600528, |
| | | | | | | | | 601884 |
| HKADC82 | 944994 | 106 | 155-529 | 595 | Glu-1 to Ser-9, | AR089: 2, AR061: 1 | | |
| | | | | | Asp-38 to Asn-45. | L0766: 5, H0494: 2, | | |
| | | | | | | L0755: 2, L0800: 1, | | |
| | | | | | | L0773: 1 and L0777: 1. | | |
| | 951091 | 494 | 370-194 | 983 | Gln-39 to Ser-44. | | | |
| HKADP74 | 765535 | 107 | 36-470 | 596 | Thr-1 to Gly-7, | H0494: 2 and L0749: | 17 | |
| | | | | | Pro-31 to Met-40, | 1. | | |
| | | | | | Asn-56 to Pro-62. | | | |
| HKAEC04 | 857355 | 108 | 139-351 | 597 | Asp-1 to Gly-13. | H0494: 2 and L0758: | | |
| | | | | | | 1. | | |
| HKAEE60 | 812691 | 109 | 1-147 | 598 | Arg-18 to Glu-25, | H0081: 1 and H0494: | | |
| | | | | | Gly-37 to Ser-42. | 1. | | |
| HKAEP23 | 672808 | 110 | 2-250 | 599 | Gly-3 to Arg-8. | H0592: 1 and H0494: | | |
| | | | | | | 1. | | |
| HKAEV94 | 973353 | 111 | 3-338 | 600 | Thr-1 to Gly-6, | H0494: 2 | | |
| | | | | | Pro-20 to Pro-35. | | | |
| HKAFI36 | 930711 | 112 | 169-2 | 601 | Glu-45 to Lys-56. | S6022: 1, H0494: 1, | | |
| | | | | | | L0662: 1 and L0608: 1. | | |
| HKAFO42 | 713722 | 113 | 94-252 | 602 | | H0427: 1 and H0494: | | |
| | | | | | | 1. | | |
| HKAFZ12 | 970570 | 114 | 34-255 | 603 | | H0494: 2 | | |
| HKAHF84 | 887386 | 115 | 3-332 | 604 | | AR050: 40, AR054: | | |
| | | | | | | 33, AR051: 33 | | |
| | | | | | | S0040: 1 and H0494: 1. | | |
| HKAHI83 | 780669 | 116 | 2-220 | 605 | | H0494: 2 | | |
| HKAHT29 | 958404 | 117 | 1-57 | 606 | Phe-11 to Met-19. | H0494: 2 | | |
| HKAIF25 | 974416 | 118 | 43-225 | 607 | | H0494: 2 | | |
| HKAIL12 | 893937 | 119 | 2-301 | 608 | Pro-1 to Thr-10, | H0494: 2 and H0593: | | |
| | | | | | Pro-45 to Gly-70, | 1. | | |
| | | | | | Pro-72 to Gly-78. | | | |
| HKAIU82 | 779322 | 120 | 2-514 | 609 | Ser-15 to Ser-28, | H0494: 4 | | |
| | | | | | Phe-36 to Gly-42, | | | |
| | | | | | Asp-49 to Ser-58, | | | |
| | | | | | Gly-65 to Pro-89, | | | |
| | | | | | Arg-115 to Gly-122. | | | |
| HKAJG02 | 857330 | 121 | 260-394 | 610 | | H0427: 1, H0494: 1, | | |
| | | | | | | L0520: 1, L0388: 1 and | | |
| | | | | | | L0750: 1. | | |
| HKAJR01 | 915313 | 122 | 94-279 | 611 | | H0494: 5 | | |
| HKAJW52 | 836587 | 123 | 1-171 | 612 | Gly-27 to Gly-32. | H0494: 2 | | |
| HKAKI80 | 973231 | 124 | 282-512 | 613 | Arg-13 to Tyr-20. | H0494: 3 | | |
| HKAKL94 | 782287 | 125 | 3-95 | 614 | Pro-14 to Lys-23. | H0494: 2 | | |
| HKAKP85 | 927032 | 126 | 2-145 | 615 | | H0494: 3 | | |
| HKAOE10 | 963543 | 127 | 157-312 | 616 | | T0004: 1, H0494: 1, | | |
| | | | | | | L0794: 1, L0766: 1 and | | |
| | | | | | | L0439: 1. | | |
| HKAOM71 | 761303 | 128 | 8-310 | 617 | Asn-44 to Ser-56, | H0494: 2 | | |
| | | | | | Asn-62 to Lys-68. | | | |
| HKAON82 | 779247 | 129 | 1-327 | 618 | | H0494: 2 | | |
| HKAOU93 | 791779 | 130 | 113-388 | 619 | Gly-33 to Gly-39. | L0754: 3, H0494: 2, | | |
| | | | | | | L0747: 2, H0586: 1, | | |
| | | | | | | L0598: 1, L0800: 1, | | |
| | | | | | | L0791: 1, L0779: 1 and | | |
| | | | | | | L0777: 1. | | |
| HKAPN78 | 973220 | 131 | 206-457 | 620 | Pro-8 to Ser-23, | H0494: 2 | | |
| | | | | | Val-25 to Gly-31. | | | |
| HOUAT14 | 527920 | 132 | 190-333 | 621 | | S0040: 2 | | |
| HOUBL71 | 527805 | 133 | 146-301 | 622 | | S0040: 2 | | |
| HOUCL76 | 531425 | 134 | 73-144 | 623 | | S0040: 2 | | |
| HOUCR21 | 936034 | 135 | 1-315 | 624 | Gly-1 to Gln-6, | S0040: 2 | | |
| | | | | | Arg-20 to Pro-28, | | | |
| | | | | | Gly-59 to Val-68, | | | |
| | | | | | Thr-82 to Gly-95, | | | |
| | | | | | Ser-98 to Pro-105. | | | |
| HOUCR26 | 573977 | 136 | 79-246 | 625 | Val-15 to Ser-21. | S0040: 2 | 19q | |
| HOUCS27 | 682162 | 137 | 113-352 | 626 | Glu-1 to Cys-6. | S0040: 2 | | |
| HOUCS91 | 526717 | 138 | 3-182 | 627 | | S0040: 3 | | |
| HOUDC46 | 719181 | 139 | 136-309 | 628 | | S0040: 2 | | |
| HOUDJ40 | 573873 | 140 | 9-215 | 629 | | S0040: 2 | | |
| HOUDN50 | 724607 | 141 | 1-72 | 630 | | S0040: 2 | | |
| HOUDX25 | 524248 | 142 | 1-159 | 631 | Gln-1 to Leu-6, | S0040: 2 | | |
| | | | | | Arg-22 to Asn-27, | | | |
| | | | | | Tyr-36 to Ser-43. | | | |
| HOUEN50 | 573874 | 143 | 1-159 | 632 | Tyr-6 to Ser-18. | S0040: 2 | | |
| HOUFB87 | 837251 | 144 | 1023-772 | 633 | Lys-52 to Gly-60, | AR051: 31, AR054: | | |
| | | | | | Ala-67 to Glu-79. | 27, AR050: 23 | | |
| | | | | | | S0040: 2 | | |
| | 838457 | 495 | 277-528 | 984 | Lys-52 to Gly-60, | | | |
| | | | | | Ala-67 to Glu-79. | | | |
| HOUFQ33 | 701762 | 145 | 31-246 | 634 | Cys-3 to Ser-8. | S0040: 2 | | |
| HOUFT79 | 774089 | 146 | 3-227 | 635 | Cys-1 to Lys-14. | S0040: 2 | | |
| HOUFV24 | 676834 | 147 | 57-176 | 636 | | S0040: 2 | | |
| HOUFV31 | 697592 | 148 | 165-521 | 637 | Lys-1 to Ser-8. | S0040: 2 | | |
| HOUFV52 | 840297 | 149 | 248-430 | 638 | Ser-1 to Lys-13, | S0040: 2 | | |
| | | | | | Pro-19 to Asp-26. | | | |
| HOUFW07 | 952632 | 150 | 15-197 | 639 | Trp-19 to His-24, | S0040: 2 | | |
| | | | | | His-39 to Ser-45. | | | |
| HOUFZ64 | 750784 | 151 | 3-161 | 640 | | S0040: 2 | | |
| HOUGD02 | 915761 | 152 | 3-74 | 641 | | S0040: 2 | | |
| HOUGD13 | 656607 | 153 | 12-236 | 642 | Lys-7 to Phe-12. | S0040: 2 | | |
| HOUHU87 | 791044 | 154 | 100-234 | 643 | Asn-26 to Pro-33. | S0342: 2 | | |
| HSTAE16 | 827112 | 155 | 3-281 | 644 | Gly-58 to Thr-65, | H0068: 3 | | |
| | | | | | Ser-72 to Glu-78. | | | |
| HSTAE32 | 508961 | 156 | 122-262 | 645 | | H0068: 2 | | |
| HSTAE39 | 584942 | 157 | 123-275 | 646 | Pro-4 to Pro-10. | H0068: 2 | 2 | |
| HSTAH26 | 861435 | 158 | 294-100 | 647 | | H0068: 2 | | |
| HSTAL08 | 960473 | 159 | 18-290 | 648 | | H0068: 4 | | |
| HSTAL23 | 508812 | 160 | 66-149 | 649 | | H0068: 2 | | |
| HSTAL64 | 508813 | 161 | 241-336 | 650 | | H0068: 3 and L0664: | | |
| | | | | | | 1. | | |
| HSTAL92 | 508820 | 162 | 112-273 | 651 | | H0068: 2 | | |
| HSTAO16 | 508808 | 163 | 174-359 | 652 | Thr-12 to Ser-17, | H0068: 2 | | |
| | | | | | Ser-40 to Arg-50. | | | |
| HSTAP23 | 508802 | 164 | 218-337 | 653 | Asn-1 to Lys-18. | H0068: 2 | | |
| HSTAP31 | 508803 | 165 | 2-136 | 654 | | H0068: 3 | | |
| HSTAP89 | 508805 | 166 | 51-209 | 655 | Phe-1 to Asn-6. | H0068: 3 | | |
| HSTAQ54 | 968671 | 167 | 167-292 | 656 | Tyr-1 to Gly-9. | H0068: 4 | | |
| HSTAQ67 | 508800 | 168 | 54-335 | 657 | Gly-10 to Gly-16, | H0068: 2 | | |
| | | | | | Ser-26 to Trp-34, | | | |
| | | | | | Ser-45 to Gly-54, | | | |
| | | | | | Lys-68 to Tyr-76, | | | |
| | | | | | Lys-81 to Gly-87. | | | |
| HSTAX16 | 508960 | 169 | 2-103 | 658 | Thr-15 to Leu-21. | H0068: 2 | | |
| HSTAX68 | 508797 | 170 | 135-1 | 659 | | H0068: 2 | | |
| HSTAZ54 | 508368 | 171 | 1-336 | 660 | | H0068: 2 | | |
| HSTBC04 | 506961 | 172 | 2-289 | 661 | Ser-7 to Leu-23. | H0068: 2 | 19p13.3 | 108725, |
| | | | | | | | | 120700, |
| | | | | | | | | 133171, |
| | | | | | | | | 136836, |
| | | | | | | | | 145981, |
| | | | | | | | | 147141, |
| | | | | | | | | 164953, |
| | | | | | | | | 188070, |
| | | | | | | | | 600957, |
| | | | | | | | | 601238, |
| | | | | | | | | 601846, |
| | | | | | | | | 602216, |
| | | | | | | | | 602477 |
| HSTBJ41 | 526608 | 173 | 113-211 | 662 | Leu-9 to Arg-19. | H0068: 2 | | |
| HWDAC04 | 927471 | 174 | 112-339 | 663 | His-12 to Tyr-18, | H0600: 2 | | |
| | | | | | Val-51 to Pro-58. | | | |
| HWDAC71 | 752776 | 175 | 26-136 | 664 | | H0600: 2 | | |
| HWDAG13 | 746132 | 176 | 213-368 | 665 | | H0600: 2 | | |
| HWDAN69 | 676671 | 177 | 269-586 | 666 | Glu-15 to Glu-22, | H0600: 2 | | |
| | | | | | Gln-33 to Gly-40. | | | |
| HWDAO04 | 927231 | 178 | 101-223 | 667 | | H0600: 2 and L0776: | | |
| | | | | | | 1. | | |
| HWDAO26 | 679520 | 179 | 2-448 | 668 | Cys-17 to Ser-24. | H0600: 1 and H0587: | | |
| | | | | | | 1. | | |
| HWDAP03 | 923319 | 180 | 184-372 | 669 | Arg-1 to Trp-9. | H0600: 1 and H0593: | | |
| | | | | | | 1. | | |
| HWDAS34 | 703610 | 181 | 24-425 | 670 | Pro-7 to Gly-15, | L0751: 4 and H0600: | | |
| | | | | | Ala-41 to Gly-48, | 2. | | |
| | | | | | Val-65 to Ala-71. | | | |
| HWDAS64 | 729159 | 182 | 189-494 | 671 | Gly-1 to Val-19, | AR061: 2, AR089: 1 | | |
| | | | | | Asp-43 to Leu-48. | H0600: 1 and H0587: | | |
| | | | | | | 1. | | |
| HWDAS93 | 707809 | 183 | 1-123 | 672 | | H0600: 2 | | |
| HWEAD11 | 965030 | 184 | 2-310 | 673 | | H0601: 2 | | |
| HWHGB20 | 669455 | 185 | 265-501 | 674 | Asp-1 to Ala-6, | H0586: 2 | | |
| | | | | | Pro-12 to Arg-18, | | | |
| | | | | | Thr-46 to Gly-58, | | | |
| | | | | | Thr-74 to His-79. | | | |
| HWHGB21 | 954002 | 186 | 1-195 | 675 | Lys-7 to Gln-13. | Ho586: 2 and H0494: | | |
| | | | | | | 1. | | |
| HWHGB32 | 698891 | 187 | 18-413 | 676 | | H0586: 2 and L0766: | | |
| | | | | | | 1. | | |
| HWHGB44 | 716369 | 188 | 194-415 | 677 | | H0586: 2 | | |
| HWHGL42 | 908227 | 189 | 1-339 | 678 | Pro-10 to Pro-24, | H0592: 1 and H0586: | | |
| | | | | | Leu-53 to Thr-59, | 1. | | |
| | | | | | Thr-70 to Lys-81, | | | |
| | | | | | Met-88 to Thr-93, | | | |
| | | | | | Gln-101 to Cys-107. | | | |
| HWHGW34 | 670622 | 190 | 2-436 | 679 | Ser-11 to Gly-22, | H0586: 1 and H0587: | | |
| | | | | | Asn-26 to Thr-38, | 1. | | |
| | | | | | Ser-48 to Gly-54. | | | |
| HWHHA18 | 665788 | 191 | 278-451 | 680 | Ser-20 to Gly-29. | H0586: 2 | | |
| HWHID04 | 926251 | 192 | 1-246 | 681 | | H0586: 2, L0777: 2, | | |
| | | | | | | H0081: 1 and L0747: 1. | | |
| HWHJA12 | 969044 | 193 | 35-313 | 682 | Glu-4 to Gly-29, | H0586: 2, S0348: 1, | | |
| | | | | | Leu-42 to Trp-51, | H0587: 1, L0809: 1 and | | |
| | | | | | Ser-71 to Asn-83. | L0777: 1. | | |
| HWHPF38 | 709502 | 194 | 2-130 | 683 | Asn-23 to Ile-33. | H0587: 2, L0471: 1 | | |
| | | | | | | and L0749: 1. | | |
| HWHPF60 | 675703 | 195 | 327-698 | 684 | Ser-18 to Pro-26. | L0748: 2, H0586: 1, | | |
| | | | | | | H0587: 1, L0749: 1 and | | |
| | | | | | | L0605: 1. | | |
| HWHPJ63 | 744720 | 196 | 58-186 | 685 | Ile-1 to Glu-15. | H0587: 2 | | |
| HWHPT41 | 658138 | 197 | 96-278 | 686 | Gly-11 to Arg-16, | H0587: 1 and H0540: | | |
| | | | | | Leu-31 to Arg-36. | 1. | | |
| HWHQA86 | 785281 | 198 | 286-435 | 687 | | H0587: 2 | | |
| HWHQI82 | 739230 | 199 | 1-216 | 688 | Ser-7 to Gln-16, | H0587: 1 and H0494: | | |
| | | | | | His-35 to Thr-49. | 1. | | |
| HWHQO07 | 952660 | 200 | 310-104 | 689 | | H0587: 2 | | |
| HWHQO33 | 670190 | 201 | 30-335 | 690 | Ser-28 to Arg-34, | H0586: 2, H0587: 1 | | |
| | | | | | Thr-53 to Pro-60. | and L0777: 1. | | |
| HWHQP22 | 674151 | 202 | 3-218 | 691 | Pro-29 to Gln-35. | H0587: 2 and L0794: | | |
| | | | | | | 1. | | |
| HWHQV08 | 958709 | 203 | 3-266 | 692 | Pro-12 to Trp-20. | H0587: 2 | | |
| HWHQV13 | 656647 | 204 | 2-241 | 693 | | H0587: 2 | | |
| HWHQV57 | 734455 | 205 | 1-516 | 694 | Leu-1 to Asn-18, | H0587: 2 | | |
| | | | | | Gln-39 to Gly-44, | | | |
| | | | | | Asp-62 to Gln-67, | | | |
| | | | | | Asn-89 to Leu-94. | | | |
| HWHQX34 | 703785 | 206 | 81-263 | 695 | Leu-12 to Asn-18. | H0587: 2 | | |
| HWHQX77 | 771865 | 207 | 1-357 | 696 | Gly-11 to Ser-18, | H0587: 2 | | |
| | | | | | Pro-49 to Arg-58. | | | |
| HWHQY11 | 966498 | 208 | 559-344 | 697 | Arg-1 to Leu-6, | H0587: 2 | | |
| | | | | | Lys-15 to Asn-25. | | | |
| HWHQY18 | 628987 | 209 | 2-469 | 698 | Ser-30 to Gly-36. | H0587: 3 | | |
| HWHQY36 | 708384 | 210 | 2-187 | 699 | Asp-13 to Ser-20. | H0587: 2, L0021: 1, | | |
| | | | | | | L0747: 1, L0777: 1 and | | |
| | | | | | | L0755: 1. | | |
| HWHRA44 | 716334 | 211 | 3-209 | 700 | Phe-1 to Ala-7. | H0587: 2 and L0655: | | |
| | | | | | | 1. | | |
| HWHRA91 | 789529 | 212 | 194-373 | 701 | | H0587: 2 | 11q23 | 107680, |
| | | | | | | | | 107680, |
| | | | | | | | | 107680, |
| | | | | | | | | 107680, |
| | | | | | | | | 107680, |
| | | | | | | | | 107720, |
| | | | | | | | | 133780, |
| | | | | | | | | 147791, |
| | | | | | | | | 159555, |
| | | | | | | | | 168000, |
| | | | | | | | | 186740, |
| | | | | | | | | 186830, |
| | | | | | | | | 188025, |
| | | | | | | | | 203750, |
| | | | | | | | | 261640, |
| | | | | | | | | 600048, |
| | | | | | | | | 601382, |
| | | | | | | | | 602574, |
| | | | | | | | | 602574 |
| HWJAC59 | 761620 | 213 | 32-109 | 702 | Ala-5 to Lys-25. | H0602: 2 | | |
| HWJAC71 | 760084 | 214 | 49-228 | 703 | Ser-11 to Arg-20. | H0602: 2 | | |
| HWJAD16 | 661520 | 215 | 150-311 | 704 | Pro-39 to Gln-44. | L0005: 2, H0602: 1, | | |
| | | | | | | L0809: 1, L0745: 1, | | |
| | | | | | | L0758: 1, L0759: 1 and | | |
| | | | | | | L0592: 1. | | |
| HWHQW24 | 907997 | 216 | 69-395 | 705 | Gln-12 to Glu-18, | L0741: 4 and H0587: | | |
| | | | | | Pro-40 to Gly-47, | 1. | | |
| | | | | | Gly-73 to Arg-78, | | | |
| | | | | | Lys-91 to Gln-100. | | | |
| HWHQS58 | 869780 | 217 | 529-762 | 706 | | H0587: 1 and L0731: | | |
| | | | | | | 1. | | |
| HWHQQ73 | 761719 | 218 | 34-258 | 707 | Lys-1 to Val-10, | L0748: 3 and H0587: | | |
| | | | | | Arg-59 to Gly-64. | 1. | | |
| HWHQO89 | 786155 | 219 | 162-1 | 708 | | L0754: 2, H0587: 1 | | |
| | | | | | | and L0757: 1. | | |
| HWHQL42 | 805897 | 220 | 2-226 | 709 | Leu-1 to His-6, | H0587: 1, L0662: 1 | | |
| | | | | | Lys-9 to Gly-16, | and L0666: 1. | | |
| | | | | | Asn-67 to His-73. | | | |
| HWHQL26 | 694021 | 221 | 2-346 | 710 | | H0587: 1 and L0731: | | |
| | | | | | | 1. | | |
| HWHQJ31 | 697599 | 222 | 304-468 | 711 | | L0439: 3, H0587: 1, | | |
| | | | | | | L0805: 1 and L0776: 1. | | |
| HWHQI16 | 661553 | 223 | 61-240 | 712 | | H0587: 1, L0471: 1 | | |
| | | | | | | and L0754: 1. | | |
| HWHQH35 | 707826 | 224 | 106-336 | 713 | Ser-4 to Arg-22, | L0749: 3, L0748: 2, | | |
| | | | | | Pro-24 to Gly-32, | H0587: 1, L0770: 1 and | | |
| | | | | | His-40 to Ala-45. | L0769: 1. | | |
| HWHQB79 | 774685 | 225 | 210-569 | 714 | | L0748: 2 and H0587: | | |
| | | | | | | 1. | | |
| HWHPY78 | 781689 | 226 | 396-662 | 715 | Glu-1 to Leu-6, | L0748: 3 and H0587: | | |
| | | | | | Leu-22 to Asn-47, | 1. | | |
| | | | | | Leu-74 to Gly-80. | | | |
| HWHPR89 | 598535 | 227 | 1-252 | 716 | | L0747: 2 and H0587: | | |
| | | | | | | 1. | | |
| HWHPO68 | 752782 | 228 | 117-497 | 717 | Thr-7 to Gln-13, | L0758: 2, H0587: 1 | | |
| | | | | | Asn-30 to Glu-42, | and L0601: 1. | | |
| | | | | | Pro-74 to Arg-82, | | | |
| | | | | | Ser-112 to Thr-124. | | | |
| HWHPM27 | 682719 | 229 | 217-372 | 718 | | L0748: 3, H0587: 1 | | |
| | | | | | | and L0766: 1. | | |
| HWHPL01 | 915610 | 230 | 295-501 | 719 | Gly-59 to Tyr-64. | L0747: 2 and H0587: | | |
| | | | | | | 1. | | |
| HWHPK76 | 769791 | 231 | 2-100 | 720 | Met-13 to Arg-18. | H0587: 1 and L0745: | | |
| | | | | | | 1. | | |
| HWHPK51 | 725456 | 232 | 141-332 | 721 | | L0616: 1 and H0587: | | |
| | | | | | | 1. | | |
| HWHPJ26 | 681217 | 233 | 111-320 | 722 | Met-1 to Arg-6, | H0587: 1 and L0740: | | |
| | | | | | Arg-14 to Arg-26, | 1. | | |
| | | | | | Thr-35 to Trp-40, | | | |
| | | | | | Arg-57 to Gly-68. | | | |
| HWHPF78 | 773407 | 234 | 411-611 | 723 | | L0748: 2 and H0587: | | |
| | | | | | | 1. | | |
| HWHPD16 | 661660 | 235 | 37-738 | 724 | Gln-1 to Lys-17, | L0740: 3, L0779: 2 and | | |
| | | | | | Pro-19 to Pro-29. | H0587: 1. | | |
| HWHPC04 | 614960 | 236 | 37-312 | 725 | Leu-9 to Gly-15, | H0587: 1 and L0749: | | |
| | | | | | Leu-42 to Cys-56, | 1. | | |
| | | | | | Ser-66 to Lys-83. | | | |
| HWHPA61 | 741642 | 237 | 125-274 | 726 | Cys-23 to Gly-30. | H0587: 1 and L0740: | | |
| | | | | | | 1. | | |
| HWHKJ11 | 965201 | 238 | 13-165 | 727 | Lys-1 to Lys-8, | H0586: 1 and L0519: | | |
| | | | | | Thr-27 to Ser-35. | 1. | | |
| HWHKG03 | 971735 | 239 | 2-880 | 728 | Ser-10 to Gly-15. | H0586: 1, L0766: 1, | | |
| | | | | | | L0774: 1, L0775: 1 and | | |
| | | | | | | L0659: 1. | | |
| HWHJM08 | 955683 | 240 | 206-427 | 729 | Gly-63 to His-74. | L0754: 5, L0776: 2, | | |
| | | | | | | L0439: 2, L0745: 2, | | |
| | | | | | | H0586: 1, L0438: 1, | | |
| | | | | | | L0750: 1 and L0752: 1. | | |
| HWHJJ11 | 965189 | 241 | 384-181 | 730 | Ser-11 to Trp-17, | L0759: 2, H0586: 1 | | |
| | | | | | Glu-57 to Ala-68. | and L0638: 1. | | |
| HWHHW50 | 724078 | 242 | 3-170 | 731 | Thr-32 to Pro-37. | H0586: 1 and L0777: | | |
| | | | | | | 1. | | |
| HWHHU57 | 734458 | 243 | 187-372 | 732 | | H0586: 1, L0756: 1 | | |
| | | | | | | and L0777: 1. | | |
| HWHHQ10 | 963959 | 244 | 77-316 | 733 | Thr-17 to Gly-24, | H0586: 1 and L0527: | | |
| | | | | | Lys-74 to Lys-80. | 1. | | |
| HWHHQ76 | 769848 | 245 | 272-529 | 734 | | L0756: 2 and H0586: | | |
| | | | | | | 1. | | |
| HWHHL02 | 919202 | 246 | 234-428 | 735 | Phe-10 to Lys-15. | H0586: 1 and L0777: | | |
| | | | | | | 1. | | |
| HWHGZ86 | 970662 | 247 | 553-810 | 736 | Asn-1 to Gly-11, | H0586: 1, L0455: 1 | | |
| | | | | | Arg-22 to Arg-28, | and L0589: 1. | | |
| | | | | | Gly-32 to Ser-52, | | | |
| | | | | | Phe-56 to Ile-64, | | | |
| | | | | | Gly-68 to Gln-76. | | | |
| HWHGY82 | 779020 | 248 | 232-420 | 737 | | H0586: 1 and L0748: | | |
| | | | | | | 1. | | |
| HWHGY56 | 733124 | 249 | 32-409 | 738 | | L0439: 2 and H0586: | 22q13.33 | |
| | | | | | | 1. | | |
| HWHGW72 | 945692 | 250 | 100-939 | 739 | | AR054: 23, AR050: | | |
| | | | | | | 16, AR051: 3, AR089: | | |
| | | | | | | 1,AR061: 1 | | |
| | | | | | | H0586: 1 and L0375: | | |
| | | | | | | 1. | | |
| | 947361 | 496 | 327-1 | 985 | Gly-1 to Gly-7, | | | |
| | | | | | Ala-13 to Gln-21, | | | |
| | | | | | Ala-43 to Ser-48, | | | |
| | | | | | Asn-67 to Gly-75, | | | |
| | | | | | Pro-82 to Pro-90. | | | |
| HWHGS51 | 725446 | 251 | 93-257 | 740 | Gly-22 to Met-29. | H0586: 1, L0766: 1 | | |
| | | | | | | and L0439: 1. | | |
| HWHGP95 | 795148 | 252 | 308-643 | 741 | | L0748: 4 and H0586: | | |
| | | | | | | 1. | | |
| HWHGF95 | 947019 | 253 | 2-742 | 742 | Glu-25 to Trp-33, | AR050: 3, AR061: 2, | | |
| | | | | | Trp-76 to Gln-83, | AR054: 2, AR089: 1, | | |
| | | | | | Pro-94 to Asp-108. | A051: 0 | | |
| | | | | | | H0586: 1 and L0376: | | |
| | | | | | | 1. | | |
| HWHGE01 | 915933 | 254 | 180-461 | 743 | His-10 to Ser-16, | H0586: 1, L0748: 1 | | |
| | | | | | Lys-35 to Asn-43, | and L0752: 1. | | |
| | | | | | Ile-56 to Ala-72. | | | |
| HWHGC93 | 915311 | 255 | 339-557 | 744 | | H0586: 1 and L0744: | | |
| | | | | | | 1. | | |
| HWHGC57 | 942388 | 256 | 2-499 | 745 | Arg-10 to Asp-22. | AR089: 8, AR061: 4 | | |
| | | | | | | H0586: 1 | | |
| HWHGB85 | 889955 | 257 | 190-618 | 746 | | H0586: 1 and L0764: | 11q13 | 102200, |
| | | | | | | 1. | | 106100, |
| | | | | | | | | 131100, |
| | | | | | | | | 131100, |
| | | | | | | | | 131100, |
| | | | | | | | | 133780, |
| | | | | | | | | 147050, |
| | | | | | | | | 153700, |
| | | | | | | | | 161015, |
| | | | | | | | | 164009, |
| | | | | | | | | 168461, |
| | | | | | | | | 168461, |
| | | | | | | | | 168461, |
| | | | | | | | | 180721, |
| | | | | | | | | 180840, |
| | | | | | | | | 191181, |
| | | | | | | | | 193235, |
| | | | | | | | | 209901, |
| | | | | | | | | 232600, |
| | | | | | | | | 259700, |
| | | | | | | | | 259770, |
| | | | | | | | | 600045, |
| | | | | | | | | 600319, |
| | | | | | | | | 600528, |
| | | | | | | | | 601884 |
| HWHGB13 | 656712 | 258 | 350-544 | 747 | | H0586: 1 | | |
| HWFBH55 | 732549 | 259 | 471-274 | 748 | | T0004: 1 and L0766: 1. | | |
| HWFBG80 | 561208 | 260 | 119-394 | 749 | Gly-13 to Pro-19, | AR050: 111, AR051: | | |
| | | | | | Arg-25 to Pro-31, | 106, AR054: 94 | | |
| | | | | | Thr-43 to Gln-48. | T0004: 1 | | |
| HWFBD96 | 796070 | 261 | 47-271 | 750 | | T0004: 1 | | |
| HWFBB09 | 575533 | 262 | 162-320 | 751 | | T0004: 1 | | |
| HWFAD94 | 504477 | 263 | 493-344 | 752 | Pro-14 to Tyr-19. | T0004: 1 | | |
| HWFAD84 | 504489 | 264 | 620-372 | 753 | | T0004: 1 | | |
| HWFAD65 | 753943 | 265 | 261-404 | 754 | | T0004: 1 and L0758: 1. | | |
| HWEAE94 | 794026 | 266 | 59-418 | 755 | | H0601: 1 and L0601: | | |
| | | | | | | 1. | | |
| HWEAD10 | 927208 | 267 | 260-108 | 756 | | H0601: 1, L0770: 1, | | |
| | | | | | | L0772: 1 and L0775: 1. | | |
| HWDAY07 | 952441 | 268 | 246-995 | 757 | Asn-8 to Lys-13, | H0600: 1, L0740: 1 | | |
| | | | | | Leu-52 to Arg-59, | and L0777: 1. | | |
| | | | | | Glu-156 to Trp-161, | | | |
| | | | | | Pro-200 to Asp-207. | | | |
| HWDAS21 | 670233 | 269 | 54-236 | 758 | Tyr-52 to Glu-57. | H0600: 1 and L0757: | | |
| | | | | | | 1. | | |
| HWDAP89 | 795713 | 270 | 2-208 | 759 | Val-1 to Thr-6. | L0747: 2 and H0600: | | |
| | | | | | | 1. | | |
| HWDAO90 | 788546 | 271 | 1-246 | 760 | | H0600: 1 and L0748: | | |
| | | | | | | 1. | | |
| HWDAO63 | 744591 | 272 | 1-333 | 761 | | L0748: 2 and H0600: | | |
| | | | | | | 1. | | |
| HWDAL32 | 698628 | 273 | 136-327 | 762 | Tyr-6 to His-14. | L0743: 2, H0600: 1, | | |
| | | | | | | L0637: 1, L0653: 1, | | |
| | | | | | | L0776: 1, L0744: 1, | | |
| | | | | | | L0747: 1, L0780: 1 and | | |
| | | | | | | L0757: 1. | | |
| HWDAK75 | 973099 | 274 | 214-348 | 763 | Lys-1 to Thr-12, | H0600: 1 | | |
| | | | | | His-37 to Lys-45. | | | |
| HWDAD72 | 766077 | 275 | 143-280 | 764 | Pro-35 to Phe-40. | H0600: 1 and L0749: | | |
| | | | | | | 1. | | |
| HWDAD54 | 729262 | 276 | 283-432 | 765 | | H0600: 1 and L0748: | | |
| | | | | | | 1. | | |
| HWDAD40 | 881233 | 277 | 172-426 | 766 | Gln-12 to Arg-21, | H0600: 1 and L0783: | | |
| | | | | | Arg-35 to Gln-40. | 1. | | |
| HWDAC55 | 731414 | 278 | 258-404 | 767 | | H0600: 1 and L0439: | | |
| | | | | | | 1. | | |
| HSTAO59 | 908993 | 279 | 1-357 | 768 | Ile-28 to Lys-36, | AR089: 0, ARO61: 0 | | |
| | | | | | Thr-58 to Cys-65, | H0068: 1, L0759: 1 | | |
| | | | | | His-85 to Lys-92, | and L0595: 1. | | |
| | | | | | Tyr-98 to Ser-104, | | | |
| | | | | | Ser-112 to Gly-117. | | | |
| HSTAH84 | 783227 | 280 | 3-308 | 769 | Ala-40 to His-46. | H0068: 1 | | |
| HSTAG60 | 578487 | 281 | 41-277 | 770 | Asp-3 to Arg-17, | H0068: 1 | | |
| | | | | | Cys-55 to Tyr-63. | | | |
| HOUIF71 | 759929 | 282 | 156-407 | 771 | Arg-13 to Arg-22. | L0748: 2 and S0342: 1. | | |
| HOUGC71 | 760110 | 283 | 1-171 | 772 | | S0040: 1 and LO748: 1. | | |
| HOUFM73 | 764173 | 284 | 3-197 | 773 | | S0040: 1 and L0745: 1. | | |
| HOUFM67 | 751325 | 285 | 37-126 | 774 | Ser-4 to Asp-11. | S0040: 1 | | |
| HOUFM50 | 724038 | 286 | 124-267 | 775 | Ser-27 to Ala-34, | S0040: 1 and LO471: 1. | | |
| | | | | | Tyr-42 to Asn-48. | | | |
| HOUFM32 | 698816 | 287 | 161-301 | 776 | | S0040: 1 | | |
| HOUFD93 | 791584 | 288 | 134-274 | 777 | Met-1 to Gln-14. | L0589: 2 and S0040: 1. | | |
| HOUFD09 | 625245 | 289 | 1-303 | 778 | | S0040: 1 and L0757: 1. | | |
| HOUFC52 | 726438 | 290 | 71-178 | 779 | | S0040: 1 and L0756: 1. | 1p32-p34 | 120950, |
| | | | | | | | | 120960, |
| | | | | | | | | 130500, |
| | | | | | | | | 133200, |
| | | | | | | | | 138140, |
| | | | | | | | | 168360, |
| | | | | | | | | 171760, |
| | | | | | | | | 171760, |
| | | | | | | | | 176100, |
| | | | | | | | | 176100, |
| | | | | | | | | 178300, |
| | | | | | | | | 187040, |
| | | | | | | | | 230000, |
| | | | | | | | | 255800, |
| | | | | | | | | 600101, |
| | | | | | | | | 600650, |
| | | | | | | | | 600650, |
| | | | | | | | | 600722, |
| | | | | | | | | 600722 |
| HOUET93 | 792495 | 291 | 2-250 | 780 | | S0040: 1 and L0749: 1. | | |
| HOUES18 | 577112 | 292 | 190-393 | 781 | | L0749: 3, L0748: 2, | | |
| | | | | | | S0040: 1 and L0768: 1. | | |
| HOUER77 | 772417 | 293 | 52-222 | 782 | | S0040: 1 and L0594: 1. | | |
| HOUEM24 | 677416 | 294 | 1-165 | 783 | | S0040: 1 and L0766: 1. | | |
| HOUEK01 | 965449 | 295 | 126-344 | 784 | Thr-3 to Phe-11. | L0748: 2, S0040: 1, | 15q15 | 177070, |
| | | | | | | L0772: 1 and L0757: 1. | | 177070, |
| | | | | | | | | 182500, |
| | | | | | | | | 218000, |
| | | | | | | | | 227220, |
| | | | | | | | | 243500, |
| | | | | | | | | 600839, |
| | | | | | | | | 601800 |
| HOUEH51 | 725820 | 296 | 160-324 | 785 | | L0740: 2 and S0040: 1. | | |
| HOUEG85 | 883933 | 297 | 2-388 | 786 | Gln-43 to Asp-54, | L0777: 2 and S0040: 1. | | |
| | | | | | Arg-99 to Arg-108. | | | |
| HOUDR29 | 576473 | 298 | 42-170 | 787 | Gly-32 to Gln-38. | S0040: 1 | | |
| HOUDL40 | 710868 | 299 | 381-253 | 788 | Arg-1 to Asp-6. | S0040: 1 | | |
| | 858895 | 497 | 249-148 | 986 | | | | |
| HOUCZ30 | 573930 | 300 | 141-308 | 789 | | S0040: 1 | | |
| HOUCR25 | 559993 | 301 | 41-244 | 790 | | S0040: 1 and L0752: 1. | | |
| HOUBO69 | 757808 | 302 | 19-162 | 791 | Lys-39 to Lys-46. | S0040: 1 and L0731: 1. | | |
| HOUBD18 | 858911 | 303 | 100-387 | 792 | | S0040: 1 and L0366: 1. | | |
| HOUBB11 | 965041 | 304 | 3-368 | 793 | Pro-6 to Ser-13, | L0766: 2 and S0040: 1. | | |
| | | | | | Thr-38 to Gln-50, | | | |
| | | | | | Arg-56 to Ser-66, | | | |
| | | | | | Asn-68 to Asn-74, | | | |
| | | | | | Lys-80 to Ser-92, | | | |
| | | | | | Gln-94 to Gly-103, | | | |
| | | | | | Ser-106 to Ser-113. | | | |
| HOUAV68 | 753628 | 305 | 2-115 | 794 | Asp-14 to Arg-21. | S0040: 1 and L0748: 1. | | |
| HOUAF65 | 526540 | 306 | 34-180 | 795 | | S0040: 1 | | |
| HLSAC73 | 761684 | 307 | 114-224 | 796 | Glu-22 to Met-27. | H0540: 1 | | |
| HLSAC61 | 689697 | 308 | 71-217 | 797 | | H0540: 1 | | |
| HLSAB43 | 715242 | 309 | 238-363 | 798 | | H0540: 1 | | |
| HLSAB31 | 422131 | 310 | 133-324 | 799 | Cys-25 to Asn-34. | H0540: 1 | | |
| HLIBE40 | 887417 | 311 | 1-423 | 800 | | AR054: 3, AR061: 2, | | |
| | | | | | | AR051: 2, AR089: 1 | | |
| | | | | | | L0439: 3, L0749: 2, | | |
| | | | | | | H0587: 1, L0803: 1, | | |
| | | | | | | L0804: 1 and L0731: 1. | | |
| HKAOQ73 | 761763 | 312 | 2-244 | 801 | Pro-6 to Cys-32, | H0494: 1 and L0741: | | |
| | | | | | Pro-57 to Ser-62. | 1. | | |
| HKAOO90 | 934020 | 313 | 3-575 | 802 | Val-12 to Tyr-19. | H0494: 1 and L0748: | | |
| | | | | | | 1. | | |
| HKAOF21 | 857310 | 314 | 147-380 | 803 | | H0494: 1 and L0438: | | |
| | | | | | | 1. | | |
| HKAKY03 | 923047 | 315 | 192-347 | 804 | | H0494: 1 and L0757: | | |
| | | | | | | 1. | | |
| HKAKF79 | 909810 | 316 | 120-404 | 805 | Pro-2 to Trp-11, | H0494: 1 and L0439: | | |
| | | | | | Ser-22 to Ala-41. | 1. | | |
| HKAIK82 | 779306 | 317 | 46-267 | 806 | Glu-16 to Arg-25. | H0494: 1 and L0748: | | |
| | | | | | | 1. | | |
| HKAHP85 | 783955 | 318 | 38-337 | 807 | Pro-68 to Ser-75. | H0494: 1 and L0749: | | |
| | | | | | | 1. | | |
| HKAHI69 | 916528 | 319 | 254-637 | 808 | Asn-1 to Leu-6, | H0494: 1, L0748: 1, | | |
| | | | | | Pro-28 to Asn-33. | L0740: 1 and L0747: 1. | | |
| HKAHE93 | 791860 | 320 | 23-247 | 809 | Asp-4 to Asn-11, | L0439: 4 and H0494: | | |
| | | | | | Asn-46 to Thr-56. | 1. | | |
| HKAHA10 | 857339 | 321 | 1-291 | 810 | Ser-23 to Arg-28, | H0494: 1 and L0592: | 1p36.2 | 120550, |
| | | | | | Met-38 to Lys-45, | 1. | | 120570, |
| | | | | | Val-63 to Gly-73. | | | 120575, |
| | | | | | | | | 130500, |
| | | | | | | | | 133200, |
| | | | | | | | | 153454, |
| | | | | | | | | 167410, |
| | | | | | | | | 256700, |
| | | | | | | | | 600975 |
| HKAGC23 | 912677 | 322 | 237-434 | 811 | Pro-27 to Gly-33. | H0494: 1, L0744: 1 | | |
| | | | | | | and L0748: 1. | | |
| HKAFR01 | 916400 | 323 | 260-400 | 812 | Phe-20 to Asn-25. | L0766: 3, H0494: 1 | | |
| | | | | | | and L0638: 1. | | |
| HKAFQ61 | 741786 | 324 | 404-622 | 813 | | H0494: 1, L0748: 1 | | |
| | | | | | | and L0439: 1. | | |
| HKAFN96 | 796361 | 325 | 68-319 | 814 | Ser-20 to Gly-25. | H0494: 1 and L0744: | | |
| | | | | | | 1. | | |
| HKAFD03 | 924048 | 326 | 148-345 | 815 | Ala-20 to Lys-32. | H0494: 1 and L0766: | | |
| | | | | | | 1. | | |
| HKAEJ79 | 917408 | 327 | 1-171 | 816 | Gly-52 to Pro-57. | H0494: 1 and L0439: | | |
| | | | | | | 1. | | |
| HKAEG61 | 925951 | 328 | 400-2 | 817 | | H0494: 1, L0773: 1 | | |
| | | | | | | and L0803: 1. | | |
| HKADR84 | 800106 | 329 | 53-328 | 818 | Pro-20 to Trp-29, | AR050: 60, AR054: | | |
| | | | | | Thr-38 to Ala-45. | 46, AR051: 44 | | |
| | | | | | | H0494: 1 | | |
| HKADP50 | 971356 | 330 | 3-833 | 819 | Pro-18 to Ala-28, | AR054: 186, AR050: | | |
| | | | | | Arg-33 to Trp-48, | 156, AR051: 140, | | |
| | | | | | His-50 to Pro-57, | AR089: 62, AR061: 28 | | |
| | | | | | Pro-64 to Gly-78, | H0494: 1 and L0803: | | |
| | | | | | Gly-126 to Phe-140, | 1. | | |
| | | | | | Ser-144 to Lys-149, | | | |
| | | | | | Phe-172 to Tyr-178. | | | |
| HKADP11 | 966941 | 331 | 3-416 | 820 | Pro-17 to Arg-22, | L0803: 2 and H0494: | | |
| | | | | | Ala-83 to Gly-88, | 1. | | |
| | | | | | Leu-109 to Gln-114. | | | |
| HKADO84 | 911567 | 332 | 1-261 | 821 | Asp-27 to Cys-37, | L0809: 3, H0494: 1, | | |
| | | | | | Ser-49 to Gln-54. | L0363: 1, L0789: 1 and | | |
| | | | | | | L0601: 1. | | |
| HKADG12 | 638194 | 333 | 44-220 | 822 | Arg-6 to Ser-13, | H0494: 1 and L0766: | | |
| | | | | | Gln-30 to Gln-36. | 1. | | |
| | 968887 | 498 | 427-191 | 987 | Pro-20 to Trp-31, | | | |
| | | | | | Tyr-66 to Arg-76. | | | |
| HKACX88 | 970793 | 334 | 179-3 | 823 | Tyr-15 to Val-35, | H0494: 1 | | |
| | | | | | Pro-38 to Asp-44, | | | |
| | | | | | Arg-52 to Lys-59. | | | |
| HKACX62 | 744273 | 335 | 265-672 | 824 | Asp-10 to Ser-22. | H0494: 1 and L0741: | | |
| | | | | | | 1. | | |
| HKACX25 | 678045 | 336 | 73-288 | 825 | His-15 to Glu-21. | H0494: 1 and L0749: | | |
| | | | | | | 1. | | |
| HKACU02 | 919850 | 337 | 149-376 | 826 | Ser-17 to Pro-23, | H0494: 1, L0602: 1 | | |
| | | | | | Thr-42 to His-53. | and L0748: 1. | | |
| HKACP26 | 422255 | 338 | 33-188 | 827 | | H0494: 1 and L0596: | | |
| | | | | | | 1. | | |
| HKACP23 | 881718 | 339 | 2-442 | 828 | Gly-1 to Ala-6, | H0494: 1 | | |
| | | | | | Pro-21 to Gly-27, | | | |
| | | | | | Ser-43 to Gly-51, | | | |
| | | | | | Ser-77 to Ser-105. | | | |
| HKACO69 | 614156 | 340 | 1-315 | 829 | Pro-1 to Leu-14, | H0494: 1 | | |
| | | | | | Pro-16 to Ser-22, | | | |
| | | | | | Ser-28 to His-33, | | | |
| | | | | | Ser-65 to Gly-77, | | | |
| | | | | | Pro-79 to Ala-90. | | | |
| HKACO22 | 674494 | 341 | 499-636 | 830 | Asn-1 to Asp-10. | H0494: 1 and L0748: | | |
| | | | | | | 1. | | |
| HKACL83 | 881711 | 342 | 1-573 | 831 | | H0494: 1, L0800: 1 | | |
| | | | | | | and L0439: 1. | | |
| HKACK91 | 789430 | 343 | 163-345 | 832 | Trp-2 to Gln-16. | H0494: 1 and L0741: | | |
| | | | | | | 1. | | |
| HKACI41 | 924045 | 344 | 2-391 | 833 | Ser-16 to Arg-41. | H0494: 1 and L0601: | 3 | |
| | | | | | | 1. | | |
| HKABY40 | 650852 | 345 | 239-463 | 834 | Arg-13 to Ile-21, | H0494: 1, L0438: 1 | | |
| | | | | | Pro-42 to Thr-54. | and L0439: 1. | | |
| HKABW75 | 973331 | 346 | 3-74 | 835 | | H0494: 1 | | |
| HKABU90 | 788888 | 347 | 3-422 | 836 | Ala-10 to Ser-15. | H0494: 1, L0740: 1 | | |
| | | | | | | and L0593: 1. | | |
| HKABR92 | 879400 | 348 | 53-313 | 837 | | H0494: 1 and L0747: | | |
| | | | | | | 1. | | |
| HKABQ76 | 857381 | 349 | 166-513 | 838 | Arg-10 to Leu-15, | L0750: 2 and H0494: | | |
| | | | | | Gln-31 to Trp-36, | 1. | | |
| | | | | | Glu-44 to Glu-59. | | | |
| HKABM34 | 703452 | 350 | 3-257 | 839 | | H0494: 1 and L0589: | | |
| | | | | | | 1. | | |
| HKABE53 | 892078 | 351 | 1-318 | 840 | Lys-27 to Tyr-33, | H0494: 1, L0776: 1 | | |
| | | | | | Ser-65 to Pro-71, | and L0751: 1. | | |
| | | | | | Gly-99 to Trp-106. | | | |
| HKAAD24 | 787545 | 352 | 70-336 | 841 | Ser-6 to Arg-14, | H0494: 1 and L0439: | | |
| | | | | | Val-36 to Gly-42. | 1. | | |
| HFEBY03 | 973292 | 353 | 171-329 | 842 | Lys-6 to Gly-11, | H0081: 1 | | |
| | | | | | Trp-19 to Arg-26, | | | |
| | | | | | Met-38 to Gly-53. | | | |
| HFEBQ59 | 739355 | 354 | 2-295 | 843 | Arg-14 to Trp-23. | H0081: 1 and L0759: | | |
| | | | | | | 1. | | |
| HFEBP01 | 916728 | 355 | 1-330 | 844 | Arg-14 to His-23, | H0081: 1, L0471: 1 | | |
| | | | | | Pro-26 to Lys-37. | and L0438: 1. | | |
| HFEBJ61 | 576092 | 356 | 1-177 | 845 | Thr-20 to Gln-25. | H0081: 1 | | |
| HFEBH07 | 953523 | 357 | 109-279 | 846 | Glu-12 to Pro-19. | L0599: 2 and H0081: | | |
| | | | | | | 1. | | |
| HFEBD01 | 916725 | 358 | 42-191 | 847 | Val-18 to Tyr-25. | H0081: 1 and L0532: | | |
| | | | | | | 1. | | |
| HFEBA06 | 935685 | 359 | 26-217 | 848 | Gly-53 to Lys-59. | L0539: 1 and H0081: | | |
| | | | | | | 1. | | |
| HFEAU06 | 960609 | 360 | 72-386 | 849 | Ser-18 to Gly-26, | H0081: 1, L0754: 1 | | |
| | | | | | Glu-39 to Glu-51. | and L0755: 1. | | |
| HFEAN03 | 925408 | 361 | 3-149 | 850 | | H0081: 1 and L0366: | | |
| | | | | | | 1. | | |
| HFEAJ78 | 855319 | 362 | 3-176 | 851 | | AR054: 9, AR051: 2, | | |
| | | | | | | AR050: 2 | | |
| | | | | | | H0081: 1 | | |
| HFEAI72 | 700631 | 363 | 253-447 | 852 | Glu-52 to Ser-62. | H0081: 1 and L0742: | | |
| | | | | | | 1. | | |
| HFEAI49 | 722129 | 364 | 2-178 | 853 | Lys-43 to Thr-52. | L0757: 4, H0081: 1 | | |
| | | | | | | and L0747: 1. | | |
| HFEAH01 | 916068 | 365 | 261-40 | 854 | Asp-8 to Tyr-17. | H0081: 1 and L0749: | | |
| | | | | | | 1. | | |
| HFEAG41 | 504596 | 366 | 187-423 | 855 | Gly-16 to Ala-26, | L0747: 3 and H0081: | | |
| | | | | | Ser-40 to Ser-46, | 1. | | |
| | | | | | Cys-54 to Ala-61. | | | |
| HESAC55 | 518730 | 367 | 2-67 | 856 | | H0086: 1 | | |
| HESAC45 | 537453 | 368 | 15-173 | 857 | | H0086: 1 | | |
| HERAS77 | 772471 | 369 | 5-139 | 858 | | H0345: 1 | | |
| HERAS69 | 974532 | 370 | 119-379 | 859 | | H0345: 1 | | |
| HERAN59 | 739562 | 371 | 2-112 | 860 | | L0748: 3 and H0345: | 3q26.2-qter | |
| | | | | | | 1. | | |
| HERAN52 | 855536 | 372 | 47-166 | 861 | Pro-1 to Glu-18, | L0748: 2 and H0345: | | |
| | | | | | Gly-34 to Asp-40. | 1. | | |
| HERAN24 | 855537 | 373 | 215-376 | 862 | Arg-8 to Lys-14, | H0345: 1 and L0748: | | |
| | | | | | Ser-33 to Arg-45. | 1. | | |
| HERAN16 | 973714 | 374 | 9-173 | 863 | Pro-1 to Gly-9, | H0345: 1 | | |
| | | | | | Gly-32 to Gln-40. | | | |
| HERAN06 | 954671 | 375 | 106-321 | 864 | Phe-54 to Glu-59. | L0365: 1 and H0345: | | |
| | | | | | | 1. | | |
| HERAL72 | 529196 | 376 | 157-291 | 865 | Ser-17 to Ser-25. | AR051: 20, AR054: | | |
| | | | | | | 17, AR050: 10 | | |
| | | | | | | H0345: 1 | | |
| HERAK96 | 796591 | 377 | 3-131 | 866 | | H0345: 1 and L0600: | | |
| | | | | | | 1. | | |
| HERAK20 | 855546 | 378 | 22-273 | 867 | | H0345: 1 | | |
| HERAK01 | 921634 | 379 | 1-135 | 868 | Pro-5 to Asn-13, | L0520: 1 and H0345: | | |
| | | | | | Cys-23 to Lys-28, | 1. | | |
| | | | | | Gln-36 to Cys-42. | | | |
| HERAH85 | 928415 | 380 | 2-367 | 869 | | AR051: 49, AR050: | | |
| | | | | | | 40, AR054: 33 | | |
| | | | | | | H0345: 1 | | |
| HERAH37 | 707573 | 381 | 330-635 | 870 | | H0345: 1 and L0439: | | |
| | | | | | | 1. | | |
| HERAH16 | 880475 | 382 | 12-158 | 871 | Arg-37 to Arg-47. | L0794: 1 and H0345: | | |
| | | | | | | 1. | | |
| HERAH06 | 954672 | 383 | 471-644 | 872 | Lys-14 to Asp-31. | L0766: 5, L0803: 2, | | |
| | | | | | | L0779: 2, H0345: 1, | | |
| | | | | | | L0777: 1 and L0758: 1. | | |
| HERAG53 | 728441 | 384 | 105-332 | 873 | Thr-1 to Glu-8, | H0345: 1 and L0748: | | |
| | | | | | Pro-10 to Ala-16, | 1. | | |
| | | | | | Leu-25 to Asn-31. | | | |
| HERAE59 | 739569 | 385 | 53-169 | 874 | | H0345: 1 and L0745: | | |
| | | | | | | 1. | | |
| HERAE24 | 678518 | 386 | 298-480 | 875 | Glu-1 to Pro-22, | H0345: 1 and L0603: | | |
| | | | | | Lys-46 to Lys-54. | 1. | | |
| HERAD94 | 793020 | 387 | 11-295 | 876 | Ala-33 to Ser-39, | H0345: 1 and L0755: | | |
| | | | | | Ala-49 to Gln-63. | 1. | | |
| HERAD26 | 520370 | 388 | 499-308 | 877 | | AR054: 274, AR051: | | |
| | | | | | | 97, AR050: 91 | | |
| | | | | | | H0345: 1 | | |
| HERAC89 | 787123 | 389 | 250-408 | 878 | | H0345: 1 and L0748: | | |
| | | | | | | 1. | | |
| HERAB53 | 727373 | 390 | 177-410 | 879 | | H0345: 1 and L0743: | | |
| | | | | | | 1. | | |
| HBIPD10 | 961972 | 391 | 3-140 | 880 | | H0593: 1 and L0748: | | |
| | | | | | | 1. | | |
| HBIPB07 | 951981 | 392 | 1-228 | 881 | Glu-66 to Val-73. | H0593: 1 and L0756: | | |
| | | | | | | 1. | | |
| HBIOZ10 | 973131 | 393 | 3-503 | 882 | Leu-50 to Asp-61, | AR054: 189, AR051: | | |
| | | | | | Ser-100 to Leu-107, | 68, AR050: 35, AR089: | | |
| | | | | | Ala-120 to Thr-130. | 4, AR061: 3 | | |
| | | | | | | H0593: 1 | | |
| HBIOW11 | 965551 | 394 | 3-377 | 883 | Asn-2 to Ser-17, | L0731: 2 and H0593: | | |
| | | | | | Gly-28 to Gly-33, | 1. | | |
| | | | | | Arg-39 to Cys-45. | | | |
| HBIOT01 | 914657 | 395 | 428-691 | 884 | Arg-1 to Arg-9. | L0518: 2, H0593: 1 | | |
| | | | | | | and L0748: 1. | | |
| HBIOM94 | 973137 | 396 | 449-760 | 885 | Trp-1 to Asp-13. | AR089: 10, AR061: 4 | | |
| | | | | | | L0759: 2 and H0593: | | |
| | | | | | | 1. | | |
| HBIOJ47 | 973132 | 397 | 140-520 | 886 | Asp-1 to Thr-13, | H0593: 1 | | |
| | | | | | Pro-24 to Arg-39, | | | |
| | | | | | Ser-50 to Ser-64. | | | |
| HBIOJ05 | 930754 | 398 | 1-240 | 887 | Arg-9 to Arg-16. | L0369: 1, H0593: 1 | | |
| | | | | | | and L0749: 1. | | |
| HBIOF05 | 930771 | 399 | 412-618 | 888 | Pro-2 to Pro-9, | L0748: 2, L0581: 2, | | |
| | | | | | Leu-18 to Ser-27, | L0774: 1, H0593: 1 and | | |
| | | | | | Pro-58 to Thr-69. | L0752: 1. | | |
| HBIMT11 | 965089 | 400 | 456-674 | 889 | | L0060: 1,H0593: 1 | 4p16.3 | 134934, |
| | | | | | | and L0759: 1. | | 134934, |
| | | | | | | | | 134934, |
| | | | | | | | | 134934, |
| | | | | | | | | 134934, |
| | | | | | | | | 143100, |
| | | | | | | | | 180072, |
| | | | | | | | | 180072, |
| | | | | | | | | 194190, |
| | | | | | | | | 252800, |
| | | | | | | | | 252800, |
| | | | | | | | | 252800, |
| | | | | | | | | 600965 |
| HBIMR08 | 957996 | 401 | 462-148 | 890 | Lys-7 to Thr-19, | H0593: 1, L0749: 1 | | |
| | | | | | Pro-27 to Ser-32. | and L0777: 1. | | |
| HBFBA23 | 504560 | 402 | 75-206 | 891 | Thr-39 to Lys-44. | T0001: 1 | | |
| HAWCB26 | 685045 | 403 | 310-540 | 892 | | T0060: 1, L0749: 1 and | | |
| | | | | | | L0731: 1. | | |
| HAWAZ32 | 702976 | 404 | 69-194 | 893 | Ser-11 to Pro-24, | T0060: 1, L0803: 1 and | | |
| | | | | | Arg-29 to Ile-42. | L0594: 1. | | |
| HAWAY15 | 829255 | 405 | 55-375 | 894 | | L0748: 2 and T0060: 1. | | |
| HAWAW12 | 971497 | 406 | 53-190 | 895 | Lys-1 to Asn-7, | T0060: 1 and L0596: 1. | | |
| | | | | | Ser-38 to Arg-46. | | | |
| HAWAS28 | 416137 | 407 | 44-241 | 896 | | T0060: 1 and L0756: 1. | Xq12 | 300011, |
| | | | | | | | | 300011, |
| | | | | | | | | 300011, |
| | | | | | | | | 300127, |
| | | | | | | | | 305450, |
| | | | | | | | | 313700, |
| | | | | | | | | 313700, |
| | | | | | | | | 313700, |
| | | | | | | | | 313700, |
| | | | | | | | | 313700 |
| HAWAQ06 | 960762 | 408 | 403-654 | 897 | Pro-26 to Asp-36. | T0060: 1, L0545: 1 and | | |
| | | | | | | L0748: 1. | | |
| HAWAA53 | 864417 | 409 | 195-428 | 898 | | T0060: 1 and L0756: 1. | | |
| HAVAF22 | 675054 | 410 | 74-250 | 899 | Tyr-3 to Cys-9. | H0344: 1 and L0581: | | |
| | | | | | | 1. | | |
| HAVAC03 | 925291 | 411 | 97-444 | 900 | | L0749: 5 and H0344: | | |
| | | | | | | 1. | | |
| HARNO54 | 729117 | 412 | 36-305 | 901 | | H0592: 1 and L0439: | | |
| | | | | | | 1. | | |
| HARNI55 | 731232 | 413 | 5-202 | 902 | | H0592: 1 and L0748: | | |
| | | | | | | 1. | | |
| HARND69 | 754675 | 414 | 31-267 | 903 | | H0592: 1, L0747: 1 | | |
| | | | | | | and L0777: 1. | | |
| HARNB30 | 731614 | 415 | 1-411 | 904 | Gln-30 to Gly-36, | H0592:1 and L0748: | | |
| | | | | | Pro-41 to His-56. | 1. | | |
| HARMV85 | 864612 | 416 | 313-456 | 905 | Lys-1 to Ser-9. | H0592: 1 and L0365: | | |
| | | | | | | 1. | | |
| HARMP93 | 791948 | 417 | 283-462 | 906 | Thr-40 to Ile-46. | H0592: 1 and L0745: | | |
| | | | | | | 1. | | |
| HARMM53 | 854369 | 418 | 155-505 | 907 | Ile-14 to Asp-20, | L0439: 2 and H0592: | | |
| | | | | | Gly-30 to Gly-35, | 1. | | |
| | | | | | Lys-44 to Ile-49, | | | |
| | | | | | Val-56 to Trp-76, | | | |
| | | | | | Leu-78 to Arg-83, | | | |
| | | | | | Glu-89 to Arg-94. | | | |
| HARMA51 | 725137 | 419 | 2-298 | 908 | Ala-15 to Arg-20, | H0592: 1 and L0748: | | |
| | | | | | Ser-31 to Gly-36. | 1. | | |
| HADXB70 | 757287 | 420 | 148-456 | 909 | | H0443: 1 and L0748: | | |
| | | | | | | 1. | | |
| HADGI45 | 717755 | 421 | 288-452 | 910 | Gln-8 to Ser-17, | L0803: 2, L0809: 2, | | |
| | | | | | Cys-20 to Asp-25, | L0748: 2, L0749: 2, | | |
| | | | | | Arg-39 to Val-46, | L0731: 2, L0781: 1, | | |
| | | | | | Leu-50 to Arg-55. | H0427: 1, L0804: 1, | | |
| | | | | | | L0659: 1, L0789: 1 and | | |
| | | | | | | L0663: 1. | | |
| HADGG22 | 674421 | 422 | 200-484 | 911 | Lys-45 to Glu-50, | L0748: 4, L0754: 2, | | |
| | | | | | Ile-56 to Arg-63. | L0717: 1, H0427: 1, | | |
| | | | | | | L0638: 1, L0521: 1, | | |
| | | | | | | L0783: 1, L0809: 1 and | | |
| | | | | | | L0792: 1. | | |
| HADGC96 | 865247 | 423 | 54-185 | 912 | | H0427: 1 and L0748: | | |
| | | | | | | 1. | | |
| HADGB52 | 647367 | 424 | 191-325 | 913 | Glu-1 to Phe-6. | H0427: 1 and L0747: | | |
| | | | | | | 1. | | |
| HADGB01 | 916374 | 425 | 223-393 | 914 | Gly-1 to Cys-6, | H0427: 1 and L0748: | | |
| | | | | | Pro-27 to Lys-37. | 1. | | |
| HADFZ81 | 420937 | 426 | 78-278 | 915 | Gly-2 to Asp-10. | H0427: 1, L0746: 1 | | |
| | | | | | | and L0592: 1. | | |
| HADFZ14 | 848980 | 427 | 178-528 | 916 | His-33 to Arg-38, | H0427: 1 and L0749: | | |
| | | | | | Lys-105 to Lys-113. | 1. | | |
| HADFW15 | 848983 | 428 | 290-565 | 917 | Gln-36 to Glu-49, | L0562: 1 and H0427: | | |
| | | | | | Pro-78 to Gly-83. | 1. | | |
| HADFW06 | 935340 | 429 | 33-302 | 918 | Asp-1 to His-6, | H0427: 1 and L0604: | | |
| | | | | | Leu-34 to Cys-39, | 1. | | |
| | | | | | Ser-44 to Cys-51, | | | |
| | | | | | Ala-63 to Phe-70. | | | |
| HADFV03 | 972437 | 430 | 1-249 | 919 | | H0427: 1 | | |
| HADFT70 | 757158 | 431 | 156-308 | 920 | Arg-8 to Glu-13, | H0427: 1 and L0754: | | |
| | | | | | Val-25 to Ser-30. | 1. | | |
| HADFJ08 | 959297 | 432 | 83-346 | 921 | | H0427: 1 and L0438: | | |
| | | | | | | 1. | | |
| HADFG90 | 788865 | 433 | 225-455 | 922 | Leu-5 to Arg-10, | L0748: 2 and H0427: | | |
| | | | | | Leu-40 to Asn-55. | 1. | | |
| HADFD69 | 754277 | 434 | 1-432 | 923 | Lys-6 to Asn-14, | H0427: 1 and L0362: | | |
| | | | | | Ala-26 to Gln-40, | 1. | | |
| | | | | | Asp-44 to Glu-51, | | | |
| | | | | | Arg-114 to Leu-125, | | | |
| | | | | | Arg-133 to Gly-138. | | | |
| HADFC15 | 659541 | 435 | 212-322 | 924 | | L0803: 2, L0756: 2, | | |
| | | | | | | H0427: 1, L0763: 1, | | |
| | | | | | | L0439: 1, L0752: 1 and | | |
| | | | | | | L0759: 1. | | |
| HADFB60 | 740318 | 436 | 79-441 | 925 | Pro-104 to Gly-110. | H0427: 1 and L0756: | | |
| | | | | | | 1. | | |
| HADFB55 | 731686 | 437 | 275-487 | 926 | | H0427: 1 and L0743: | | |
| | | | | | | 1. | | |
| HADFB08 | 959273 | 438 | 146-289 | 927 | | H0427: 1 | | |
| HADEY09 | 625505 | 439 | 164-280 | 928 | | H0427: 1 and L0731: | | |
| | | | | | | 1. | | |
| HADEU65 | 747880 | 440 | 212-415 | 929 | Arg-27 to Thr-39, | H0427: 1 and L0748: | | |
| | | | | | Lys-51 to Lys-60. | 1. | | |
| HADEU32 | 699194 | 441 | 148-291 | 930 | | H0427: 1, L0021: 1, | | |
| | | | | | | L0805: 1 and L0595: 1. | | |
| HADET68 | 906389 | 442 | 596-769 | 931 | Arg-25 to Lys-32, | H0427: 1 and L0591: | | |
| | | | | | Arg-53 to Trp-58. | 1. | | |
| HADDS75 | 660816 | 443 | 463-254 | 932 | | H0427: 1 | 17q11-qter | |
| HADDS21 | 670802 | 444 | 11-226 | 933 | Gly-4 to Lys-10, | H0427: 1 | | |
| | | | | | Gln-36 to Glu-41, | | | |
| | | | | | Arg-61 to Ser-72. | | | |
| HADDS07 | 849000 | 445 | 49-291 | 934 | Ser-1 to Gln-9, | H0427: 1 | | |
| | | | | | Val-17 to Gly-25. | | | |
| HADDR20 | 669609 | 446 | 121-288 | 935 | Thr-1 to Lys-7, | H0427: 1 and L0766: | | |
| | | | | | Pro-16 to Ile-25, | 1. | | |
| | | | | | Phe-40 to Ser-49. | | | |
| HADDQ56 | 733340 | 447 | 192-344 | 936 | | L0748: 2 and H0427: | | |
| | | | | | | 1. | | |
| HADDP12 | 970537 | 448 | 38-154 | 937 | | H0427: 1 | | |
| HADDI89 | 865278 | 449 | 110-265 | 938 | | H0427: 1 | | |
| HADDI54 | 729760 | 450 | 89-202 | 939 | Ser-8 to Gly-13. | H0427: 1 | | |
| HADDI42 | 713700 | 451 | 115-2 | 940 | | H0427: 1 | | |
| HADDE27 | 683382 | 452 | 3-215 | 941 | | H0427: 1 and L0754: | | |
| | | | | | | 1. | | |
| HADDE15 | 952542 | 453 | 2-790 | 942 | Asn-1 to Pro-9. | H0427: 1, L0804: 1, | | |
| | | | | | | L0748: 1 and L0731: 1. | | |
| HADDC94 | 794266 | 454 | 263-544 | 943 | | H0427: 1 and L0741: | | |
| | | | | | | 1. | | |
| HADDC64 | 469113 | 455 | 108-266 | 944 | Gly-7 to Asn-12, | H0427: 1 | | |
| | | | | | Ser-29 to Asn-34. | | | |
| HADDC44 | 715928 | 456 | 2-178 | 945 | | H0427: 1 | | |
| HADDC42 | 713657 | 457 | 7-231 | 946 | Glu-10 to Arg-19, | H0427: 1 | | |
| | | | | | Ser-35 to Asp-44, | | | |
| | | | | | Ser-61 to Ser-69. | | | |
| HADDC05 | 932066 | 458 | 270-488 | 947 | Arg-32 to Lys-38. | H0427: 1 | | |
| HADDB62 | 743476 | 459 | 296-520 | 948 | | H0427: 1 | | |
| HADDB13 | 657120 | 460 | 216-320 | 949 | | H0427: 1 | | |
| HADDA04 | 925627 | 461 | 1-183 | 950 | Val-3 to Lys-14. | H0427: 1 | | |
| HADCZ08 | 959304 | 462 | 70-189 | 951 | Ser-10 to Asn-18. | H0427: 1 and L0517: | | |
| | | | | | | 1. | | |
| HADCX34 | 704030 | 463 | 37-306 | 952 | | L0756: 2 and H0427: | | |
| | | | | | | 1. | | |
| HADCW01 | 916399 | 464 | 188-361 | 953 | | L0751: 2, H0427: 1, | | |
| | | | | | | L0759: 1 and L0361: 1. | | |
| HADCP73 | 764391 | 465 | 328-462 | 954 | | H0427: 1 | | |
| HADCP50 | 723684 | 466 | 109-252 | 955 | Asn-1 to Gly-7, | H0427: 1 | | |
| | | | | | Val-20 to Lys-30, | | | |
| | | | | | Pro-39 to Val-45. | | | |
| HADCO30 | 914688 | 467 | 2-253 | 956 | Gly-10 to Leu-15. | H0427: 1 and L0747: | | |
| | | | | | | 1. | | |
| HADCO03 | 924043 | 468 | 306-506 | 957 | | H0427: 1, L0777: 1 | | |
| | | | | | | and L0731: 1. | | |
| HADCN29 | 690600 | 469 | 105-305 | 958 | | H0427: 1 and L0777: | | |
| | | | | | | 1. | | |
| HADCH77 | 826137 | 470 | 215-343 | 959 | | H0427: 1 and L0748: | | |
| | | | | | | 1. | | |
| HADCD46 | 719005 | 471 | 284-418 | 960 | Cys-17 to Arg-25. | L0731: 4 and H0427: | | |
| | | | | | | 1. | | |
| HADAY29 | 690602 | 472 | 63-203 | 961 | Glu-1 to Glu-8, | H0427: 1 and L0748: | | |
| | | | | | Ser-26 to Lys-40. | 1. | | |
| HADAS83 | 490455 | 473 | 275-3 | 962 | Pro-11 to Cys-16, | H0427: 1 | | |
| | | | | | Pro-75 to Arg-91. | | | |
| | 564848 | 499 | 233-499 | 988 | Ser-19 to Phe-25, | | | |
| | | | | | Ser-43 to Gly-57. | | | |
| HADAR23 | 675844 | 474 | 156-395 | 963 | Gly-3 to Pro-9, | L0600: 2 and H0427: | | |
| | | | | | Ala-40 to His-55, | 1. | | |
| | | | | | His-63 to Arg-69, | | | |
| | | | | | Pro-74 to Ser-80. | | | |
| HADAM60 | 740326 | 475 | 288-395 | 964 | | H0427: 1 and L0599: | | |
| | | | | | | 1. | | |
| HADAE96 | 796469 | 476 | 2-145 | 965 | Gln-10 to Asp-15, | L0741: 3 and H0427: | | |
| | | | | | Asn-24 to Pro-29. | 1. | | |
| HADAE92 | 792823 | 477 | 195-473 | 966 | Thr-1 to Lys-11, | H0427: 1 and L0754: | | |
| | | | | | His-30 to Trp-37. | 1. | | |
| HACCW79 | 774898 | 478 | 335-454 | 967 | Arg-9 to Tyr-14. | L0756: 2, S0280: 1, | | |
| | | | | | | L0740: 1 and L0759: 1. | | |
| HACCT11 | 966886 | 479 | 168-332 | 968 | | S0280: 1 and L0521: 1. | | |
| HACBW76 | 849054 | 480 | 36-224 | 969 | Glu-16 to Val-21, | L0005: 1, S0280: 1 and | | |
| | | | | | Thr-36 to Leu-47. | L0764: 1. | | |
| HACBU26 | 683006 | 481 | 134-412 | 970 | Val-49 to Lys-60. | S0280: 1 and L0748: 1. | | |
| HACBO10 | 964459 | 482 | 403-609 | 971 | Ser-8 to Ser-19, | L0717: 2, L0775: 2, | | |
| | | | | | Lys-37 to Trp-49, | S0280: 1 and L0806: 1. | | |
| | | | | | Tyr-53 to Val-58. | | | |
| HACBN71 | 872015 | 483 | 30-470 | 972 | | S0280: 1 and L0740: 1. | | |
| HACBJ83 | 875263 | 484 | 3-473 | 973 | Pro-17 to Ala-23, | S0280: 1, L0743: 1 and | | |
| | | | | | Gly-33 to Pro-39, | L0746: 1. | | |
| | | | | | Gln-49 to Pro-59, | | | |
| | | | | | Gly-98 to Gln-106. | | | |
| HACBJ17 | 663371 | 485 | 3-341 | 974 | Ile-5 to Ser-18, | L0439: 3 and S0280: 1. | | |
| | | | | | Gly-35 to Tyr-44, | | | |
| | | | | | His-69 to Gly-75. | | | |
| HACBH42 | 933951 | 486 | 72-497 | 975 | Val-33 to Pro-49, | S0280: 1 and L0777: 1. | | |
| | | | | | Pro-52 to Arg-58, | | | |
| | | | | | Thr-91 to Gly-101. | | | |
| HACBB13 | 698800 | 487 | 312-49 | 976 | Ile-56 to Asp-62. | S0280: 1 and L0748: 1. | | |
| HACAB93 | 792382 | 488 | 2-229 | 977 | Cys-1 to Gln-14. | S6022: 1 and L0766: 1. | | |
| HACAA57 | 733887 | 489 | 137-364 | 978 | Arg-17 to Ile-22. | S6022: 1, L0745: 1 and | | |
| | | | | | | L0746: 1. | | |
| HACAA03 | 924513 | 490 | 33-374 | 979 | | S6022: 1 and L0764: 1. | | |
| HABGA24 | 676827 | 491 | 2-199 | 980 | | L0766: 5, L0803: 4, | | |
| | | | | | | L0756: 2, S0348: 1, | | |
| | | | | | | L0717: 1, L0021: 1, | | |
| | | | | | | L0483: 1, L0774: 1, | | |
| | | | | | | L0750: 1, L0759: 1 and | | |
| | | | | | | L0589: 1. | | |

[0051] The first column in Table 1A provides a unique “Clone ID NO:Z” for a cDNA clone related to each contig sequence disclosed in Table 1A. This clone ID references the cDNA clone which contains at least the 5′ most sequence of the assembled contig, and at least a portion of SEQ ID NO:X was determined by directly sequencing the referenced clone. The reference clone may have more sequence than described in the sequence listing or the clone may have less. In the vast majority of cases, however, the clone is believed to encode a full-length polypeptide. In the case where a clone is not full-length, a full-length cDNA can be obtained by methods known in the art and/or as described elsewhere herein.

[0052] The second column in Table 1A provides a unique “Contig ID” identification for each contig sequence. The third column provides the “SEQ ID NO:X” identifier for each of the connective tissue associated contig polynucleotide sequences disclosed in Table 1A. The fourth column, “ORF (From-To)”, provides the location (i.e., nucleotide position numbers) within the polynucleotide sequence “SEQ ID NO:X” that delineate the preferred open reading frame (ORF) shown in the sequence listing and referenced in Table 1A, column 5, as SEQ ID NO:Y. Where the nucleotide position number “To” is lower than the nucleotide position number “From”, the preferred ORF is the reverse complement of the referenced polynucleotide sequence.

[0053] The fifth column in Table 1A provides the corresponding SEQ ID NO:Y for the polypeptide sequence encoded by the preferred ORF delineated in column 4. In one embodiment, the invention provides an amino acid sequence comprising, or alternatively consisting of, a polypeptide encoded by the portion of SEQ ID NO:X delineated by “ORF (From-To)”. Also provided are polynucleotides encoding such amino acid sequences and the complementary strand thereto.

[0054] Column 6 in Table 1A lists residues comprising epitopes contained in the polypeptides encoded by the preferred ORF (SEQ ID NO:Y), as predicted using the algorithm of Jameson and Wolf, (1988) Comp. Appl. Biosci. 4:181-186. The Jameson-Wolf antigenic analysis was performed using the computer program PROTEAN (Version 3.11 for the Power Macintosh, DNASTAR, Inc., 1228 South Park Street Madison, Wis.). In specific embodiments, polypeptides of the invention comprise, or alternatively consist of, at least one, two, three, four, five or more of the predicted epitopes as described in Table 1A. It will be appreciated that depending on the analytical criteria used to predict antigenic determinants, the exact address of the determinant may vary slightly.

[0055] Column 7 in Table 1A provides an expression profile and library code: count for each of the contig sequences (SEQ ID NO:X) disclosed in Table 1A, which can routinely be combined with the information provided in Table 4 and used to determine the normal or diseased tissues, cells, and/or cell line libraries which predominantly express the polynucleotides of the invention. The first number in column 7 (preceding the colon), represents the tissue/cell source identifier code corresponding to the code and description provided in Table 4. For those identifier codes in which the first two letters are not “AR”, the second number in column 7 (following the colon) represents the number of times a sequence corresponding to the reference polynucleotide sequence was identified in the tissue/cell source. Those tissue/cell source identifier codes in which the first two letters are “AR” designate information generated using DNA array technology. Utilizing this technology, cDNAs were amplified by PCR and then transferred, in duplicate, onto the array. Gene expression was assayed through hybridization of first strand cDNA probes to the DNA array. cDNA probes were generated from total RNA extracted from a variety of different tissues and cell lines. Probe synthesis was performed in the presence of ³³P dCTP, using oligo(dT) to prime reverse transcription. After hybridization, high stringency washing conditions were employed to remove non-specific hybrids from the array. The remaining signal, emanating from each gene target, was measured using a Phosphorimager. Gene expression was reported as Phosphor Stimulating Luminescence (PSL) which reflects the level of phosphor signal generated from the probe hybridized to each of the gene targets represented on the array. A local background signal subtraction was performed before the total signal generated from each array was used to normalize gene expression between the different hybridizations. The value presented after “[array code]:” represents the mean of the duplicate values, following background subtraction and probe normalization. One of skill in the art could routinely use this information to identify normal and/or diseased tissue(s) which show a predominant expression pattern of the corresponding polynucleotide of the invention or to identify polynucleotides which show predominant and/or specific tissue and/or cell expression. The sequences disclosed herein have been determined to be predominantly expressed in connective tissues, including normal and diseased connective tissues (See Table 1A, column 7 and Table 4).

[0056] Column 8 in Table 1A provides a chromosomal map location for certain polynucleotides of the invention. Chromosomal location was determined by finding exact matches to EST and cDNA sequences contained in the NCBI (National Center for Biotechnology Information) UniGene database. Each sequence in the UniGene database is assigned to a “cluster”; all of the ESTs, cDNAs, and STSs in a cluster are believed to be derived from a single gene. Chromosomal mapping data is often available for one or more sequence(s) in a UniGene cluster; this data (if consistent) is then applied to the cluster as a whole. Thus, it is possible to infer the chromosomal location of a new polynucleotide sequence by determining its identity with a mapped UniGene cluster.

[0057] A modified version of the computer program BLASTN (Altshul et al., J. Mol. Biol. 215:403-410 (1990), and Gish et al., Nat. Genet. 3:266-272 (1993)) was used to search the UniGene database for EST or cDNA sequences that contain exact or near-exact matches to a polynucleotide sequence of the invention (the ‘Query’). A sequence from the UniGene database (the ‘Subject’) was said to be an exact match if it contained a segment of 50 nucleotides in length such that 48 of those nucleotides were in the same order as found in the Query sequence. If all of the matches that met this criteria were in the same UniGene cluster, and mapping data was available for this cluster, it is indicated in Table 1A under the heading “Cytologic Band”. Where a cluster had been further localized to a distinct cytologic band, that band is disclosed; where no banding information was available, but the gene had been localized to a single chromosome, the chromosome is disclosed.

[0058] Once a presumptive chromosomal location was determined for a polynucleotide of the invention, an associated disease locus was identified by comparison with a database of diseases which have been experimentally associated with genetic loci. The database used was the Morbid Map, derived from OMIM™ (supra). If the putative chromosomal location of a polynucleotide of the invention (Query sequence) was associated with a disease in the Morbid Map database, an OMIM reference identification number was noted in column 9, Table 1A, labeled “OMIM Disease Reference(s)”. Table 5 is a key to the OMIM reference identification numbers (column 1), and provides a description of the associated disease in Column 2.

TABLE 1B

| Clone ID | SEQ ID | CONTIG | BAC ID: | SEQ ID | EXON |
|---|---|---|---|---|---|
| NO: Z | NO: X | ID: | A | NO: B | From-To |
| HACBA49 | 14 | 722875 | AC078913 | 989 | 1-436 |
| HACBA49 | 14 | 722875 | AC078913 | 990 | 1-263 |
| HACBT81 | 15 | 855720 | AL136332 | 991 | 1-116 |
| | | | | | 244-618 |
| | | | | | 1399-1481 |
| | | | | | 2637-2724 |
| | | | | | 2842-2957 |
| | | | | | 3010-3244 |
| | | | | | 3302-3740 |
| | | | | | 3879-4367 |
| | | | | | 4407-4484 |
| | | | | | 4783-5307 |
| | | | | | 5981-6056 |
| | | | | | 6472-6806 |
| | | | | | 6903-7024 |
| | | | | | 7110-7225 |
| | | | | | 7843-8458 |
| | | | | | 8924-9255 |
| | | | | | 10786-10887 |
| | | | | | 12006-12616 |
| | | | | | 13979-15061 |
| HACBT81 | 15 | 855720 | AL136332 | 992 | 1-140 |
| HACCY20 | 16 | 845144 | AC069276 | 993 | 1-117 |
| | | | | | 548-624 |
| | | | | | 1839-1865 |
| HADAM69 | 18 | 699190 | AC048337 | 994 | 1-464 |
| HADAM69 | 18 | 699190 | AC073650 | 995 | 1-1925 |
| | | | | | 2429-3003 |
| | | | | | 3615-4033 |
| | | | | | 4226-4431 |
| | | | | | 4670-4764 |
| | | | | | 4797-6504 |
| | | | | | 6808-7502 |
| | | | | | 7742-8205 |
| | | | | | 8627-8847 |
| HADAM69 | 18 | 699190 | AC048337 | 996 | 1-695 |
| HADAM69 | 18 | 699190 | AC073650 | 997 | 1-191 |
| HADCO14 | 22 | 657572 | AC012351 | 998 | 1-308 |
| HADCO14 | 22 | 657572 | AC004933 | 999 | 1-308 |
| HADCO14 | 22 | 657572 | AC073462 | 1000 | 1-308 |
| HADCO14 | 22 | 657572 | AC006028 | 1001 | 1-308 |
| HADCO14 | 22 | 657572 | AC012351 | 1002 | 1-277 |
| HADCO14 | 22 | 657572 | AC012351 | 1003 | 1-266 |
| HADCO14 | 22 | 657572 | AC004933 | 1004 | 1-299 |
| HADCO14 | 22 | 657572 | AC006028 | 1005 | 1-239 |
| HADCO14 | 22 | 657572 | AC006028 | 1006 | 1-266 |
| HADCO44 | 23 | 716559 | AC021078 | 1007 | 1-356 |
| HADCO44 | 23 | 716559 | AC021078 | 1008 | 1-794 |
| HADCO48 | 24 | 865306 | AP002790 | 1009 | 1-312 |
| HADCO48 | 24 | 865306 | AC064801 | 1010 | 1-312 |
| HADCO48 | 24 | 865306 | AP002790 | 1011 | 1-603 |
| HADCO48 | 24 | 865306 | AC064801 | 1012 | 1-603 |
| HADCO57 | 26 | 734705 | AC074077 | 1013 | 1-349 |
| HADCX38 | 30 | 705751 | AL353578 | 1014 | 1-438 |
| HADCX38 | 30 | 705751 | AL133477 | 1015 | 1-438 |
| HADCX38 | 30 | 705751 | AL353578 | 1016 | 1-341 |
| HADCX38 | 30 | 705751 | AL133477 | 1017 | 1-208 |
| HADCX38 | 30 | 705751 | AL133477 | 1018 | 1-341 |
| HADDB75 | 31 | 757028 | AC068936 | 1019 | 1-86 |
| | | | | | 397-508 |
| | | | | | 4158-4277 |
| | | | | | 4607-4781 |
| | | | | | 4820-5422 |
| | | | | | 5677-5788 |
| | | | | | 6261-6349 |
| | | | | | 6384-6753 |
| | | | | | 6814-6902 |
| HADDB75 | 31 | 757028 | AC006405 | 1020 | 1-852 |
| | | | | | 2867-2974 |
| | | | | | 3284-3395 |
| | | | | | 7046-7165 |
| | | | | | 7495-7669 |
| | | | | | 7707-8244 |
| | | | | | 8499-8610 |
| | | | | | 9206-9575 |
| | | | | | 9636-9724 |
| | | | | | 10892-11305 |
| | | | | | 11498-11601 |
| | | | | | 13245-13564 |
| | | | | | 15626-15761 |
| | | | | | 16264-16363 |
| | | | | | 17246-17403 |
| | | | | | 18613-18793 |
| | | | | | 19923-20414 |
| | | | | | 20563-20671 |
| | | | | | 20852-22161 |
| HADDB75 | 31 | 757028 | AC068936 | 1021 | 1-414 |
| HADDB75 | 31 | 757028 | AC006405 | 1022 | 1-2826 |
| | | | | | 3446-3608 |
| HADDB75 | 31 | 757028 | AC006405 | 1023 | 1-96 |
| HADDC66 | 32 | 787301 | AL049563 | 1024 | 1-643 |
| HADDC66 | 32 | 787301 | AL049563 | 1025 | 1-363 |
| HADDC66 | 32 | 787301 | AL049563 | 1026 | 1-330 |
| HADEU56 | 36 | 733346 | AC017092 | 1027 | 1-337 |
| | | | | | 392-1302 |
| HADEU56 | 36 | 733346 | AC011794 | 1028 | 1-337 |
| | | | | | 392-1302 |
| HADEU56 | 36 | 733346 | AC008513 | 1029 | 1-337 |
| | | | | | 392-1302 |
| HADEU56 | 36 | 733346 | AC011794 | 1030 | 1-153 |
| HADFX30 | 38 | 970565 | AC011498 | 1031 | 1-603 |
| HADFX30 | 38 | 970565 | AC011498 | 1032 | 1-247 |
| HADFX30 | 38 | 970565 | AC011498 | 1033 | 1-252 |
| HADFX35 | 39 | 675830 | AL139808 | 1034 | 1-1361 |
| HADFX35 | 39 | 675830 | AL136368 | 1035 | 1-1808 |
| HADFX35 | 39 | 675830 | AL158163 | 1036 | 1-1808 |
| HADFX35 | 39 | 675830 | AL136368 | 1037 | 1-338 |
| HADFX35 | 39 | 675830 | AL136368 | 1038 | 1-293 |
| HADFX35 | 39 | 675830 | AL158163 | 1039 | 1-293 |
| HADFX35 | 39 | 675830 | AL158163 | 1040 | 1-338 |
| HADGA36 | 40 | 705766 | AL022315 | 1041 | 1-104 |
| | | | | | 2082-2927 |
| | | | | | 4315-4441 |
| | | | | | 5256-5330 |
| | | | | | 5585-6331 |
| | | | | | 7626-8923 |
| HADGA36 | 40 | 705766 | AL022315 | 1042 | 1-945 |
| HADGD54 | 41 | 729761 | AL356000 | 1043 | 1-569 |
| | | | | | 827-1480 |
| | | | | | 1542-1854 |
| | | | | | 2049-4571 |
| HADGD54 | 41 | 729761 | AC024502 | 1044 | 1-190 |
| | | | | | 2311-2654 |
| | | | | | 2971-3108 |
| | | | | | 4195-4501 |
| | | | | | 4743-5311 |
| | | | | | 5569-6222 |
| | | | | | 6284-6596 |
| | | | | | 6791-10462 |
| HADGD54 | 41 | 729761 | AC024502 | 1045 | 1-298 |
| HADGE37 | 42 | 744768 | AC018653 | 1046 | 1-390 |
| | | | | | 712-886 |
| | | | | | 1163-1428 |
| | | | | | 1737-1883 |
| | | | | | 2118-3268 |
| | | | | | 7117-7225 |
| | | | | | 7626-8121 |
| | | | | | 8681-8881 |
| | | | | | 9131-10138 |
| HADGE37 | 42 | 744768 | AC018653 | 1047 | 1-154 |
| HADXA61 | 44 | 741926 | AC010402 | 1048 | 1-288 |
| HADXA61 | 44 | 741926 | AC008920 | 1049 | 1-135 |
| | | | | | 1530-1670 |
| | | | | | 2247-2534 |
| | | | | | 2735-3065 |
| | | | | | 3233-3367 |
| | | | | | 4240-4407 |
| | | | | | 6282-6385 |
| HADXA61 | 44 | 741926 | AC010402 | 1050 | 1-331 |
| HARMG09 | 45 | 705996 | AC069168 | 1051 | 1-412 |
| HARMG09 | 45 | 705996 | AC023672 | 1052 | 1-412 |
| HARMG09 | 45 | 705996 | AC023672 | 1053 | 1-447 |
| HARMG60 | 46 | 933284 | AC019300 | 1054 | 1-552 |
| HARMG60 | 46 | 933284 | AC025821 | 1055 | 1-552 |
| HARMM43 | 47 | 714763 | AL355773 | 1056 | 1-854 |
| | | | | | 2013-2134 |
| | | | | | 2650-3156 |
| | | | | | 3284-3379 |
| | | | | | 3563-3826 |
| | | | | | 4498-4620 |
| | | | | | 5597-5673 |
| | | | | | 7008-7286 |
| | | | | | 7721-8002 |
| | | | | | 8099-8648 |
| | | | | | 9030-9519 |
| HARMM43 | 47 | 714763 | AL138499 | 1057 | 1-74 |
| | | | | | 1171-1414 |
| | | | | | 2003-2145 |
| | | | | | 5281-5390 |
| | | | | | 6571-6708 |
| | | | | | 7273-8042 |
| | | | | | 8498-8581 |
| | | | | | 9242-9511 |
| | | | | | 9823-9893 |
| | | | | | 11229-11269 |
| | | | | | 11959-12050 |
| | | | | | 12418-12490 |
| | | | | | 12981-13017 |
| | | | | | 13172-13255 |
| | | | | | 13739-13807 |
| | | | | | 16333-16490 |
| | | | | | 16856-16966 |
| | | | | | 17025-17457 |
| | | | | | 19018-19053 |
| | | | | | 19571-19708 |
| | | | | | 19739-20018 |
| | | | | | 20071-20166 |
| | | | | | 20847-20919 |
| | | | | | 21057-21542 |
| | | | | | 21820-21861 |
| | | | | | 22375-22563 |
| | | | | | 22606-22687 |
| | | | | | 23332-23536 |
| | | | | | 23934-23974 |
| | | | | | 24441-25133 |
| | | | | | 25607-26151 |
| | | | | | 27567-27728 |
| | | | | | 28089-28180 |
| | | | | | 30591-30662 |
| | | | | | 31711-31750 |
| | | | | | 32025-32303 |
| | | | | | 32728-33189 |
| | | | | | 33569-33660 |
| | | | | | 34582-35243 |
| | | | | | 36002-36089 |
| | | | | | 37700-38027 |
| | | | | | 38479-39379 |
| | | | | | 39447-39994 |
| | | | | | 39996-40412 |
| | | | | | 40939-41175 |
| | | | | | 42777-42859 |
| | | | | | 43613-43709 |
| | | | | | 43834-43926 |
| | | | | | 44676-44750 |
| | | | | | 44978-45061 |
| | | | | | 45219-45304 |
| | | | | | 45604-46116 |
| | | | | | 46592-46981 |
| | | | | | 47116-47969 |
| | | | | | 49128-49249 |
| | | | | | 49765-50272 |
| | | | | | 50400-50495 |
| | | | | | 50679-50942 |
| | | | | | 51613-51736 |
| | | | | | 52713-52789 |
| | | | | | 54124-54402 |
| | | | | | 54837-55118 |
| | | | | | 55215-55764 |
| | | | | | 56143-56632 |
| HARMM43 | 47 | 714763 | AL138499 | 1058 | 1-386 |
| | | | | | 635-1149 |
| HARMP39 | 48 | 705255 | AL356597 | 1059 | 1-574 |
| HARMP39 | 48 | 705255 | AL356597 | 1060 | 1-254 |
| HARMP42 | 49 | 713247 | AC009884 | 1061 | 1-524 |
| HARMS39 | 50 | 933273 | AC068789 | 1062 | 1-117 |
| | | | | | 1201-1235 |
| | | | | | 2649-2755 |
| | | | | | 3094-3186 |
| | | | | | 3195-3748 |
| HARMS39 | 50 | 933273 | AC025570 | | 1-332 |
| HARMS39 | 50 | 933273 | AC025686 | 1064 | 1-117 |
| | | | | | 1203-1237 |
| | | | | | 2651-2757 |
| | | | | | 3096-3188 |
| | | | | | 3197-3770 |
| HARMS77 | 51 | 752659 | AC005104 | 1065 | 1-384 |
| HARMA77 | 51 | 752659 | AC005104 | 1066 | 1-155 |
| HARMS77 | 51 | 752659 | AC005104 | 1067 | 1-2931 |
| HARMU03 | 52 | 923179 | AC025861 | 1068 | 1-184 |
| HARMU03 | 52 | 923179 | AC067825 | 1069 | 1-567 |
| HARMU03 | 52 | 923179 | AL353794 | 1070 | 1-590 |
| HARMU03 | 52 | 923179 | AL353791 | 1071 | 1-576 |
| HARMU03 | 52 | 923179 | AL353729 | 1072 | 1-576 |
| HARMU03 | 52 | 923179 | AL353791 | 1073 | 1-267 |
| | | | | | 822-968 |
| | | | | | 2514-2795 |
| HARMU03 | 52 | 923179 | AL353791 | 1074 | 1-308 |
| HARMU03 | 52 | 923179 | AL353729 | 1075 | 1-205 |
| | | | | | 757-1091 |
| | | | | | 1333-1635 |
| HARNC40 | 55 | 710613 | AL359396 | 1076 | 1-678 |
| HARND80 | 56 | 864604 | AP001459 | 1077 | 1-575 |
| | | | | | 908-1384 |
| | | | | | 2117-2230 |
| | | | | | 2335-2475 |
| | | | | | 2884-2941 |
| | | | | | 3046-3263 |
| | | | | | 3879-4131 |
| | | | | | 4477-4739 |
| | | | | | 7651-7883 |
| | | | | | 8062-8168 |
| | | | | | 8498-8642 |
| | | | | | 8740-8974 |
| HARND80 | 56 | 864604 | AP001362 | 1078 | 1-140 |
| | | | | | 549-606 |
| | | | | | 711-928 |
| | | | | | 1541-1988 |
| | | | | | 2142-2404 |
| | | | | | 5317-5549 |
| | | | | | 5728-5834 |
| | | | | | 6164-6308 |
| | | | | | 6406-6640 |
| HARND80 | 56 | 864604 | AC022488 | 1079 | 1-99 |
| | | | | | 435-525 |
| | | | | | 680-793 |
| | | | | | 918-1021 |
| | | | | | 1162-1255 |
| | | | | | 1415-1567 |
| | | | | | 1983-2557 |
| | | | | | 2891-3364 |
| | | | | | 4092-4205 |
| | | | | | 4310-4450 |
| | | | | | 4858-4915 |
| | | | | | 5021-5237 |
| | | | | | 5851-6785 |
| | | | | | 7133-7163 |
| | | | | | 9614-9843 |
| | | | | | 10020-10125 |
| | | | | | 10452-10596 |
| | | | | | 10692-10923 |
| HARND80 | 56 | 864604 | AP001459 | 1080 | 1-248 |
| | | | | | 616-1133 |
| | | | | | 1206-1886 |
| HARND80 | 56 | 864604 | AP001362 | 1081 | 1-248 |
| | | | | | 616-1135 |
| HARND80 | 56 | 864604 | AC022488 | 1082 | 1-353 |
| HARND80 | 56 | 864604 | AC022488 | 1083 | 1-228 |
| | | | | | 595-1111 |
| | | | | | 1184-1700 |
| | | | | | 1702-1847 |
| HARNH52 | 58 | 726277 | AL359749 | 1084 | 1-354 |
| HARNO29 | 59 | 690043 | AP000794 | 1085 | 1-254 |
| HARNO29 | 59 | 690043 | AP000794 | 1086 | 1-441 |
| HAWAD93 | 60 | 508724 | AL160159 | 1087 | 1-60 |
| | | | | | 115-481 |
| HAWAD93 | 60 | 508724 | AL354927 | 1088 | 1-60 |
| | | | | | 115-481 |
| HAWAD93 | 60 | 508724 | AL160159 | 1089 | 1-253 |
| HAWAD93 | 60 | 508724 | AL354927 | 1090 | 1-253 |
| HAWAP49 | 61 | 537199 | AL109741 | 1091 | 1-558 |
| | | | | | 683-2946 |
| | | | | | 3005-4063 |
| HAWAP49 | 61 | 537199 | AL161741 | 1092 | 1-2264 |
| | | | | | 2323-3381 |
| HAWAP49 | 61 | 537199 | AL109741 | 1093 | 1-589 |
| HAWAP49 | 61 | 537199 | AL161741 | 1094 | 1-589 |
| HBIMG05 | 62 | 930827 | AC013648 | 1095 | 1-388 |
| | | | | | 711-1430 |
| | | | | | 2248-2407 |
| HBIMG05 | 62 | 930827 | AC013648 | 1096 | 1-427 |
| HBIMG05 | 62 | 930827 | AC013648 | 1097 | 1-82 |
| | | | | | 562-616 |
| | | | | | 2402-2542 |
| | | | | | 4845-4949 |
| HBIMS01 | 63 | 913827 | AL158049 | 1098 | 1-816 |
| HBIMS01 | 63 | 913827 | AL158049 | 1099 | 1-977 |
| HBIMS01 | 63 | 913827 | AL158049 | 1100 | 1-549 |
| HBIOO63 | 64 | 969020 | AC068451 | 1101 | 1-325 |
| | | | | | 1063-2934 |
| | | | | | 2956-3637 |
| | | | | | 3643-3941 |
| | | | | | 4592-5386 |
| | | | | | 5463-5530 |
| HBIOO63 | 64 | 969020 | AC068451 | 1102 | 1-290 |
| HBIOP02 | 65 | 918022 | AC068266 | 1103 | 1-138 |
| HBIOP02 | 65 | 918022 | AC068266 | 1104 | 1-638 |
| HBIOP02 | 65 | 918022 | AC068266 | 1105 | 1-762 |
| HBIOS05 | 66 | 930776 | AL355480 | 1106 | 1-695 |
| | | | | | 736-1435 |
| | | | | | 1556-1637 |
| | | | | | 1721-1841 |
| | | | | | 2042-2147 |
| | | | | | 2393-2720 |
| HBIOS05 | 66 | 930776 | AL355480 | 1107 | 1-209 |
| | | | | | 279-391 |
| | | | | | 671-1068 |
| HBIOS05 | 66 | 930776 | AL355480 | 1108 | 1-202 |
| HERAC92 | 69 | 973454 | AC023498 | 1109 | 1-611 |
| | | | | | 1707-1777 |
| | | | | | 2285-2396 |
| | | | | | 3594-3899 |
| | | | | | 3993-4026 |
| | | | | | 4102-4259 |
| | | | | | 4318-4819 |
| | | | | | 6094-6191 |
| HERAC92 | 69 | 973454 | AC010198 | 1110 | 1-611 |
| | | | | | 1711-1781 |
| | | | | | 2289-2400 |
| | | | | | 3598-3903 |
| | | | | | 3997-4030 |
| | | | | | 4106-4263 |
| | | | | | 4322-4823 |
| | | | | | 6097-6194 |
| HERAC92 | 69 | 973454 | AC023498 | 1111 | 1-301 |
| HERAC92 | 69 | 973454 | AC023498 | 1112 | 1-300 |
| HERAC92 | 69 | 973454 | AC010198 | 1113 | 1-301 |
| HERAD10 | 71 | 973489 | AC068122 | 1114 | 1-375 |
| HERAD10 | 71 | 973489 | AL359089 | 1115 | 1-375 |
| HERAD10 | 71 | 973489 | AL359089 | 1116 | 1-407 |
| HERAG57 | 73 | 973668 | AC034237 | 1117 | 1-52 |
| | | | | | 1051-1343 |
| | | | | | 2584-2859 |
| HERAG57 | 73 | 973668 | AC021463 | 1118 | 1-291 |
| HERAG57 | 73 | 973668 | AC021463 | 1119 | 1-106 |
| HERAJ78 | 74 | 973676 | AC009949 | 1120 | 1-848 |
| HERAM84 | 76 | 529193 | AC025977 | 1121 | 1-282 |
| | | | | | 2534-2803 |
| | | | | | 3379-3590 |
| HERAM84 | 76 | 529193 | AC040170 | 1122 | 1-282 |
| | | | | | 2533-2802 |
| | | | | | 3378-3589 |
| HERAM84 | 76 | 529193 | AC013513 | 1123 | 1-270 |
| HERAM84 | 76 | 529193 | AC013513 | 1124 | 1-166 |
| HESAD92 | 79 | 537451 | AC008695 | 1125 | 1-773 |
| HESAD92 | 79 | 537451 | AC005218 | 1126 | 1-773 |
| HESAD92 | 79 | 537451 | AC008695 | 1127 | 1-774 |
| HESAD92 | 79 | 537451 | AC005218 | 1128 | 1-774 |
| HESAT22 | 80 | 537449 | AC016585 | 1129 | 1-328 |
| HESAT22 | 80 | 537449 | AC026467 | 1130 | 1-327 |
| HESAT88 | 81 | 537446 | AL138709 | 1131 | 1-222 |
| HFEAG37 | 82 | 705454 | Z99289 | 1132 | 1-1153 |
| | | | | | 1168-1755 |
| | | | | | 3469-3564 |
| | | | | | 3581-4021 |
| | | | | | 5066-5224 |
| | | | | | 7327-7437 |
| | | | | | 8691-8829 |
| | | | | | 9049-9279 |
| | | | | | 12124-12616 |
| | | | | | 12725-12932 |
| HFEAH35 | 83 | 504585 | AL132987 | 1133 | 1-126 |
| | | | | | 766-1274 |
| | | | | | 2042-2684 |
| | | | | | 3419-3542 |
| | | | | | 4713-4919 |
| | | | | | 7711-8106 |
| | | | | | 8844-9165 |
| | | | | | 9416-9587 |
| | | | | | 11482-11779 |
| | | | | | 12282-12636 |
| | | | | | 12871-13002 |
| | | | | | 13403-14019 |
| | | | | | 15835-15914 |
| | | | | | 17712-17809 |
| HFEAH35 | 83 | 504585 | AL132987 | 1134 | 1-383 |
| HFEAH35 | 83 | 504585 | AL132987 | 1135 | 1-475 |
| HFEAN02 | 84 | 932828 | AL133294 | 1136 | 1-278 |
| HFEAN02 | 84 | 932828 | AL133294 | 1137 | 1-509 |
| HFEAN43 | 85 | 524355 | AL391069 | 1138 | 1-699 |
| | | | | | 747-1230 |
| | | | | | 1343-1900 |
| | | | | | 2474-2616 |
| | | | | | 2694-2926 |
| | | | | | 3029-3101 |
| | | | | | 3258-3351 |
| HFEAN43 | 85 | 524355 | AL391069 | 1139 | 1-384 |
| HFEAQ11 | 87 | 530368 | AL356867 | 1140 | 1-468 |
| | | | | | 657-866 |
| | | | | | 1115-1736 |
| HFEAS89 | 88 | 960624 | AC068117 | 1141 | 1-132 |
| | | | | | 695-848 |
| | | | | | 1047-1180 |
| | | | | | 2087-2192 |
| | | | | | 2278-2591 |
| | | | | | 3580-3684 |
| | | | | | 4418-4622 |
| HFEAS89 | 88 | 960624 | AC068117 | 1142 | 1-486 |
| HFEBG06 | 93 | 935683 | AC055807 | 1143 | 1-368 |
| | | | | | 430-1049 |
| HFEBL88 | 94 | 766085 | AC021165 | 1144 | 1-223 |
| | | | | | 332-2006 |
| HFEBL88 | 94 | 766085 | AC022435 | 1145 | 1-2423 |
| HFEBL88 | 94 | 766085 | AC010454 | 1146 | 1-2428 |
| HFEBL88 | 94 | 766085 | AC024592 | 1147 | 1-2426 |
| HFEBL88 | 94 | 766085 | AC022435 | 1148 | 1-89 |
| HKABE64 | 98 | 879492 | AC018629 | 1149 | 1-74 |
| | | | | | 2195-2617 |
| | | | | | 3133-3573 |
| | | | | | 5088-5526 |
| HKABE64 | 98 | 879492 | AC018629 | 1150 | 1-344 |
| HKACL95 | 102 | 973360 | AL050402 | 1151 | 1-427 |
| HKACL95 | 102 | 973360 | AL050402 | 1152 | 1-155 |
| HKACM63 | 103 | 952653 | AP000920 | 1153 | 1-67 |
| | | | | | 4967-5603 |
| | | | | | 5625-5938 |
| HKACM63 | 103 | 952653 | AP000920 | 1154 | 1-85 |
| HKACU93 | 104 | 908022 | AC008620 | 1155 | 1-558 |
| | | | | | 2623-2750 |
| | | | | | 3090-3275 |
| | | | | | 3856-3989 |
| | | | | | 6489-6581 |
| | | | | | 6895-7342 |
| | | | | | 7704-8026 |
| | | | | | 8401-8629 |
| | | | | | 9153-11553 |
| HKACU93 | 104 | 908022 | AC008620 | 1156 | 1-446 |
| HKADP74 | 107 | 765535 | AC005726 | 1157 | 1-138 |
| | | | | | 399-526 |
| | | | | | 4423-4719 |
| | | | | | 5965-7053 |
| | | | | | 7162-7338 |
| | | | | | 8147-8288 |
| | | | | | 12535-12611 |
| | | | | | 12852-12945 |
| | | | | | 13035-13174 |
| | | | | | 13383-13504 |
| | | | | | 13623-13716 |
| | | | | | 13815-13935 |
| | | | | | 14288-14383 |
| | | | | | 14553-14705 |
| | | | | | 14783-14885 |
| | | | | | 15047-16061 |
| | | | | | 18915-19026 |
| | | | | | 19198-19284 |
| | | | | | 19547-19675 |
| | | | | | 19780-19904 |
| | | | | | 20281-21470 |
| HKADP74 | 107 | 765535 | AC005726 | 1158 | 1-128 |
| | | | | | 902-959 |
| | | | | | 1377-1507 |
| | | | | | 1586-1806 |
| | | | | | 1916-1985 |
| | | | | | 2055-2231 |
| | | | | | 2338-2433 |
| | | | | | 2681-2871 |
| | | | | | 2977-3198 |
| | | | | | 3300-3809 |
| HKAEC04 | 108 | 857355 | AC067749 | 1159 | 1-81 |
| | | | | | 610-1275 |
| | | | | | 1444-1660 |
| | | | | | 1750-2267 |
| | | | | | 2590-3070 |
| | | | | | 3195-3769 |
| | | | | | 3824-4507 |
| | | | | | 4543-4871 |
| | | | | | 4996-6355 |
| | | | | | 6426-6973 |
| | | | | | 6998-7524 |
| HKAEC04 | 108 | 857355 | AC067749 | 1160 | 1-360 |
| HKAEE60 | 109 | 812691 | AL158217 | 1161 | 1-945 |
| | | | | | 1211-1640 |
| | | | | | 2048-2161 |
| | | | | | 2383-3444 |
| | | | | | 4592-4710 |
| | | | | | 5395-5629 |
| | | | | | 5953-6265 |
| HKAEE60 | 109 | 812691 | AL031848 | 1162 | 1-945 |
| | | | | | 1211-1640 |
| | | | | | 2047-3444 |
| | | | | | 4592-4710 |
| | | | | | 5078-5201 |
| | | | | | 5395-5629 |
| HKAEE60 | 109 | 812691 | AL158217 | 1163 | 1-43 |
| | | | | | 77-198 |
| HKAEE60 | 109 | 812691 | AL031848 | 1164 | 1-313 |
| HKAEV94 | 111 | 973353 | AC018662 | 1165 | 1-372 |
| HKAEV94 | 111 | 973353 | AC008039 | 1166 | 1-372 |
| HKAEV94 | 111 | 973353 | AC018662 | 1167 | 1-164 |
| HKAEV94 | 111 | 973353 | AC008039 | 1168 | 1-164 |
| HKAFO42 | 113 | 713722 | AC024400 | 1169 | 1-616 |
| HKAFO42 | 113 | 713722 | AC024400 | 1170 | 1-635 |
| HKAFO42 | 113 | 713722 | AC022059 | 1171 | 1-1250 |
| | | | | | 1310-2528 |
| HKAFO42 | 113 | 713722 | AC022059 | 1172 | 1-842 |
| HKAHF84 | 115 | 887386 | AC024085 | 1173 | 1-65 |
| | | | | | 3759-4150 |
| | | | | | 5563-5643 |
| | | | | | 6086-6223 |
| | | | | | 7197-7422 |
| | | | | | 7635-7683 |
| HKAHF84 | 115 | 887386 | AC024085 | 1174 | 1-106 |
| HKAHF84 | 115 | 887386 | AC024085 | 1175 | 1-343 |
| HKAIF25 | 118 | 974416 | AL126293 | 1176 | 1-295 |
| | | | | | 982-1082 |
| | | | | | 2381-3243 |
| HKAIF25 | 118 | 974416 | AL136293 | 1177 | 1-119 |
| HKAIL12 | 119 | 893937 | AL157697 | 1178 | 1-286 |
| HKAIL12 | 119 | 893937 | AL035588 | 1179 | 1-292 |
| HKAIL12 | 119 | 893937 | AL035588 | 1180 | 1-313 |
| HKAJG02 | 121 | 857330 | AC073984 | 1181 | 1-1483 |
| HKAKI80 | 124 | 973231 | AC004991 | 1182 | 1-538 |
| | | | | | 566-715 |
| | | | | | 1576-1985 |
| | | | | | 4789-4988 |
| | | | | | 7590-7740 |
| | | | | | 7760-8055 |
| | | | | | 8147-8297 |
| | | | | | 8594-9056 |
| | | | | | 10201-10256 |
| HKAKI80 | 124 | 973231 | AC004991 | 1183 | 1-119 |
| | | | | | 768-1002 |
| | | | | | 1546-1672 |
| HKAKP85 | 126 | 927032 | AL138898 | 1184 | 1-443 |
| HKAKP85 | 126 | 927032 | AL138898 | 1185 | 1-323 |
| HKAKP85 | 126 | 927032 | AL138898 | 1186 | 1-484 |
| HKAOE10 | 127 | 963543 | AC013416 | 1187 | 1-84 |
| | | | | | 546-731 |
| | | | | | 872-1686 |
| | | | | | 2025-2959 |
| | | | | | 2986-3171 |
| | | | | | 4525-4666 |
| | | | | | 5789-6100 |
| | | | | | 7377-7730 |
| | | | | | 7835-7896 |
| | | | | | 7898-8202 |
| | | | | | 8575-9161 |
| | | | | | 9545-9656 |
| | | | | | 9828-10129 |
| | | | | | 10326-10506 |
| | | | | | 11861-12555 |
| HKAOE10 | 127 | 963543 | AC013416 | 1188 | 1-261 |
| HKAOM71 | 128 | 761303 | AL139013 | 1189 | 1-536 |
| HKAOM71 | 128 | 761303 | AL354953 | 1190 | 1-536 |
| HKAOM71 | 128 | 761303 | AL139013 | 1191 | 1-443 |
| HKAOM71 | 128 | 761303 | AL354953 | 1192 | 1-443 |
| HKAPN78 | 131 | 973220 | AC009172 | 1193 | 1-770 |
| HKAPN78 | 131 | 973220 | AC007598 | 1194 | 1-767 |
| HKAPN78 | 131 | 973220 | AC007612 | 1195 | 1-767 |
| HKAPN78 | 131 | 973220 | AC009172 | 1196 | 1-760 |
| HKAPN78 | 131 | 973220 | AC007598 | 1197 | 1-760 |
| | | | | | 841-1311 |
| | | | | | 1676-2080 |
| | | | | | 4416-5080 |
| HKAPN78 | 131 | 973220 | AC007612 | 1198 | 1-760 |
| | | | | | 841-1311 |
| | | | | | 1676-2080 |
| | | | | | 4416-5080 |
| HOUCL76 | 134 | 531425 | AC016824 | 1199 | 1-299 |
| HOUCL76 | 134 | 531425 | AC023906 | 1200 | 1-299 |
| HOUCL76 | 134 | 531425 | AC016824 | 1201 | 1-299 |
| HOUCL76 | 134 | 531425 | AC023906 | 1202 | 1-212 |
| HOUCR21 | 135 | 936034 | AL356221 | 1203 | 1-107 |
| | | | | | 764-1342 |
| | | | | | 1998-2170 |
| | | | | | 3272-3324 |
| | | | | | 3873-4255 |
| HOUCR21 | 135 | 936034 | AC068053 | 1204 | 1-107 |
| | | | | | 763-1341 |
| | | | | | 1997-2169 |
| | | | | | 3271-3323 |
| | | | | | 3872-4254 |
| HOUCR21 | 135 | 936034 | AC068053 | 1205 | 1-251 |
| HOUCR21 | 135 | 936034 | AL356221 | 1206 | 1-562 |
| HOUCS91 | 138 | 526717 | AL158152 | 1207 | 1-6049 |
| | | | | | 8437-9272 |
| | | | | | 9371-9523 |
| | | | | | 11900-12703 |
| | | | | | 13529-13693 |
| | | | | | 14081-14437 |
| | | | | | 15219-15333 |
| | | | | | 16106-16532 |
| | | | | | 16785-16930 |
| | | | | | 18772-20802 |
| | | | | | 21278-21497 |
| | | | | | 22261-22609 |
| | | | | | 24440-30515 |
| HOUCS91 | 138 | 526717 | AL360020 | 1208 | 1-111 |
| | | | | | 888-1314 |
| | | | | | 1567-1712 |
| | | | | | 3554-4100 |
| | | | | | 4126-5584 |
| HOUCS91 | 138 | 526717 | AC007924 | 1209 | 1-428 |
| HOUCS91 | 138 | 526717 | AC007924 | 1210 | 1-145 |
| HOUCS91 | 138 | 526717 | AL158152 | 1211 | 1-783 |
| HOUCS91 | 138 | 526717 | AL360020 | 1212 | 1-220 |
| HOUCS91 | 138 | 526717 | AC007924 | 1213 | 1-357 |
| HOUDJ40 | 140 | 573873 | AC021232 | 1214 | 1-201 |
| | | | | | 3229-3293 |
| | | | | | 5173-5304 |
| HOUDJ40 | 140 | 573873 | AC018519 | 1215 | 1-201 |
| | | | | | 3229-3293 |
| | | | | | 5173-5304 |
| HOUDJ40 | 140 | 573873 | AC021232 | 1216 | 1-270 |
| HOUDJ40 | 140 | 573873 | AC018519 | 1217 | 1-270 |
| HOUEN50 | 143 | 573874 | AC020702 | 1218 | 1-275 |
| HOUEN50 | 143 | 573874 | AC020702 | 1219 | 1-275 |
| HOUEN50 | 143 | 573874 | AC020702 | 1220 | 1-275 |
| HOUEN50 | 143 | 573874 | AC020702 | 1221 | 1-573 |
| HOUFT79 | 146 | 774089 | AP000824 | 1222 | 1-344 |
| HOUFT79 | 146 | 774089 | AP001890 | 1223 | 1-344 |
| HOUFT79 | 146 | 774089 | AP001093 | 1224 | 1-344 |
| HOUFT79 | 146 | 774089 | AP000824 | 1225 | 1-401 |
| | | | | | 650-1419 |
| | | | | | 1499-2694 |
| HOUFT79 | 146 | 774089 | AP001890 | 1226 | 1-401 |
| HOUFT79 | 146 | 774089 | AP001093 | 1227 | 1-401 |
| | | | | | 651-1420 |
| | | | | | 1500-2695 |
| HOUFV31 | 148 | 697592 | AL136525 | 1228 | 1-495 |
| HOUFV31 | 148 | 697592 | AL139183 | 1229 | 1-495 |
| HOUFV52 | 149 | 840297 | AC021838 | 1230 | 1-428 |
| HOUFV52 | 149 | 840297 | AL135919 | 1231 | 1-428 |
| HOUFV52 | 149 | 840297 | AL132660 | 1232 | 1-429 |
| HOUFV52 | 149 | 840297 | AC021838 | 1233 | 1-364 |
| HOUFV52 | 149 | 840297 | AL135919 | 1234 | 1-346 |
| HOUFV52 | 149 | 840297 | AL132660 | 1235 | 1-364 |
| HOUFW07 | 150 | 952632 | AL359513 | 1236 | 1-289 |
| HOUFZ64 | 151 | 750784 | AC025664 | 1237 | 1-476 |
| | | | | | 943-1069 |
| | | | | | 1934-2681 |
| HOUFZ64 | 151 | 750784 | AC068053 | 1238 | 1-228 |
| | | | | | 373-972 |
| | | | | | 1916-2391 |
| | | | | | 2858-2987 |
| | | | | | 3848-4595 |
| | | | | | 4651-4766 |
| | | | | | 6093-6229 |
| | | | | | 6352-6733 |
| | | | | | 6844-7014 |
| | | | | | 7076-8204 |
| | | | | | 8419-8497 |
| | | | | | 8936-10248 |
| HOUFZ64 | 151 | 750784 | AC025664 | 1239 | 1-116 |
| HOUFZ64 | 151 | 750784 | AC068053 | 1240 | 1-256 |
| HOUFZ64 | 151 | 750784 | AC025664 | 1241 | 1-600 |
| HOUGD02 | 152 | 915761 | AJ010597 | 1242 | 1-366 |
| HOUGD02 | 152 | 915761 | AL034449 | 1243 | 1-366 |
| HOUGD02 | 152 | 915761 | AJ010597 | 1244 | 1-436 |
| HOUGD02 | 152 | 915761 | AL034449 | 1245 | 1-436 |
| HOUHU87 | 154 | 791044 | AC003692 | 1246 | 1-44 |
| | | | | | 153-684 |
| | | | | | 695-1033 |
| | | | | | 2881-3167 |
| | | | | | 3597-8068 |
| | | | | | 8150-9192 |
| HOUHU87 | 154 | 791044 | AC003692 | 1247 | 1-342 |
| HOUHU87 | 154 | 791044 | AC003692 | 1248 | 1-467 |
| HSTAE16 | 155 | 827112 | AC019280 | 1249 | 1-566 |
| HSTAE16 | 155 | 827112 | AL355861 | 1250 | 1-566 |
| HSTAE16 | 155 | 827112 | AC019280 | 1251 | 1-372 |
| HSTAE16 | 155 | 827112 | AL355861 | 1252 | 1-372 |
| HSTAE32 | 156 | 508961 | AL365366 | 1253 | 1-1382 |
| HSTAE39 | 157 | 584942 | AC006510 | 1254 | 1-1199 |
| | | | | | 1345-2692 |
| HSTAE39 | 157 | 584942 | AC006514 | 1255 | 1-1201 |
| | | | | | 1347-2694 |
| HSTAE39 | 157 | 584942 | AC006510 | 1256 | 1-776 |
| HSTAE39 | 157 | 584942 | AC006514 | 1257 | 1-900 |
| HSTAL23 | 160 | 508812 | AC008064 | 1258 | 1-678 |
| HSTAL64 | 161 | 508813 | AC013347 | 1259 | 1-356 |
| HSTAL64 | 161 | 508813 | AL137164 | 1260 | 1-358 |
| HSTAL92 | 162 | 508820 | AL023694 | 1261 | 1-1790 |
| HSTAL92 | 162 | 508820 | AL023694 | 1262 | 1-373 |
| HSTAL92 | 162 | 508820 | AL023694 | 1263 | 1-544 |
| HSTAP31 | 165 | 508803 | AC022771 | 1264 | 1-291 |
| HSTAP31 | 165 | 508803 | AC027425 | 1265 | 1-291 |
| HSTAP31 | 165 | 508803 | AL139146 | 1266 | 1-291 |
| HSTAP31 | 165 | 508803 | AC022771 | 1267 | 1-312 |
| HSTAP31 | 165 | 508803 | AL139146 | 1268 | 1-308 |
| HSTAP89 | 166 | 508805 | AL133270 | 1269 | 1-324 |
| HSTAP89 | 166 | 508805 | AL138915 | 1270 | 1-324 |
| HSTAQ54 | 167 | 968671 | AC015743 | 1271 | 1-294 |
| HSTAQ54 | 167 | 968671 | AC016566 | 1272 | 1-294 |
| HSTAQ54 | 167 | 968671 | AC015517 | 1273 | 1-294 |
| HSTAQ54 | 167 | 968671 | AC016566 | 1274 | 1-446 |
| HSTAQ67 | 168 | 508800 | AC024491 | 1275 | 1-607 |
| HSTAQ67 | 168 | 508800 | AC024491 | 1276 | 1-387 |
| HSTAQ67 | 168 | 508800 | AC024491 | 1277 | 1-520 |
| HSTAZ54 | 171 | 508368 | AL133297 | 1278 | 1-57 |
| | | | | | 119-420 |
| | | | | | 1767-1968 |
| | | | | | 2799-2867 |
| HSTAZ54 | 171 | 508368 | AL133297 | 1279 | 1-337 |
| HSTBC04 | 172 | 506961 | AC021165 | 1280 | 1-66 |
| | | | | | 936-1030 |
| | | | | | 1947-2079 |
| | | | | | 5389-5510 |
| | | | | | 7713-7844 |
| | | | | | 8569-8649 |
| | | | | | 9562-9665 |
| | | | | | 10171-10285 |
| | | | | | 10683-10786 |
| | | | | | 12143-12273 |
| | | | | | 14833-14983 |
| | | | | | 15492-15683 |
| | | | | | 15817-17335 |
| HSTBC04 | 172 | 506961 | AC004602 | 1281 | 1-66 |
| | | | | | 936-1030 |
| | | | | | 1947-2079 |
| | | | | | 5393-5514 |
| | | | | | 7717-7848 |
| | | | | | 8574-8654 |
| | | | | | 9567-9670 |
| | | | | | 10177-10291 |
| | | | | | 10691-10794 |
| | | | | | 12151-12281 |
| | | | | | 14841-14991 |
| | | | | | 15500-15691 |
| | | | | | 15825-18581 |
| | | | | | 18741-18924 |
| | | | | | 18991-19882 |
| HSTBC04 | 172 | 506961 | AC021165 | 1282 | 1-645 |
| HSTBC04 | 172 | 506961 | AC004602 | 1283 | 1-645 |
| HWDAC04 | 174 | 927471 | AL354796 | 1284 | 1-114 |
| | | | | | 219-498 |
| HWDAC71 | 175 | 752776 | AC021781 | 1285 | 1-368 |
| HWDAC71 | 175 | 752776 | AC021781 | 1286 | 1-452 |
| HWDAC71 | 175 | 752776 | AC021781 | 1287 | 1-706 |
| HWDAN69 | 177 | 676671 | AL137860 | 1288 | 1-548 |
| HWDAO04 | 178 | 927231 | AL355993 | 1289 | 1-242 |
| | | | | | 786-953 |
| | | | | | 2197-2836 |
| | | | | | 2916-3064 |
| HWDAO04 | 178 | 927231 | AC025221 | 1290 | 1-242 |
| | | | | | 786-953 |
| | | | | | 2197-2836 |
| | | | | | 2916-3064 |
| HWDAO04 | 178 | 927231 | AC025221 | 1291 | 1-455 |
| HWDAO04 | 178 | 927231 | AL355993 | 1292 | 1-455 |
| HWDAO26 | 179 | 679520 | AP000127 | 1293 | 1-520 |
| HWDAO26 | 179 | 679520 | AP000205 | 1294 | 1-520 |
| HWDAO26 | 179 | 679520 | AP000244 | 1295 | 1-520 |
| HWDAO26 | 179 | 679520 | AP000244 | 1296 | 1-103 |
| HWDAP03 | 180 | 923319 | AC073186 | 1297 | 1-371 |
| | | | | | 632-1297 |
| | | | | | 2118-4485 |
| | | | | | 4579-6190 |
| | | | | | 6231-6623 |
| | | | | | 6773-13715 |
| HWDAP03 | 180 | 923319 | AL135795 | 1298 | 1-868 |
| | | | | | 878-1627 |
| | | | | | 1889-2555 |
| | | | | | 3376-5746 |
| | | | | | 5840-7452 |
| | | | | | 7493-7885 |
| | | | | | 8035-8397 |
| | | | | | 8504-12047 |
| HWDAP03 | 180 | 923319 | AC016767 | 1299 | 1-393 |
| HWDAP03 | 180 | 923319 | AC008993 | 1300 | 1-34 |
| | | | | | 175-1294 |
| | | | | | 1310-2063 |
| | | | | | 2325-2991 |
| | | | | | 3812-6181 |
| | | | | | 6275-7886 |
| | | | | | 7927-8319 |
| | | | | | 8469-10915 |
| HWDAP03 | 180 | 923319 | AL078621 | 1301 | 1-651 |
| | | | | | 767-1883 |
| | | | | | 1893-2639 |
| | | | | | 2901-3567 |
| | | | | | 4388-6757 |
| | | | | | 6851-8463 |
| | | | | | 8504-8896 |
| | | | | | 9046-9408 |
| | | | | | 9515-12004 |
| | | | | | 12178-15987 |
| HWDAP03 | 180 | 923319 | AC073186 | 1302 | 1-734 |
| | | | | | 765-1059 |
| | | | | | 1445-1795 |
| HWDAP03 | 180 | 923319 | AC016767 | 1303 | 1-1612 |
| HWDAP03 | 180 | 923319 | AC016767 | 1304 | 1-260 |
| HWDAP03 | 180 | 923319 | AC008993 | 1305 | 1-385 |
| HWDAP03 | 180 | 923319 | AL078621 | 1306 | 1-338 |
| | | | | | 446-569 |
| HWDAP03 | 180 | 923319 | AL078621 | 1307 | 1-731 |
| | | | | | 762-1059 |
| | | | | | 1445-1795 |
| HWDAS34 | 181 | 703610 | AC018804 | 1308 | 1-332 |
| | | | | | 649-947 |
| | | | | | 1762-2353 |
| | | | | | 2693-2944 |
| | | | | | 3138-3564 |
| | | | | | 3739-3923 |
| | | | | | 4007-4906 |
| | | | | | 4977-5052 |
| | | | | | 5122-5792 |
| HWDAS34 | 181 | 703610 | AC036207 | 1309 | 1-336 |
| | | | | | 655-945 |
| | | | | | 1762-2354 |
| | | | | | 2694-3566 |
| | | | | | 3740-3924 |
| | | | | | 4008-4908 |
| | | | | | 4979-5055 |
| | | | | | 5125-5186 |
| | | | | | 5374-5788 |
| HWDAS34 | 181 | 703610 | AC018804 | 1310 | 1-219 |
| HWHGB20 | 185 | 669455 | AF037222 | 1311 | 1-941 |
| | | | | | 1055-1957 |
| HWHGB20 | 185 | 669455 | AL049840 | 1312 | 1-1797 |
| HWHGB20 | 185 | 669455 | AF037222 | 1313 | 1-34 |
| | | | | | 504-637 |
| | | | | | 1210-2684 |
| | | | | | 3241-3528 |
| | | | | | 3799-4114 |
| | | | | | 4225-4439 |
| | | | | | 4754-4886 |
| | | | | | 5520-6004 |
| | | | | | 6811-6950 |
| | | | | | 8255-8470 |
| | | | | | 9691-10480 |
| | | | | | 10798-11383 |
| | | | | | 12144-12327 |
| | | | | | 12452-12657 |
| | | | | | 12889-13456 |
| | | | | | 13751-13876 |
| | | | | | 13921-14373 |
| | | | | | 14745-15119 |
| | | | | | 15895-16112 |
| | | | | | 16289-16338 |
| | | | | | 16453-17862 |
| HWHGB20 | 185 | 669455 | AF037222 | 1314 | 1-1736 |
| HWHGB20 | 185 | 669455 | AL049840 | 1315 | 1-34 |
| | | | | | 527-678 |
| | | | | | 1208-2682 |
| | | | | | 3785-4100 |
| | | | | | 4211-4425 |
| | | | | | 5506-5990 |
| | | | | | 6797-6936 |
| | | | | | 8241-8456 |
| | | | | | 9677-10466 |
| | | | | | 10784-11369 |
| | | | | | 12130-12313 |
| | | | | | 12438-12643 |
| | | | | | 12875-13442 |
| | | | | | 13740-13862 |
| | | | | | 13907-14359 |
| | | | | | 14731-15105 |
| | | | | | 15881-16098 |
| | | | | | 16275-16324 |
| | | | | | 16440-17849 |
| HWHGB20 | 185 | 669455 | AL049840 | 1316 | 1-718 |
| HWHGB21 | 186 | 954002 | AC020635 | 1317 | 1-472 |
| | | | | | 574-858 |
| | | | | | 1009-1118 |
| | | | | | 2488-2994 |
| | | | | | 3103-3191 |
| | | | | | 3623-3724 |
| | | | | | 3996-4803 |
| | | | | | 4881-5016 |
| | | | | | 5098-5221 |
| | | | | | 5440-5764 |
| | | | | | 5921-6005 |
| | | | | | 6123-6215 |
| | | | | | 6428-6604 |
| | | | | | 6729-6867 |
| | | | | | 7236-7399 |
| | | | | | 7633-7736 |
| | | | | | 7885-8051 |
| | | | | | 8134-8287 |
| | | | | | 8484-8645 |
| | | | | | 8801-8886 |
| | | | | | 9057-9575 |
| | | | | | 10165-10350 |
| | | | | | 10447-10609 |
| | | | | | 10860-11000 |
| | | | | | 11084-11461 |
| | | | | | 11539-11692 |
| | | | | | 11812-11974 |
| | | | | | 12126-12259 |
| | | | | | 12344-12481 |
| | | | | | 12987-13152 |
| | | | | | 13247-14268 |
| | | | | | 14349-14491 |
| | | | | | 14658-14791 |
| | | | | | 14907-15018 |
| | | | | | 15097-15238 |
| | | | | | 15334-15433 |
| | | | | | 15501-17838 |
| | | | | | 17978-18066 |
| | | | | | 18156-18340 |
| | | | | | 18387-18871 |
| HWHGB21 | 186 | 954002 | AC020635 | 1318 | 1-574 |
| HWHGW34 | 190 | 670622 | AC024920 | 1319 | 1-497 |
| | | | | | 2655-2879 |
| | | | | | 3993-4052 |
| HWHID04 | 192 | 926251 | AC055716 | 1320 | 1-1612 |
| HWHID04 | 192 | 926251 | AC068988 | 1321 | 1-1613 |
| HWHID04 | 192 | 926251 | AC024196 | 1322 | 1-1611 |
| HWHID04 | 192 | 926251 | AC068988 | 1323 | 1-413 |
| | | | | | 1736-2207 |
| | | | | | 3122-3175 |
| | | | | | 3904-4024 |
| | | | | | 4138-4364 |
| | | | | | 5345-5381 |
| HWHJA12 | 193 | 969044 | AC068584 | 1324 | 1-913 |
| HWHJA12 | 193 | 969044 | AC068584 | 1325 | 1-899 |
| | | | | | 1041-1100 |
| HWHPF38 | 194 | 709502 | AC005042 | 1326 | 1-164 |
| | | | | | 652-1054 |
| HWHPJ63 | 196 | 744720 | AL157402 | 1327 | 1-378 |
| HWHPJ63 | 196 | 744720 | AL157402 | 1328 | 1-580 |
| HWHPJ63 | 196 | 744720 | AL157402 | 1329 | 1-1049 |
| HWHPT41 | 197 | 658138 | AC009109 | 1330 | 1-46 |
| | | | | | 154-2952 |
| HWHPT41 | 197 | 658138 | AC010531 | 1331 | 1-303 |
| | | | | | 1003-1241 |
| | | | | | 2173-2763 |
| | | | | | 2907-3967 |
| | | | | | 4804-4849 |
| | | | | | 4950-7755 |
| HWHPT41 | 197 | 658138 | AC009109 | 1332 | 1-552 |
| HWHPT41 | 197 | 658138 | AC009109 | 1333 | 1-1592 |
| HWHPT41 | 197 | 658138 | AC010531 | 1334 | 1-1592 |
| HWHQI82 | 199 | 739230 | AC007059 | 1335 | 1-171 |
| | | | | | 1094-1598 |
| | | | | | 2676-2906 |
| | | | | | 3651-4202 |
| | | | | | 4409-4508 |
| | | | | | 5416-5943 |
| | | | | | 6152-6712 |
| | | | | | 6806-7297 |
| | | | | | 7622-7896 |
| | | | | | 7943-9770 |
| | | | | | 10756-11189 |
| HWHQI82 | 199 | 739230 | AC006128 | 1336 | 1-362 |
| | | | | | 1440-1670 |
| | | | | | 2415-2966 |
| | | | | | 3173-3272 |
| | | | | | 4180-4707 |
| | | | | | 4916-5476 |
| | | | | | 5570-6061 |
| | | | | | 6386-6660 |
| | | | | | 6707-8534 |
| | | | | | 9520-9953 |
| HWHQO33 | 201 | 670190 | AC015850 | 1337 | 1-361 |
| HWHQO33 | 201 | 670190 | AC015850 | 1338 | 1-361 |
| HWHQO33 | 201 | 670190 | AC007455 | 1339 | 1-519 |
| HWHQP22 | 202 | 674151 | AC023787 | 1340 | 1-51 |
| | | | | | 320-879 |
| HWHQP22 | 202 | 674151 | AC062017 | 1341 | 1-52 |
| | | | | | 317-877 |
| HWHQV08 | 203 | 958709 | AC068106 | 1342 | 1-437 |
| HWHQV08 | 203 | 958709 | AC015688 | 1343 | 1-98 |
| | | | | | 655-1204 |
| | | | | | 2301-2523 |
| | | | | | 3970-4450 |
| | | | | | 5253-6171 |
| | | | | | 6200-6274 |
| | | | | | 6701-7251 |
| | | | | | 7593-7649 |
| | | | | | 8285-8326 |
| | | | | | 8768-8858 |
| | | | | | 8922-9528 |
| | | | | | 9571-9817 |
| | | | | | 10565-11298 |
| HWHQV08 | 203 | 958709 | AC015688 | 1344 | 1-555 |
| HWHQV13 | 204 | 656647 | AC021848 | 1345 | 1-428 |
| HWHQV13 | 204 | 656647 | AC022150 | 1346 | 1-428 |
| HWHQV13 | 204 | 656647 | AC021848 | 1347 | 1-386 |
| HWHQV13 | 204 | 656647 | AC021848 | 1348 | 1-698 |
| HWHQV13 | 204 | 656647 | AC022150 | 1349 | 1-386 |
| HWHQV13 | 204 | 656647 | AC022150 | 1350 | 1-698 |
| HWHQV57 | 205 | 734455 | AC005005 | 1351 | 1-61 |
| | | | | | 344-465 |
| | | | | | 484-631 |
| | | | | | 1301-1430 |
| | | | | | 1539-1655 |
| | | | | | 2402-2574 |
| HWHQV57 | 205 | 734455 | AC005005 | 1352 | 1-312 |
| HWHQV57 | 205 | 734455 | AC005005 | 1353 | 1-432 |
| HWHQX34 | 206 | 703785 | AL358613 | 1354 | 1-402 |
| HWHQX34 | 206 | 703785 | AL157705 | 1355 | 1-402 |
| HWhQX34 | 206 | 703785 | AL358613 | 1356 | 1-607 |
| HWHQX34 | 206 | 703785 | AL157705 | 1357 | 1-518 |
| HWHQY36 | 210 | 708384 | AC012137 | 1358 | 1-547 |
| | | | | | 889-1313 |
| HWHQY36 | 210 | 708384 | AL357060 | 1359 | 1-546 |
| | | | | | 888-1312 |
| HWHQY36 | 210 | 708384 | AC012137 | 1360 | 1-713 |
| HWHQY36 | 210 | 708384 | AL357060 | 1361 | 1-922 |
| HWHQY36 | 210 | 708384 | AL357060 | 1362 | 1-96 |
| HWHRA44 | 211 | 716334 | AC023965 | 1363 | 1-1733 |
| HWHRA91 | 212 | 789529 | AC022760 | 1364 | 1-2781 |
| HWJAC71 | 214 | 760084 | AC009128 | 1365 | 1-346 |
| HWJAC71 | 214 | 760084 | AC010543 | 1366 | 1-346 |
| HWHQL42 | 220 | 805897 | AP000792 | 1367 | 1-143 |
| | | | | | 881-1273 |
| | | | | | 2141-2689 |
| | | | | | 2900-3727 |
| | | | | | 3735-7267 |
| | | | | | 7422-9382 |
| | | | | | 9408-9561 |
| | | | | | 9596-9947 |
| | | | | | 10039-10790 |
| | | | | | 11269-12611 |
| | | | | | 13546-13731 |
| | | | | | 15007-15134 |
| | | | | | 16089-16281 |
| HWHQL42 | 220 | 805897 | AP001273 | 1368 | 1-143 |
| | | | | | 881-1273 |
| | | | | | 2141-2689 |
| | | | | | 2900-3727 |
| | | | | | 3735-7270 |
| | | | | | 7425-9386 |
| | | | | | 9412-9565 |
| | | | | | 9600-9950 |
| | | | | | 10042-10793 |
| | | | | | 11272-12614 |
| | | | | | 13550-13735 |
| | | | | | 15011-15138 |
| | | | | | 16093-16285 |
| HWHQL42 | 220 | 805987 | AP001886 | 1369 | 1-143 |
| | | | | | 881-1273 |
| | | | | | 2141-2689 |
| | | | | | 2900-3727 |
| | | | | | 3735-7269 |
| | | | | | 7424-9385 |
| | | | | | 9411-9564 |
| | | | | | 9599-9950 |
| | | | | | 10042-10793 |
| | | | | | 11272-12614 |
| | | | | | 13550-13735 |
| | | | | | 15011-15138 |
| | | | | | 16093-16285 |
| HWHQL42 | 220 | 805897 | AP000792 | 1370 | 1-357 |
| HWHQL42 | 220 | 805897 | AP001273 | 1371 | 1-357 |
| HWHQL42 | 220 | 805897 | AP001886 | 1372 | 1-357 |
| HWHQJ31 | 222 | 697599 | AL137119 | 1373 | 1-1636 |
| HWHQJ31 | 222 | 697599 | AL138688 | 1374 | 1-1635 |
| HWHQJ31 | 222 | 697599 | AL137119 | 1375 | 1-444 |
| HWHQJ31 | 222 | 697599 | AL137119 | 1376 | 1-116 |
| | | | | | 360-698 |
| | | | | | 767-1137 |
| | | | | | 1616-1763 |
| | | | | | 3805-7359 |
| HWHQJ31 | 222 | 697599 | AL138688 | 1377 | 1-116 |
| | | | | | 360-698 |
| | | | | | 767-1137 |
| | | | | | 1616-1763 |
| | | | | | 3805-7359 |
| HWHQJ31 | 222 | 697599 | AL138688 | 1378 | 1-440 |
| HWHQI16 | 223 | 661553 | AC061711 | 1379 | 1-664 |
| HWHQI16 | 223 | 661553 | AC061711 | 1380 | 1-416 |
| HWHQH35 | 224 | 707826 | AC004918 | 1381 | 1-977 |
| HWHQH35 | 224 | 707826 | AC004918 | 1382 | 1-481 |
| HWHPR89 | 227 | 598535 | AC008615 | 1383 | 1-107 |
| | | | | | 4765-5005 |
| HWHPR89 | 227 | 598535 | AC011352 | 1384 | 1-107 |
| | | | | | 4766-5006 |
| | | | | | 9499-9554 |
| | | | | | 11463-11595 |
| | | | | | 13599-13832 |
| HWHPR89 | 227 | 598535 | AC011402 | 1385 | 1-107 |
| | | | | | 4765-5005 |
| | | | | | 9498-9553 |
| | | | | | 11462-11594 |
| | | | | | 13598-13831 |
| HWHPR89 | 227 | 598535 | AC011352 | 1386 | 1-232 |
| HWHPR89 | 227 | 598535 | AC0l1402 | 1387 | 1-232 |
| HWHPM27 | 229 | 682719 | AL133264 | 1388 | 1-299 |
| | | | | | 468-553 |
| | | | | | 602-879 |
| | | | | | 2276-2352 |
| | | | | | 4684-4986 |
| | | | | | 5716-6013 |
| | | | | | 6036-6264 |
| | | | | | 6521-6851 |
| | | | | | 7236-7950 |
| | | | | | 8879-9005 |
| | | | | | 9131-9231 |
| | | | | | 9505-9598 |
| | | | | | 10682-11147 |
| | | | | | 14638-14667 |
| HWHPL01 | 230 | 915610 | AC025904 | 1389 | 1-177 |
| HWHPL01 | 230 | 915610 | AC006070 | 1390 | 1-520 |
| | | | | | 5927-6332 |
| | | | | | 11409-11872 |
| HWHPL01 | 230 | 915610 | AC006070 | 1391 | 1-96 |
| HWHPK76 | 231 | 769791 | AL157687 | 1392 | 1-161 |
| HWHPK76 | 231 | 769791 | AL161668 | 1393 | 1-161 |
| HWHPK76 | 231 | 769791 | AL157687 | 1394 | 1-1435 |
| | | | | | 1750-1887 |
| | | | | | 2147-3617 |
| HWHPK76 | 231 | 769791 | AL157687 | 1395 | 1-1091 |
| | | | | | 1286-1759 |
| | | | | | 1775-2598 |
| HWHPK76 | 231 | 769791 | AL161668 | 1396 | 1-1435 |
| | | | | | 1750-1887 |
| | | | | | 2147-3617 |
| HWHPK76 | 231 | 769791 | AL161668 | 1397 | 1-1091 |
| | | | | | 1286-1759 |
| | | | | | 1775-2598 |
| HWHPJ26 | 233 | 681217 | AC011443 | 1398 | 1-397 |
| | | | | | 760-1428 |
| | | | | | 1476-2018 |
| | | | | | 2369-2732 |
| | | | | | 2851-3151 |
| | | | | | 3590-3634 |
| | | | | | 3766-3908 |
| | | | | | 4720-4786 |
| | | | | | 4989-5088 |
| | | | | | 6005-6052 |
| | | | | | 6139-6202 |
| HWHPJ26 | 233 | 681217 | AC011443 | 1399 | 1-257 |
| HWHPJ26 | 233 | 681217 | AC011443 | 1400 | 1-566 |
| HWHPD16 | 235 | 661660 | AC009562 | 1401 | 1-1196 |
| HWHPD16 | 235 | 661660 | AC009562 | 1402 | 1-294 |
| | | | | | 657-821 |
| | | | | | 1780-2618 |
| | | | | | 2731-2856 |
| | | | | | 2900-3154 |
| | | | | | 3340-3822 |
| | | | | | 4685-4860 |
| | | | | | 5840-6406 |
| | | | | | 7367-7511 |
| | | | | | 8726-8879 |
| HWHPC04 | 236 | 614960 | Z99716 | 1403 | 1-711 |
| | | | | | 1005-1232 |
| | | | | | 1385-1566 |
| | | | | | 2022-2225 |
| | | | | | 4314-4496 |
| | | | | | 4531-4954 |
| | | | | | 4975-5379 |
| | | | | | 5856-6259 |
| | | | | | 6363-6541 |
| | | | | | 7188-7994 |
| | | | | | 8459-9157 |
| | | | | | 10018-10854 |
| | | | | | 11242-11555 |
| | | | | | 11969-13378 |
| | | | | | 13504-13808 |
| | | | | | 13843-14093 |
| | | | | | 14147-14446 |
| | | | | | 15699-15952 |
| | | | | | 17846-17915 |
| | | | | | 18274-19383 |
| | | | | | 19978-20524 |
| | | | | | 21119-21351 |
| | | | | | 22117-22437 |
| | | | | | 22888-23143 |
| | | | | | 23536-24202 |
| | | | | | 24317-24629 |
| | | | | | 24696-25467 |
| | | | | | 25471-26113 |
| | | | | | 26419-26985 |
| | | | | | 28247-28367 |
| | | | | | 28689-28793 |
| | | | | | 29497-29584 |
| | | | | | 30482-30594 |
| | | | | | 31730-31830 |
| | | | | | 32070-32530 |
| | | | | | 32668-33557 |
| | | | | | 33761-34151 |
| | | | | | 36401-36895 |
| | | | | | 37654-38177 |
| | | | | | 38297-38410 |
| | | | | | 38627-40742 |
| HWHPC04 | 236 | 614960 | Z99716 | 1404 | 1-532 |
| HWHJM08 | 240 | 955683 | AC023904 | 1405 | 1-897 |
| | | | | | 960-1824 |
| HWHJM08 | 240 | 955683 | AC010159 | 1406 | 1-146 |
| | | | | | 438-694 |
| | | | | | 1120-1627 |
| | | | | | 1720-2157 |
| | | | | | 2271-2504 |
| | | | | | 2661-2928 |
| | | | | | 3224-3931 |
| | | | | | 4355-4629 |
| | | | | | 5397-5924 |
| | | | | | 7219-7575 |
| | | | | | 8185-8877 |
| | | | | | 10325-10499 |
| | | | | | 10781-11574 |
| | | | | | 11624-12334 |
| | | | | | 13140-13452 |
| | | | | | 16162-16451 |
| | | | | | 19092-19627 |
| | | | | | 19763-20170 |
| | | | | | 24354-24580 |
| | | | | | 26650-26832 |
| | | | | | 28213-28485 |
| | | | | | 29166-29383 |
| | | | | | 29490-29721 |
| | | | | | 32830-33084 |
| | | | | | 33167-35082 |
| | | | | | 35144-36040 |
| | | | | | 36103-36967 |
| HWHJM08 | 240 | 955683 | AC023904 | 1407 | 1-707 |
| HWHJM08 | 240 | 955683 | AC023904 | 1408 | 1-114 |
| HWHJM08 | 240 | 955683 | AC010159 | 1409 | 1-114 |
| HWHJJ11 | 241 | 965189 | AP000217 | 1410 | 1-457 |
| | | | | | 472-651 |
| | | | | | 655-2034 |
| | | | | | 2364-3257 |
| HWHJJ11 | 241 | 965189 | AP000339 | 1411 | 1-457 |
| | | | | | 472-651 |
| | | | | | 655-2034 |
| | | | | | 2364-2836 |
| | | | | | 2839-3257 |
| HWHJJ11 | 241 | 965189 | AP000217 | 1412 | 1-592 |
| | | | | | 810-1515 |
| | | | | | 1704-2219 |
| HWHJJ11 | 241 | 965189 | AP000217 | 1413 | 1-1258 |
| | | | | | 1273-1587 |
| | | | | | 1687-2025 |
| | | | | | 3308-3729 |
| | | | | | 3965-6317 |
| | | | | | 6328-6369 |
| | | | | | 6378-7852 |
| | | | | | 7855-9362 |
| | | | | | 9555-10282 |
| | | | | | 10964-11312 |
| | | | | | 11856-12428 |
| | | | | | 12514-13500 |
| | | | | | 14728-15273 |
| | | | | | 15350-15669 |
| | | | | | 16603-16786 |
| | | | | | 18421-19018 |
| | | | | | 19944-20464 |
| | | | | | 20523-20941 |
| | | | | | 21125-21732 |
| HWHJJ11 | 241 | 965189 | AP000339 | 1414 | 1-592 |
| | | | | | 810-1515 |
| | | | | | 1704-2219 |
| HWHJJ11 | 241 | 965189 | AP000339 | 1415 | 1-320 |
| | | | | | 1254-1437 |
| | | | | | 3072-3669 |
| | | | | | 4595-5115 |
| | | | | | 5174-5592 |
| | | | | | 5776-6383 |
| HWHHQ10 | 244 | 963959 | AC011448 | 1416 | 1-406 |
| | | | | | 7558-7707 |
| | | | | | 8256-8999 |
| | | | | | 9619-10069 |
| | | | | | 10534-11483 |
| | | | | | 12567-13076 |
| | | | | | 13206-13306 |
| | | | | | 14715-15081 |
| | | | | | 15383-16006 |
| | | | | | 17113-17421 |
| | | | | | 20025-20379 |
| | | | | | 20494-21037 |
| | | | | | 21820-22049 |
| | | | | | 25986-26138 |
| | | | | | 26738-27046 |
| | | | | | 30607-30829 |
| | | | | | 31608-32051 |
| | | | | | 32666-33121 |
| | | | | | 33412-33853 |
| | | | | | 33981-34267 |
| | | | | | 34795-34926 |
| | | | | | 36272-36867 |
| | | | | | 37528-38224 |
| | | | | | 38263-38433 |
| | | | | | 39877-40078 |
| | | | | | 40299-40555 |
| | | | | | 40657-40936 |
| | | | | | 43330-43632 |
| | | | | | 44090-44737 |
| | | | | | 46930-47485 |
| | | | | | 47555-51146 |
| | | | | | 53945-54090 |
| | | | | | 54624-55209 |
| | | | | | 55358-55711 |
| | | | | | 55751-57192 |
| | | | | | 57277-57864 |
| | | | | | 57977-58467 |
| | | | | | 58604-58920 |
| | | | | | 59772-59859 |
| | | | | | 59916-60034 |
| | | | | | 61018-61515 |
| | | | | | 61960-62306 |
| | | | | | 63123-63432 |
| | | | | | 63712-63837 |
| | | | | | 63999-64308 |
| | | | | | 66414-66594 |
| | | | | | 67713-67793 |
| | | | | | 68533-69307 |
| | | | | | 69537-69730 |
| HWHHQ10 | 244 | 963959 | AC011448 | 1417 | 1-544 |
| HWHHQ10 | 244 | 963959 | AC011448 | 1418 | 1-293 |
| HWHHO76 | 245 | 769848 | AL121891 | 1419 | 1-1304 |
| HWHHO76 | 245 | 769848 | AL121891 | 1420 | 1-253 |
| | | | | | 767-1042 |
| HWHHL02 | 246 | 919202 | AL359985 | 1421 | 1-665 |
| HWHHL02 | 246 | 919202 | AL353606 | 1422 | 1-716 |
| | | | | | 1578-2195 |
| HWHHL02 | 246 | 919202 | AL353606 | 1423 | 1-615 |
| HWHHL02 | 246 | 919202 | AL353606 | 1424 | 1-96 |
| | | | | | 728-1429 |
| | | | | | 1816-2257 |
| | | | | | 2533-3352 |
| | | | | | 5102-5217 |
| HWHGS51 | 251 | 725446 | AC011375 | 1425 | 1-632 |
| | | | | | 2100-2824 |
| | | | | | 4278-4725 |
| | | | | | 5076-5715 |
| | | | | | 5773-6278 |
| | | | | | 6408-7778 |
| | | | | | 7978-8348 |
| | | | | | 8451-8610 |
| | | | | | 8628-9119 |
| | | | | | 9529-11133 |
| | | | | | 11415-11792 |
| | | | | | 14621-14801 |
| | | | | | 15399-15550 |
| | | | | | 16187-16444 |
| | | | | | 16735-16839 |
| | | | | | 16862-17128 |
| | | | | | 17353-17915 |
| | | | | | 18030-19553 |
| HWHGP95 | 252 | 795148 | AC004841 | 1426 | 1-63 |
| | | | | | 717-242 |
| | | | | | 616-751 |
| | | | | | 2944-3081 |
| | | | | | 4689-4841 |
| | | | | | 6034-6303 |
| | | | | | 6376-6500 |
| | | | | | 7506-8405 |
| | | | | | 8495-8605 |
| | | | | | 9344-9612 |
| | | | | | 9691-10185 |
| | | | | | 10406-10821 |
| | | | | | 10846-11288 |
| | | | | | 11608-12343 |
| | | | | | 12382-12596 |
| | | | | | 13769-13845 |
| | | | | | 13858-14141 |
| | | | | | 14169-16181 |
| HWHGP95 | 252 | 795148 | AC004841 | 1427 | 1-561 |
| HWHGP95 | 252 | 795148 | AC004841 | 1428 | 1-356 |
| HWHGF95 | 253 | 947019 | AC011473 | 1429 | 1-32 |
| | | | | | 198-357 |
| | | | | | 2817-3083 |
| | | | | | 5699-5833 |
| | | | | | 6268-7032 |
| HWHGF95 | 253 | 947019 | AC011473 | 1430 | 1-60 |
| | | | | | 417-493 |
| | | | | | 871-1171 |
| | | | | | 1333-1598 |
| HWHGC93 | 255 | 915311 | AL035408 | 1431 | 1-760 |
| | | | | | 1034-1279 |
| | | | | | 1414-1846 |
| | | | | | 1867-2842 |
| | | | | | 2857-3730 |
| | | | | | 3851-4019 |
| HWFBH55 | 259 | 732549 | AC027478 | 1432 | 1-506 |
| HWFBH55 | 259 | 732549 | AC018946 | 1433 | 1-506 |
| HWFBH55 | 259 | 732549 | AC006411 | 1434 | 1-506 |
| HWFBH55 | 259 | 732549 | AC027478 | 1435 | 1-394 |
| HWFBH55 | 259 | 732549 | AC018946 | 1436 | 1-394 |
| HWFBH55 | 259 | 732549 | AC006411 | 1437 | 1-394 |
| HWFBD96 | 261 | 796070 | AL139040 | 1438 | 1-514 |
| HWFBD96 | 261 | 796070 | AC020768 | 1439 | 1-513 |
| HWFBD96 | 261 | 796070 | AL139040 | 1440 | 1-279 |
| HWFBD96 | 261 | 796070 | AC020768 | 1441 | 1-279 |
| HWFBD96 | 261 | 796070 | AL139040 | 1442 | 1-147 |
| HWFBD96 | 261 | 796070 | AC020768 | 1443 | 1-147 |
| HWFAD94 | 263 | 504477 | AL357046 | 1444 | 1-544 |
| HWFAD94 | 263 | 504477 | AC009282 | 1445 | 1-544 |
| HWFAD94 | 263 | 504477 | AL355305 | 1446 | 1-544 |
| HWFAD94 | 263 | 504477 | AC009282 | 1447 | 1-439 |
| HWFAD94 | 263 | 504477 | AL355305 | 1448 | 1-439 |
| HWFAD84 | 264 | 504489 | AP000049 | 1449 | 1-642 |
| HWFAD84 | 264 | 504489 | AP000311 | 1450 | 1-642 |
| HWFAD84 | 264 | 504489 | AP000116 | 1451 | 1-642 |
| HWFAD84 | 264 | 504489 | AP000192 | 1452 | 1-642 |
| HWFAD84 | 264 | 504489 | AP000049 | 1453 | 1-290 |
| HWFAD84 | 264 | 504489 | AP000311 | 1454 | 1-290 |
| HWFAD84 | 264 | 504489 | AP000116 | 1455 | 1-291 |
| HWFAD84 | 264 | 504489 | AP000192 | 1456 | 1-291 |
| HWFAD65 | 265 | 753943 | AC009796 | 1457 | 1-142 |
| | | | | | 639-760 |
| | | | | | 812-2891 |
| | | | | | 3551-4502 |
| | | | | | 5567-5744 |
| HWFAD65 | 265 | 753943 | AC009796 | 1458 | 1-1228 |
| HWFAD65 | 265 | 753943 | AC009796 | 1459 | 1-222 |
| HWEAE94 | 266 | 794026 | AC027687 | 1460 | 1-880 |
| | | | | | 962-1477 |
| | | | | | 1779-2191 |
| | | | | | 2581-2734 |
| | | | | | 3753-4488 |
| | | | | | 4704-4761 |
| HWEAE94 | 266 | 794026 | AC027687 | 1461 | 1-232 |
| HWEAE94 | 266 | 794026 | AC027687 | 1462 | 1-306 |
| HWDAP89 | 270 | 795713 | AL161621 | 1463 | 1-350 |
| | | | | | 1352-1442 |
| | | | | | 2544-3587 |
| HWDAP89 | 270 | 795713 | AL138742 | 1464 | 1-350 |
| | | | | | 1352-1442 |
| | | | | | 2544-3587 |
| HWDAP89 | 270 | 795713 | AL161621 | 1465 | 1-367 |
| HWDAP89 | 270 | 795713 | AL138742 | 1466 | 1-453 |
| HWDAP89 | 270 | 795713 | AL138742 | 1467 | 1-367 |
| HWDAO90 | 271 | 788546 | AL136447 | 1468 | 1-431 |
| | | | | | 1631-2048 |
| HWDAD72 | 275 | 766077 | AL353718 | 1469 | 1-873 |
| HWDAD72 | 275 | 766077 | AL353718 | 1470 | 1-489 |
| HWDAD72 | 275 | 766077 | AL353718 | 1471 | 1-375 |
| HWDAD54 | 276 | 729262 | AC072024 | 1472 | 1-437 |
| | | | | | 1011-1257 |
| HWDAD54 | 276 | 729262 | AL355542 | 1473 | 1-437 |
| | | | | | 1010-1256 |
| HWDAD54 | 276 | 729262 | AL161651 | 1474 | 1-437 |
| | | | | | 1010-1256 |
| HWDAD54 | 276 | 729262 | AL355542 | 1475 | 1-309 |
| HWDAD54 | 276 | 729262 | AL161651 | 1476 | 1-309 |
| HWDAD40 | 277 | 881233 | AC053512 | 1477 | 1-899 |
| | | | | | 1134-2292 |
| | | | | | 2375-2496 |
| | | | | | 2961-3357 |
| HWDAD40 | 277 | 881233 | AL360086 | 1478 | 1-901 |
| | | | | | 1136-2294 |
| | | | | | 2377-2498 |
| | | | | | 2954-3361 |
| | | | | | 3391-3760 |
| | | | | | 3839-3908 |
| HWDAD40 | 277 | 881233 | AC053512 | 1479 | 1-422 |
| HWDAD40 | 277 | 881233 | AL360086 | 1480 | 1-427 |
| HSTAG60 | 281 | 578487 | AC003025 | 1481 | 1-1066 |
| | | | | | 2020-2086 |
| | | | | | 2111-2427 |
| | | | | | 5147-5246 |
| | | | | | 7251-7365 |
| | | | | | 7459-7584 |
| | | | | | 9167-9390 |
| | | | | | 10099-10128 |
| HSTAG60 | 281 | 578487 | AF139813 | 1482 | 1-1066 |
| | | | | | 2020-2086 |
| | | | | | 2111-2427 |
| | | | | | 5147-5246 |
| | | | | | 7251-7365 |
| | | | | | 7459-7584 |
| | | | | | 9168-9391 |
| | | | | | 10100-10129 |
| HSTAG60 | 281 | 578487 | AC004228 | 1483 | 1-1066 |
| | | | | | 2020-2086 |
| | | | | | 2111-2427 |
| | | | | | 5147-5246 |
| | | | | | 7251-7365 |
| | | | | | 7459-7584 |
| | | | | | 9168-9391 |
| | | | | | 10100-10129 |
| HSTAG60 | 281 | 578487 | AC003025 | 1484 | 1-241 |
| HSTAG60 | 281 | 578487 | AF139813 | 1485 | 1-241 |
| HSTAG60 | 281 | 578487 | AC004228 | 1486 | 1-241 |
| HOUIF71 | 282 | 759929 | AC019168 | 1487 | 1-335 |
| | | | | | 424-1746 |
| | | | | | 1926-2489 |
| | | | | | 4147-4467 |
| | | | | | 4810-5105 |
| | | | | | 5577-5815 |
| HOUIF71 | 282 | 759929 | AC019168 | 1488 | 1-477 |
| HOUGC71 | 283 | 760110 | AC011383 | 1489 | 1-264 |
| | | | | | 2993-3166 |
| | | | | | 4456-4618 |
| | | | | | 5199-6186 |
| | | | | | 6502-7180 |
| | | | | | 7991-9050 |
| | | | | | 9338-12989 |
| HOUGC71 | 283 | 760110 | AC008472 | 1490 | 1-988 |
| HOUGC71 | 283 | 760110 | AC008472 | 1491 | 1-264 |
| | | | | | 2993-3169 |
| | | | | | 4456-4618 |
| HOUFM67 | 285 | 751325 | AP001887 | 1492 | 1-365 |
| HOUFM67 | 285 | 751325 | AP002008 | 1493 | 1-365 |
| HOUFM67 | 285 | 751325 | AP001887 | 1494 | 1-321 |
| HOUFM67 | 285 | 751325 | AP002008 | 1495 | 1-73 |
| | | | | | 5471-5630 |
| | | | | | 7897-8256 |
| | | | | | 10415-10446 |
| | | | | | 11060-11145 |
| | | | | | 13394-13497 |
| | | | | | 15948-16825 |
| HOUFM67 | 285 | 751325 | AP002008 | 1496 | 1-321 |
| HOUFM50 | 286 | 724038 | AC068243 | 1497 | 1-408 |
| HOUFM50 | 286 | 724038 | AC068243 | 1498 | 1-115 |
| HOUFM32 | 287 | 698816 | AL138733 | 1499 | 1-344 |
| HOUFM32 | 287 | 698816 | AL138733 | 1500 | 1-1017 |
| HOUFD93 | 288 | 791584 | AL157899 | 1501 | 1-925 |
| | | | | | 1165-1828 |
| | | | | | 1861-2310 |
| | | | | | 2618-2764 |
| | | | | | 3739-4041 |
| | | | | | 5200-5390 |
| | | | | | 5977-6333 |
| | | | | | 7633-7966 |
| | | | | | 8233-9661 |
| | | | | | 9706-10033 |
| | | | | | 10135-11069 |
| | | | | | 11283-11607 |
| HOUFD93 | 288 | 791584 | AL137800 | 1502 | 1-514 |
| | | | | | 1036-1951 |
| | | | | | 2200-2863 |
| | | | | | 2896-3345 |
| | | | | | 3653-3799 |
| | | | | | 4779-5081 |
| | | | | | 6240-6430 |
| | | | | | 7017-7373 |
| | | | | | 8673-9004 |
| | | | | | 9273-10701 |
| | | | | | 10746-11073 |
| | | | | | 11175-12109 |
| | | | | | 12347-12650 |
| HOUFD93 | 288 | 791584 | AL157899 | 1503 | 1-528 |
| HOUFD93 | 288 | 791584 | AL137800 | 1504 | 1-528 |
| HOUFD09 | 289 | 625245 | AC023660 | 1505 | 1-540 |
| HOUES18 | 292 | 577112 | AP001991 | 1506 | 1-1184 |
| HOUES18 | 292 | 577112 | AP001851 | 1507 | 1-1184 |
| HOUES18 | 292 | 577112 | AC011331 | 1508 | 1-1184 |
| HOUES18 | 292 | 577112 | AP001991 | 1509 | 1-1738 |
| HOUES18 | 292 | 577112 | AP001851 | 1510 | 1-1738 |
| HOUES18 | 292 | 577112 | AP001851 | 1511 | 1-304 |
| HOUES18 | 292 | 577112 | AC011331 | 1512 | 1-32 |
| | | | | | 1698-1928 |
| | | | | | 3446-3568 |
| | | | | | 18941-19018 |
| | | | | | 19140-19426 |
| | | | | | 21225-21286 |
| | | | | | 21795-21895 |
| | | | | | 21919-22045 |
| | | | | | 23139-23195 |
| | | | | | 23669-24126 |
| | | | | | 24562-25441 |
| | | | | | 26343-26443 |
| | | | | | 27185-27258 |
| | | | | | 31865-34137 |
| HOUES18 | 292 | 577112 | AC011331 | 1513 | 1-1738 |
| HOUEK01 | 295 | 965449 | AC007783 | 1514 | 1-1347 |
| | | | | | 2127-2685 |
| | | | | | 3301-3805 |
| | | | | | 3882-4543 |
| | | | | | 6035-6343 |
| | | | | | 6514-7415 |
| | | | | | 8405-9003 |
| | | | | | 9721-11059 |
| | | | | | 11109-11337 |
| | | | | | 11402-11552 |
| | | | | | 12383-12848 |
| | | | | | 13026-13679 |
| | | | | | 13930-13990 |
| | | | | | 15075-15567 |
| | | | | | 18165-18479 |
| | | | | | 18500-18622 |
| | | | | | 19327-19666 |
| | | | | | 21097-21198 |
| | | | | | 22706-23378 |
| HOUEK01 | 295 | 965449 | AC007783 | 1515 | 1-1312 |
| HOUEK01 | 295 | 965449 | AC007783 | 1516 | 1-294 |
| HOUEH51 | 296 | 725820 | AL354941 | 1517 | 1-1152 |
| HOUEH51 | 296 | 725820 | AL133549 | 1518 | 1-1655 |
| HOUEH51 | 296 | 725820 | AL354941 | 1519 | 1-43 |
| | | | | | 3610-3879 |
| HOUEH51 | 296 | 725820 | AL133549 | 1520 | 1-2622 |
| HOUEH51 | 296 | 725820 | AL133549 | 1521 | 1-43 |
| | | | | | 3608-3877 |
| HOUEG85 | 297 | 883933 | AL355315 | 1522 | 1-1876 |
| | | | | | 3078-4041 |
| HOUCZ30 | 300 | 573930 | AC021145 | 1523 | 1-301 |
| HOUCR25 | 301 | 559993 | AC019205 | 1524 | 1-488 |
| HOUCR25 | 301 | 559993 | AL133336 | 1525 | 1-488 |
| HOUCR25 | 301 | 559993 | AC019205 | 1526 | 1-198 |
| HOUCR25 | 301 | 559993 | AC019205 | 1527 | 1-164 |
| HOUCR25 | 301 | 559993 | AL133336 | 1528 | 1-164 |
| HOUBO69 | 302 | 757808 | AC040900 | 1529 | 1-1680 |
| | | | | | 1697-2550 |
| HOUBO69 | 302 | 757808 | AL035702 | 1530 | 1-1829 |
| | | | | | 1846-2699 |
| | | | | | 3477-4360 |
| | | | | | 5282-5332 |
| HOUBO69 | 302 | 757808 | AL035702 | 1531 | 1-407 |
| HOUBO69 | 302 | 757808 | AL035702 | 1532 | 1-696 |
| HOUBB11 | 304 | 965041 | AC012279 | 1533 | 1-127 |
| | | | | | 252-306 |
| | | | | | 477-566 |
| | | | | | 1720-4847 |
| HOUBB11 | 304 | 965041 | AC012279 | 1534 | 1-130 |
| HOUAV68 | 305 | 753628 | AL157773 | 1535 | 1-56 |
| | | | | | 341-715 |
| | | | | | 3170-3449 |
| | | | | | 7858-7928 |
| HOUAF65 | 306 | 526540 | AC021369 | 1536 | 1-303 |
| HOUAF65 | 306 | 526540 | AC021369 | 1537 | 1-306 |
| HLSAC73 | 307 | 761684 | AC016583 | 1538 | 1-260 |
| HLSAC73 | 307 | 761684 | AC008879 | 1539 | 1-260 |
| HLSAC73 | 307 | 761684 | AC022428 | 1540 | 1-260 |
| HLSAC73 | 307 | 761684 | AC016583 | 1541 | 1-258 |
| HLSAC73 | 307 | 761684 | AC008879 | 1542 | 1-258 |
| HLSAC73 | 307 | 761684 | AC022428 | 1543 | 1-258 |
| HLSAB43 | 309 | 715242 | AC005052 | 1544 | 1-178 |
| | | | | | 350-566 |
| | | | | | 1893-2319 |
| | | | | | 3391-3498 |
| | | | | | 4290-4811 |
| | | | | | 6162-6544 |
| HLSAB43 | 309 | 715242 | AC005052 | 1545 | 1-383 |
| HLSAB31 | 310 | 422131 | AC026422 | 1546 | 1-499 |
| HLSAB31 | 310 | 422131 | AC026422 | 1547 | 1-361 |
| HLSAB31 | 310 | 422131 | AC026422 | 1548 | 1-801 |
| HKAOQ73 | 312 | 761763 | AC022262 | 1549 | 1-143 |
| | | | | | 215-335 |
| | | | | | 1003-1146 |
| | | | | | 1619-1965 |
| | | | | | 2424-2549 |
| | | | | | 3449-4071 |
| | | | | | 5059-5311 |
| | | | | | 5318-5450 |
| | | | | | 5961-6262 |
| | | | | | 10923-11048 |
| | | | | | 12108-12239 |
| | | | | | 13371-13538 |
| | | | | | 15106-15705 |
| | | | | | 16873-17589 |
| | | | | | 18189-18475 |
| | | | | | 20900-21553 |
| | | | | | 21858-22109 |
| | | | | | 23429-23966 |
| | | | | | 24640-25012 |
| | | | | | 33162-33490 |
| | | | | | 33492-33580 |
| | | | | | 35357-35573 |
| | | | | | 36723-36937 |
| | | | | | 38557-39353 |
| HKAOQ73 | 312 | 761763 | AL020995 | 1550 | 1-143 |
| | | | | | 215-335 |
| | | | | | 1004-1147 |
| | | | | | 1620-1966 |
| | | | | | 2425-2550 |
| | | | | | 3450-4072 |
| | | | | | 5060-5312 |
| | | | | | 5319-5451 |
| | | | | | 5962-6263 |
| | | | | | 10925-11050 |
| | | | | | 12110-12241 |
| | | | | | 13373-13540 |
| | | | | | 15108-15707 |
| | | | | | 16875-17591 |
| | | | | | 18191-18477 |
| | | | | | 20901-21554 |
| | | | | | 21859-22110 |
| | | | | | 23430-23967 |
| | | | | | 24641-25013 |
| | | | | | 33168-33480 |
| | | | | | 33497-33585 |
| | | | | | 35361-35577 |
| | | | | | 36727-36942 |
| | | | | | 38562-39358 |
| HKAOQ73 | 312 | 761763 | AC022262 | 1551 | 1-124 |
| HKAOQ73 | 312 | 761763 | AC022262 | 1552 | 1-756 |
| HKAOQ73 | 312 | 761763 | AL020995 | 1553 | 1-124 |
| HKAOQ73 | 312 | 761763 | AL020995 | 1554 | 1-756 |
| HKAOO90 | 313 | 934020 | AC015462 | 1555 | 1-126 |
| | | | | | 1320-1410 |
| | | | | | 3279-3366 |
| | | | | | 4146-4318 |
| | | | | | 6920-6967 |
| | | | | | 8092-8456 |
| | | | | | 8516-8624 |
| | | | | | 9485-9758 |
| | | | | | 10290-10578 |
| | | | | | 10919-11267 |
| | | | | | 12484-12623 |
| | | | | | 12854-13196 |
| | | | | | 13721-13958 |
| | | | | | 16354-16429 |
| | | | | | 16437-16467 |
| | | | | | 17636-18265 |
| | | | | | 21147-21284 |
| | | | | | 21508-21774 |
| | | | | | 22855-23913 |
| | | | | | 24355-24456 |
| | | | | | 25665-27332 |
| HKAOO90 | 313 | 934020 | AC015462 | 1556 | 1-414 |
| HKAOF21 | 314 | 857310 | AC005067 | 1557 | 1-514 |
| | | | | | 987-1290 |
| HKAOF21 | 314 | 857310 | AC005067 | 1558 | 1-247 |
| | | | | | 1137-2115 |
| | | | | | 2352-2475 |
| | | | | | 2814-3324 |
| | | | | | 4370-4835 |
| | | | | | 5662-6107 |
| | | | | | 6638-6785 |
| | | | | | 6863-6977 |
| | | | | | 7519-7815 |
| | | | | | 8312-8466 |
| | | | | | 8934-9914 |
| HKAKY03 | 315 | 923047 | AC005540 | 1559 | 1-1054 |
| | | | | | 1410-1531 |
| | | | | | 2097-2689 |
| | | | | | 3022-3352 |
| | | | | | 3710-4061 |
| | | | | | 4444-4700 |
| | | | | | 5755-6051 |
| | | | | | 6368-6501 |
| | | | | | 6681-7448 |
| | | | | | 7755-7833 |
| | | | | | 10808-11474 |
| HKAKY03 | 315 | 923047 | AC005540 | 1560 | 1-113 |
| HKAKY03 | 315 | 923047 | AC005540 | 1561 | 1-173 |
| HKAKF79 | 316 | 909810 | AC020658 | 1562 | 1-248 |
| | | | | | 386-522 |
| | | | | | 869-996 |
| | | | | | 1055-1200 |
| | | | | | 1662-1799 |
| | | | | | 2800-2962 |
| | | | | | 3447-4308 |
| | | | | | 4316-5011 |
| HKAKF79 | 316 | 909810 | AC020658 | 1563 | 1-1052 |
| HKAKF79 | 316 | 909810 | AC020658 | 1564 | 1-427 |
| HKAIK82 | 317 | 779306 | AC010743 | 1565 | 1-179 |
| | | | | | 833-1314 |
| | | | | | 1391-1653 |
| | | | | | 1933-3818 |
| HKAIK82 | 317 | 779306 | AL121657 | 1566 | 1-179 |
| | | | | | 833-1005 |
| | | | | | 1073-1335 |
| | | | | | 1615-3500 |
| HKAHP85 | 318 | 783955 | AP001628 | 1567 | 1-1405 |
| | | | | | 1777-3070 |
| | | | | | 3270-4317 |
| | | | | | 4333-5347 |
| HKAHP85 | 318 | 783955 | AP001628 | 1568 | 1-161 |
| HKAHE93 | 320 | 791860 | AL139328 | 1569 | 1-515 |
| | | | | | 1506-1971 |
| HKAHE93 | 320 | 791860 | AC018379 | 1570 | 1-515 |
| | | | | | 1506-1971 |
| HKAHE93 | 320 | 791860 | AL136527 | 1571 | 1-515 |
| | | | | | 1506-1971 |
| HKAHE93 | 320 | 791860 | AL139328 | 1572 | 1-413 |
| HKAHE93 | 320 | 791860 | AC018379 | 1573 | 1-631 |
| | | | | | 637-1252 |
| HKAHE93 | 320 | 791860 | AL139328 | 1574 | 1-631 |
| | | | | | 637-1252 |
| HKAHE93 | 320 | 791860 | AC136527 | 1575 | 1-631 |
| | | | | | 637-1252 |
| HKAHE93 | 320 | 791860 | AL136527 | 1576 | 1-413 |
| HKAHA10 | 321 | 857339 | AL158217 | 1577 | 1-59 |
| | | | | | 151-289 |
| | | | | | 435-557 |
| | | | | | 1117-1252 |
| | | | | | 1346-1460 |
| | | | | | 1554-1629 |
| | | | | | 1647-1753 |
| | | | | | 2209-2982 |
| | | | | | 3117-5356 |
| | | | | | 5572-5707 |
| | | | | | 6075-6245 |
| | | | | | 6339-6940 |
| | | | | | 7042-7070 |
| | | | | | 7152-7348 |
| | | | | | 7498-8167 |
| | | | | | 8313-8574 |
| | | | | | 8620-8803 |
| | | | | | 9032-9647 |
| | | | | | 9815-10797 |
| HKAHA10 | 321 | 857339 | AL158217 | 1578 | 1-105 |
| HKAGC23 | 322 | 912677 | AL158167 | 1579 | 1-133 |
| | | | | | 1297-1410 |
| | | | | | 3430-3888 |
| | | | | | 5807-5860 |
| | | | | | 6668-6762 |
| | | | | | 8151-8717 |
| | | | | | 10593-10879 |
| | | | | | 10939-12822 |
| HKAGC23 | 322 | 912677 | AL158167 | 1580 | 1-1021 |
| HKAFR01 | 323 | 916400 | AC006513 | 1581 | 1-93 |
| | | | | | 521-2677 |
| | | | | | 2696-3818 |
| | | | | | 3839-5291 |
| | | | | | 5314-7398 |
| | | | | | 9261-9717 |
| HKAFQ61 | 324 | 741786 | AC026565 | 1582 | 1-1338 |
| | | | | | 2075-2718 |
| HKAFQ61 | 324 | 741786 | AL355800 | 1583 | 1-1517 |
| | | | | | 1630-2721 |
| HKAFQ61 | 324 | 741786 | AL356581 | 1584 | 1-1517 |
| | | | | | 1630-2722 |
| HKAFQ61 | 324 | 741786 | AC015618 | 1585 | 1-1338 |
| HKAFQ61 | 324 | 741786 | AL137798 | 1586 | 1-1517 |
| | | | | | 1630-2718 |
| HKAFQ61 | 324 | 741786 | AC026565 | 1587 | 1-413 |
| HKAFQ61 | 324 | 741786 | AL355800 | 1588 | 1-2220 |
| HKAFQ61 | 324 | 741786 | AL356581 | 1589 | 1-2219 |
| HKAFQ61 | 324 | 741786 | AC015618 | 1590 | 1-436 |
| HKAFQ61 | 324 | 741786 | AC026565 | 1591 | 1-664 |
| | | | | | 689-1478 |
| HKAFQ61 | 324 | 741786 | AL355800 | 1592 | 1-436 |
| HKAFQ61 | 324 | 741786 | AL356581 | 1593 | 1-436 |
| HKAFQ61 | 324 | 741786 | AL137798 | 1594 | 1-436 |
| HKAFQ61 | 324 | 741786 | AL137798 | 1595 | 1-2215 |
| HKAFN96 | 325 | 796361 | AC019122 | 1596 | 1-759 |
| | | | | | 1127-1655 |
| | | | | | 2355-2482 |
| | | | | | 2508-3123 |
| | | | | | 3291-4096 |
| | | | | | 4161-4783 |
| | | | | | 4840-5313 |
| | | | | | 6280-6793 |
| | | | | | 6929-10681 |
| | | | | | 11103-11175 |
| | | | | | 11328-11795 |
| | | | | | 11970-12223 |
| | | | | | 12639-13247 |
| | | | | | 13834-14438 |
| | | | | | 15038-15865 |
| | | | | | 16068-16173 |
| | | | | | 16243-16346 |
| | | | | | 16660-16897 |
| | | | | | 17192-17395 |
| | | | | | 17493-17761 |
| HKAFN96 | 325 | 796361 | AC019122 | 1597 | 1-579 |
| HKAFD03 | 326 | 924048 | AL139044 | 1598 | 1-561 |
| HKAFD03 | 326 | 924048 | AL139044 | 1599 | 1-386 |
| HKAFD03 | 326 | 924048 | AL139044 | 1600 | 1-541 |
| HKADR84 | 329 | 800106 | AC020931 | 1601 | 1-316 |
| | | | | | 795-921 |
| | | | | | 1120-1169 |
| | | | | | 1309-1676 |
| | | | | | 1983-2149 |
| | | | | | 2167-2419 |
| | | | | | 3185-3564 |
| | | | | | 3694-3917 |
| | | | | | 4926-5498 |
| | | | | | 5869-7117 |
| | | | | | 7213-7816 |
| | | | | | 8019-8311 |
| | | | | | 8627-8807 |
| | | | | | 9723-9815 |
| HKADR84 | 329 | 800106 | AC020931 | 1602 | 1-283 |
| HKADR84 | 329 | 800106 | AC020931 | 1603 | 1-278 |
| HKADP11 | 331 | 966941 | AC009237 | 1604 | 1-1011 |
| HKADP11 | 331 | 966941 | AC009237 | 1605 | 1-1290 |
| HKADO84 | 332 | 911567 | AC018629 | 1606 | 1-242 |
| | | | | | 385-790 |
| | | | | | 2310-2401 |
| | | | | | 2501-3008 |
| | | | | | 3339-3695 |
| | | | | | 3786-4024 |
| | | | | | 4881-5051 |
| | | | | | 6076-6146 |
| | | | | | 6393-6418 |
| | | | | | 6433-6786 |
| | | | | | 6987-8894 |
| HKADO84 | 332 | 911567 | AC018629 | 1607 | 1-452 |
| HKADO84 | 332 | 911567 | AC018629 | 1608 | 1-322 |
| HKACX62 | 335 | 744273 | AP001458 | 1609 | 1-402 |
| | | | | | 480-724 |
| HKACX62 | 335 | 744273 | AP001458 | 1610 | 1-69 |
| | | | | | 221-345 |
| | | | | | 567-731 |
| HKACP26 | 338 | 422255 | AL159140 | 1611 | 1-408 |
| | | | | | 2943-3419 |
| | | | | | 6843-7282 |
| | | | | | 12990-13069 |
| | | | | | 13167-13425 |
| | | | | | 14313-14397 |
| | | | | | 14538-14793 |
| | | | | | 15598-16035 |
| | | | | | 16430-16776 |
| | | | | | 17738-17764 |
| | | | | | 17821-18101 |
| | | | | | 18121-18873 |
| | | | | | 18931-19273 |
| | | | | | 19473-19719 |
| | | | | | 19830-20706 |
| | | | | | 21088-21299 |
| | | | | | 21565-22341 |
| | | | | | 22565-23073 |
| | | | | | 23832-24220 |
| | | | | | 26903-27241 |
| | | | | | 27865-28033 |
| | | | | | 28981-32035 |
| HKACP26 | 338 | 422255 | AL133502 | 1612 | 1-408 |
| | | | | | 2943-3419 |
| | | | | | 6843-7283 |
| | | | | | 12995-13074 |
| | | | | | 13172-13430 |
| | | | | | 14318-14403 |
| | | | | | 15603-16040 |
| | | | | | 16435-16781 |
| | | | | | 17743-17769 |
| | | | | | 17826-18106 |
| | | | | | 18126-18879 |
| | | | | | 18937-19279 |
| | | | | | 19479-19725 |
| | | | | | 19836-20712 |
| | | | | | 21094-21305 |
| | | | | | 21571-22347 |
| | | | | | 22571-23079 |
| | | | | | 23838-24226 |
| | | | | | 26908-27246 |
| | | | | | 27870-28038 |
| | | | | | 28986-30569 |
| | | | | | 30583-31834 |
| HKACP26 | 338 | 422255 | AC024945 | 1613 | 1-428 |
| | | | | | 823-1169 |
| | | | | | 2131-2157 |
| | | | | | 2214-2494 |
| | | | | | 2514-3267 |
| | | | | | 3325-3667 |
| | | | | | 3867-4113 |
| | | | | | 4224-5100 |
| | | | | | 5482-5693 |
| | | | | | 5959-6735 |
| | | | | | 6959-7467 |
| | | | | | 8226-8614 |
| | | | | | 11297-11635 |
| | | | | | 12259-12427 |
| | | | | | 13375-14958 |
| | | | | | 14972-16428 |
| HKACP26 | 338 | 422255 | AC024945 | 1614 | 1-1232 |
| HKACP23 | 339 | 881718 | AC067976 | 1615 | 1-46 |
| | | | | | 449-805 |
| | | | | | 2251-2290 |
| | | | | | 4054-4915 |
| | | | | | 5042-5722 |
| | | | | | 6007-6412 |
| | | | | | 8885-9247 |
| | | | | | 9866-10472 |
| HKACP23 | 339 | 881718 | AC022326 | 1616 | 1-76 |
| | | | | | 1064-1262 |
| | | | | | 4575-4812 |
| | | | | | 5106-5462 |
| | | | | | 6908-6947 |
| | | | | | 8711-9571 |
| | | | | | 9698-10378 |
| HKACP23 | 339 | 881718 | AC022326 | 1617 | 1-106 |
| | | | | | 1752-1855 |
| | | | | | 2428-2672 |
| | | | | | 3386-3534 |
| | | | | | 4230-4446 |
| HKACP23 | 339 | 881718 | AC022326 | 1618 | 1-406 |
| HKABW75 | 346 | 973331 | AL161434 | 1619 | 1-459 |
| HKABW75 | 346 | 973331 | AL355146 | 1620 | 1-286 |
| HKABW75 | 346 | 973331 | AL132673 | 1621 | 1-459 |
| HKABU90 | 347 | 788888 | AC007996 | 1622 | 1-984 |
| | | | | | 1023-1081 |
| HKABU90 | 347 | 788888 | AC007996 | 1623 | 1-1796 |
| HKABR92 | 348 | 879400 | AC005237 | 1624 | 1-51 |
| | | | | | 135-503 |
| | | | | | 2408-3223 |
| | | | | | 4875-5063 |
| | | | | | 5867-7709 |
| | | | | | 7715-8029 |
| | | | | | 8447-8710 |
| | | | | | 8855-10670 |
| | | | | | 11854-12028 |
| | | | | | 12262-12323 |
| | | | | | 12725-15209 |
| | | | | | 15407-15937 |
| | | | | | 17792-18175 |
| | | | | | 19938-20029 |
| HKABR92 | 348 | 879400 | AC005237 | 1625 | 1-389 |
| HKABR92 | 348 | 879400 | AC005237 | 1626 | 1-506 |
| HKABQ76 | 349 | 857381 | AC068380 | 1627 | 1-1438 |
| | | | | | 1454-2064 |
| | | | | | 2160-3116 |
| | | | | | 3318-4043 |
| | | | | | 4355-4446 |
| | | | | | 4731-4796 |
| HKABQ76 | 349 | 857381 | AC003966 | 1628 | 1-1170 |
| | | | | | 1455-2065 |
| | | | | | 2161-3117 |
| | | | | | 3319-4044 |
| | | | | | 4356-4447 |
| | | | | | 4726-4854 |
| | | | | | 8203-8702 |
| | | | | | 8725-10519 |
| HKABQ76 | 349 | 857381 | AC025283 | 1629 | 1-131 |
| | | | | | 189-746 |
| | | | | | 1031-1170 |
| | | | | | 2801-3980 |
| | | | | | 4265-4875 |
| | | | | | 4971-5927 |
| | | | | | 6129-6854 |
| | | | | | 7166-7257 |
| | | | | | 7536-7664 |
| | | | | | 11021-11520 |
| | | | | | 11543-13337 |
| HKABQ76 | 349 | 857381 | AC025283 | 1630 | 1-1024 |
| HKABQ76 | 349 | 857381 | AC025283 | 1631 | 1-451 |
| HFEBY03 | 353 | 973292 | AC022504 | 1632 | 1-692 |
| HFEBY03 | 353 | 973292 | AC021874 | 1633 | 1-692 |
| HFEBY03 | 353 | 973292 | AC021875 | 1634 | 1-690 |
| HFEBY03 | 353 | 973292 | AC007944 | 1635 | 1-692 |
| HFEBY03 | 353 | 973292 | AC011312 | 1636 | 1-692 |
| HFEBY03 | 353 | 973292 | AC021023 | 1637 | 1-692 |
| HFEBY03 | 353 | 973292 | AC007944 | 1638 | 1-281 |
| HFEBY03 | 353 | 973292 | AC011312 | 1639 | 1-281 |
| HFEBY03 | 353 | 973292 | AC021023 | 1640 | 1-281 |
| HFEBQ59 | 354 | 739355 | AL162385 | 1641 | 1-1128 |
| HFEBQ59 | 354 | 739355 | AL162385 | 1642 | 1-263 |
| HFEBQ59 | 354 | 739355 | AL162385 | 1643 | 1-627 |
| | | | | | 724-801 |
| | | | | | 1516-1869 |
| | | | | | 1958-2074 |
| HFEBP01 | 355 | 916728 | AC055811 | 1644 | 1-135 |
| | | | | | 225-335 |
| | | | | | 1464-1703 |
| HFEBP01 | 355 | 916728 | AC007775 | 1645 | 1-136 |
| | | | | | 227-339 |
| | | | | | 1472-1712 |
| HFEBP01 | 355 | 916728 | AC007775 | 1646 | 1-315 |
| HFEBP01 | 355 | 916728 | AC007775 | 1647 | 1-107 |
| | | | | | 996-1246 |
| | | | | | 2160-2632 |
| | | | | | 2704-3225 |
| | | | | | 3676-3839 |
| | | | | | 4726-5197 |
| | | | | | 6167-7389 |
| | | | | | 9219-9331 |
| HFEBJ61 | 356 | 576092 | AP001266 | 1648 | 1-950 |
| HFEBJ61 | 356 | 576092 | AP001444 | 1649 | 1-950 |
| HFEBJ61 | 356 | 576092 | AC022488 | 1650 | 1-950 |
| HFEBJ61 | 356 | 576092 | AC022488 | 1651 | 1-676 |
| HFEBJ61 | 356 | 576092 | AP001266 | 1652 | 1-676 |
| HFEBJ61 | 356 | 576092 | AP001444 | 1653 | 1-676 |
| HFEBD01 | 358 | 916725 | AC010311 | 1654 | 1-774 |
| HFEBD01 | 358 | 916725 | AC010311 | 1655 | 1-453 |
| HFEBA06 | 359 | 935685 | AC004889 | 1656 | 1-243 |
| | | | | | 417-522 |
| | | | | | 4442-4968 |
| HFEBA06 | 359 | 935685 | AC004889 | 1657 | 1-404 |
| HFEBA06 | 359 | 935685 | AC004889 | 1658 | 1-470 |
| HFEAU06 | 360 | 960609 | AC021016 | 1659 | 1-223 |
| | | | | | 637-1438 |
| HFEAU06 | 360 | 960609 | AC021016 | 1660 | 1-509 |
| HFEAI49 | 364 | 722129 | AC003958 | 1661 | 1-111 |
| | | | | | 215-300 |
| | | | | | 801-909 |
| | | | | | 2361-2437 |
| | | | | | 2529-2656 |
| | | | | | 2833-2978 |
| | | | | | 3864-4345 |
| HFEAI49 | 364 | 722129 | AC003958 | 1662 | 1-154 |
| HFEAH01 | 365 | 916068 | AL133294 | 1663 | 1-509 |
| HFEAH01 | 365 | 916068 | AL133294 | 1664 | 1-278 |
| HFEAG41 | 366 | 504596 | AC055736 | 1665 | 1-504 |
| HFEAG41 | 366 | 504596 | AC055715 | 1666 | 1-504 |
| HFEAG41 | 366 | 504596 | AC024196 | 1667 | 1-504 |
| HESAC45 | 368 | 537453 | AL162399 | 1668 | 1-291 |
| HESAC45 | 368 | 537453 | Z97200 | 1669 | 1-291 |
| HESAC45 | 368 | 537453 | AL162399 | 1670 | 1-261 |
| HESAC45 | 368 | 537453 | AL162399 | 1671 | 1-589 |
| HESAC45 | 368 | 537453 | Z97200 | 1672 | 1-589 |
| HESAC45 | 368 | 537453 | Z97200 | 1673 | 1-261 |
| HERAS69 | 370 | 974532 | AC012659 | 1674 | 1-660 |
| HERAS69 | 370 | 974532 | AJ132410 | 1675 | 1-140 |
| | | | | | 396-1055 |
| | | | | | 1356-1504 |
| | | | | | 1508-1632 |
| | | | | | 1639-1990 |
| HERAS69 | 370 | 974532 | AC012659 | 1676 | 1-143 |
| HERAS69 | 370 | 974532 | AC012659 | 1677 | 1-140 |
| HERAS69 | 370 | 974532 | AJ132410 | 1678 | 1-810 |
| HERAN59 | 371 | 739562 | AC016952 | 1679 | 1-1091 |
| HERAN59 | 371 | 739562 | AC016953 | 1680 | 1-215 |
| | | | | | 500-1196 |
| | | | | | 1249-1444 |
| | | | | | 3222-3370 |
| | | | | | 3870-3977 |
| | | | | | 4172-4499 |
| | | | | | 4677-5094 |
| | | | | | 5806-5921 |
| | | | | | 7242-7343 |
| | | | | | 7717-8446 |
| | | | | | 8779-9234 |
| | | | | | 9629-9931 |
| | | | | | 10188-10290 |
| | | | | | 10386-10743 |
| | | | | | 10849-11509 |
| | | | | | 11795-12681 |
| | | | | | 12719-12794 |
| | | | | | 12841-12952 |
| | | | | | 13740-13865 |
| | | | | | 14194-15782 |
| | | | | | 16120-16162 |
| | | | | | 16703-18302 |
| | | | | | 18399-18505 |
| | | | | | 19872-20300 |
| | | | | | 21070-21216 |
| | | | | | 21619-21761 |
| HERAN59 | 371 | 739562 | AC016953 | 1681 | 1-354 |
| HERAN24 | 373 | 855537 | AL021391 | 1682 | 1-288 |
| | | | | | 595-673 |
| | | | | | 2158-2258 |
| | | | | | 3872-4355 |
| | | | | | 4522-4986 |
| | | | | | 6025-6285 |
| | | | | | 8561-8677 |
| | | | | | 9345-9951 |
| | | | | | 11355-11397 |
| | | | | | 11461-12100 |
| | | | | | 12217-12446 |
| | | | | | 12476-12627 |
| | | | | | 17170-17338 |
| | | | | | 17612-18081 |
| | | | | | 18184-18441 |
| | | | | | 18556-18692 |
| HERAN24 | 373 | 855537 | AL021391 | 1683 | 1-437 |
| HERAN16 | 374 | 973714 | AC062035 | 1684 | 1-175 |
| HERAN06 | 375 | 954671 | AC022102 | 1685 | 1-558 |
| HERAN06 | 375 | 954671 | AC020980 | 1686 | 1-556 |
| HERAL72 | 376 | 529196 | AP000039 | 1687 | 1-348 |
| HERAL72 | 376 | 529196 | AP000107 | 1688 | 1-348 |
| HERAL72 | 376 | 529196 | AP000183 | 1689 | 1-348 |
| HERAL72 | 376 | 529196 | AP000280 | 1690 | 1-348 |
| HERAL72 | 376 | 529196 | AP000039 | 1691 | 1-339 |
| | | | | | 1103-1577 |
| HERAL72 | 376 | 529196 | AP000107 | 1692 | 1-339 |
| | | | | | 1103-1577 |
| HERAL72 | 376 | 529196 | AP000183 | 1693 | 1-339 |
| | | | | | 1103-1577 |
| HERAL72 | 376 | 529196 | AP000039 | 1694 | 1-946 |
| HERAL72 | 376 | 529196 | AP000107 | 1695 | 1-946 |
| HERAL72 | 376 | 529196 | AP000183 | 1696 | 1-946 |
| HERAL72 | 376 | 529196 | AP000280 | 1697 | 1-339 |
| | | | | | 1103-1577 |
| HERAL72 | 376 | 529196 | AP000280 | 1698 | 1-946 |
| HERAK96 | 377 | 796591 | AC027306 | 1699 | 1-380 |
| HERAK96 | 377 | 796591 | AC027306 | 1700 | 1-104 |
| HERAK01 | 379 | 921634 | AC025576 | 1701 | 1-478 |
| HERAK01 | 379 | 921634 | AC055724 | 1702 | 1-479 |
| HERAK01 | 379 | 921634 | AC025576 | 1703 | 1-250 |
| HERAH16 | 382 | 880475 | AC023592 | 1704 | 1-568 |
| HERAH16 | 382 | 880475 | AC069441 | 1705 | 1-568 |
| HERAH16 | 382 | 880475 | AC023592 | 1706 | 1-114 |
| HERAH16 | 382 | 880475 | AC069441 | 1707 | 1-105 |
| HERAH06 | 383 | 954672 | AC032021 | 1708 | 1-983 |
| HERAH06 | 383 | 954672 | AC013633 | 1709 | 1-1118 |
| HERAH06 | 383 | 954672 | AC027516 | 1710 | 1-592 |
| | | | | | 622-1740 |
| HERAH06 | 383 | 954672 | AC011138 | 1711 | 1-593 |
| | | | | | 627-1736 |
| HERAH06 | 383 | 954672 | AC032021 | 1712 | 1-575 |
| HERAH06 | 383 | 954672 | AC013633 | 1713 | 1-574 |
| HERAH06 | 383 | 954672 | AC027516 | 1714 | 1-574 |
| HERAH06 | 383 | 954672 | AC027516 | 1715 | 1-174 |
| HERAH06 | 383 | 954672 | AC011138 | 1716 | 1-575 |
| HERAH06 | 383 | 954672 | AC011138 | 1717 | 1-176 |
| HERAE59 | 385 | 739569 | AL356776 | 1718 | 1-418 |
| | | | | | 2285-2628 |
| | | | | | 2995-3301 |
| HERAE59 | 385 | 739569 | AL356776 | 1719 | 1-6019 |
| HERAE24 | 386 | 678518 | AC023282 | 1720 | 1-527 |
| HERAB53 | 390 | 727373 | AL136458 | 1721 | 1-342 |
| | | | | | 350-773 |
| HERAB53 | 390 | 727373 | AL136458 | 1722 | 1-301 |
| HERAB53 | 390 | 727373 | AL136458 | 1723 | 1-327 |
| HBIPD10 | 391 | 961972 | AL359740 | 1724 | 1-666 |
| HBIPD10 | 391 | 961972 | AL359740 | 1725 | 1-4558 |
| HBIPD10 | 391 | 961972 | AL359740 | 1726 | 1-279 |
| HBIPB07 | 392 | 951981 | AL161645 | 1727 | 1-150 |
| | | | | | 644-795 |
| HBIOZ10 | 393 | 973131 | AC010761 | 1728 | 1-543 |
| | | | | | 787-3239 |
| | | | | | 3323-3758 |
| | | | | | 3840-3890 |
| HBIOZ10 | 393 | 973131 | AC010761 | 1729 | 1-134 |
| | | | | | 560-634 |
| | | | | | 971-1091 |
| | | | | | 2351-2501 |
| | | | | | 2711-2875 |
| | | | | | 2967-3126 |
| | | | | | 3298-3461 |
| | | | | | 3575-4655 |
| | | | | | 5184-5345 |
| HBIOW11 | 394 | 965551 | AC007255 | 1730 | 1-581 |
| | | | | | 619-1957 |
| | | | | | 2385-3495 |
| HBIOW11 | 394 | 965551 | AC007255 | 1731 | 1-303 |
| HBIOW11 | 394 | 965551 | AC007255 | 1732 | 1-897 |
| HBIOT01 | 395 | 914657 | AL355519 | 1733 | 1-874 |
| HBIOT01 | 395 | 914657 | AL355519 | 1734 | 1-462 |
| HBIOT01 | 395 | 914657 | AL355519 | 1735 | 1-262 |
| | | | | | 470-546 |
| | | | | | 653-856 |
| HBIOJ05 | 398 | 930754 | AC026130 | 1736 | 1-572 |
| HBIOJ05 | 398 | 930754 | AC008053 | 1737 | 1-572 |
| HBIOJ05 | 398 | 930754 | AC026130 | 1738 | 1-248 |
| | | | | | 821-948 |
| | | | | | 1204-1610 |
| | | | | | 2023-2147 |
| HBIOJ05 | 398 | 930754 | AC008053 | 1739 | 1-708 |
| HBIOJ05 | 398 | 930754 | AC026130 | 1740 | 1-708 |
| HBIOJ05 | 398 | 930754 | AC008053 | 1741 | 1-248 |
| HBIOF05 | 399 | 930771 | AC004832 | 1742 | 1-1569 |
| HBIOF05 | 399 | 930771 | AC004832 | 1743 | 1-365 |
| HBIMT11 | 400 | 965089 | AL132868 | 1744 | 1-31 |
| | | | | | 463-776 |
| | | | | | 1786-1960 |
| | | | | | 2703-2786 |
| | | | | | 3847-4108 |
| | | | | | 4405-4524 |
| | | | | | 5068-5342 |
| | | | | | 5668-5929 |
| | | | | | 7688-8649 |
| | | | | | 8913-10150 |
| | | | | | 10523-12990 |
| | | | | | 13396-13843 |
| | | | | | 13907-14093 |
| HBIMT11 | 400 | 965089 | AL132868 | 1745 | 1-2318 |
| HBIMR08 | 401 | 957996 | AL356796 | 1746 | 1-291 |
| | | | | | 2597-3613 |
| HBIMR08 | 401 | 957996 | AC024555 | 1747 | 1-53 |
| | | | | | 1382-1438 |
| | | | | | 2066-2116 |
| | | | | | 4621-4674 |
| | | | | | 4835-4891 |
| | | | | | 6591-6635 |
| | | | | | 7674-7964 |
| | | | | | 10263-11282 |
| HBIMR08 | 401 | 957996 | AC024555 | 1748 | 1-1730 |
| HAWAZ32 | 404 | 702976 | AC024902 | 1749 | 1-531 |
| HAWAZ32 | 404 | 702976 | AC024902 | 1750 | 1-309 |
| HAWAZ32 | 404 | 702976 | AC024902 | 1751 | 1-239 |
| HAWAW12 | 406 | 971497 | AC069238 | 1752 | 1-288 |
| HAWAW12 | 406 | 971497 | AC069238 | 1753 | 1-362 |
| HAWAS28 | 407 | 416137 | AL157700 | 1754 | 1-1802 |
| HAWAS28 | 407 | 416137 | AL157700 | 1755 | 1-1007 |
| HAVAF22 | 410 | 675054 | AC011116 | 1756 | 1-391 |
| | | | | | 490-883 |
| HAVAF22 | 410 | 675054 | AC011116 | 1757 | 1-1967 |
| HAVAC03 | 411 | 925291 | AC005221 | 1758 | 1-972 |
| HAVAC03 | 411 | 925291 | AC005221 | 1759 | 1-386 |
| HARNO54 | 412 | 729117 | AC069153 | 1760 | 1-568 |
| HARNO54 | 412 | 729117 | AL121976 | 1761 | 1-568 |
| HARNO54 | 412 | 729117 | AL355305 | 1762 | 1-568 |
| HARNO54 | 412 | 729117 | AC069153 | 1763 | 1-543 |
| HARNO54 | 412 | 729117 | AL121976 | 1764 | 1-901 |
| HARNO54 | 412 | 729117 | AL355305 | 1765 | 1-899 |
| HARNO54 | 412 | 729117 | AL121976 | 1766 | 1-543 |
| HARNO54 | 412 | 729117 | AL355305 | 1767 | 1-543 |
| HARND69 | 414 | 754675 | AC055716 | 1768 | 1-1612 |
| HARND69 | 414 | 754675 | AC068988 | 1769 | 1-1613 |
| HARND69 | 414 | 754675 | AC024196 | 1770 | 1-1611 |
| HARND69 | 414 | 754675 | AC068988 | 1771 | 1-413 |
| | | | | | 1736-2207 |
| | | | | | 3122-3175 |
| | | | | | 3904-4024 |
| | | | | | 4138-4364 |
| | | | | | 5345-5381 |
| HARMV85 | 416 | 864612 | AC007388 | 1772 | 1-444 |
| HARMV85 | 416 | 864612 | AC007388 | 1773 | 1-379 |
| HARMP93 | 417 | 791948 | AC026476 | 1774 | 1-556 |
| HARMP93 | 417 | 791948 | AC022444 | 1775 | 1-556 |
| HARMP93 | 417 | 791948 | AC016580 | 1776 | 1-366 |
| | | | | | 3632-4186 |
| HARMP93 | 417 | 791948 | AC034246 | 1777 | 1-366 |
| | | | | | 3635-4190 |
| HARMP93 | 417 | 791948 | AC008960 | 1778 | 1-366 |
| | | | | | 3630-4185 |
| HARMP93 | 417 | 791948 | AC008777 | 1779 | 1-556 |
| HARMM53 | 418 | 854369 | AC012419 | 1780 | 1-1147 |
| | | | | | 2438-2613 |
| | | | | | 3134-3170 |
| | | | | | 3389-3947 |
| | | | | | 4176-4314 |
| | | | | | 4419-4909 |
| | | | | | 6595-6725 |
| | | | | | 7146-8116 |
| | | | | | 8124-8259 |
| | | | | | 8805-9511 |
| | | | | | 9590-9734 |
| | | | | | 10490-11182 |
| HADGI45 | 421 | 717755 | AC073957 | 1781 | 1-930 |
| HADGI45 | 421 | 717755 | AC073957 | 1782 | 1-44 |
| | | | | | 2050-2651 |
| HADGI45 | 421 | 717755 | AC073957 | 1783 | 1-245 |
| HADGG22 | 422 | 674421 | AC021172 | 1784 | 1-872 |
| HADGG22 | 422 | 674421 | AL359271 | 1785 | 1-872 |
| HADGG22 | 422 | 674421 | AC021172 | 1786 | 1-369 |
| HADGG22 | 422 | 674421 | AL359271 | 1787 | 1-369 |
| HADGC96 | 423 | 865247 | AC018926 | 1788 | 1-375 |
| HADGC96 | 423 | 865247 | AC018926 | 1789 | 1-355 |
| HADGB52 | 424 | 647367 | AC024657 | 1790 | 1-410 |
| HADGB52 | 424 | 647367 | AC024657 | 1791 | 1-368 |
| HADFW15 | 428 | 848983 | AC073184 | 1792 | 1-368 |
| HADFW15 | 428 | 848983 | AC073184 | 1793 | 1-326 |
| HADFW06 | 429 | 935340 | AL359878 | 1794 | 1-138 |
| HADFW06 | 429 | 935340 | AC010770 | 1795 | 1-1055 |
| HADFW06 | 429 | 935340 | AC012100 | 1796 | 1-1055 |
| HADFW06 | 429 | 935340 | AC010770 | 1797 | 1-353 |
| HADFW06 | 429 | 935340 | AC012100 | 1798 | 1-353 |
| HADFW06 | 429 | 935340 | AC010770 | 1799 | 1-518 |
| HADFV03 | 430 | 972437 | AC060812 | 1800 | 1-451 |
| HADFV03 | 430 | 972437 | AC018803 | 1801 | 1-451 |
| HADFV03 | 430 | 972437 | AC060812 | 1802 | 1-368 |
| HADFV03 | 430 | 972437 | AC018803 | 1803 | 1-368 |
| HADFJ08 | 432 | 959297 | AC004850 | 1804 | 1-41 |
| | | | | | 2476-2606 |
| | | | | | 4082-4199 |
| | | | | | 4463-4665 |
| | | | | | 5467-5522 |
| | | | | | 6438-6678 |
| | | | | | 7939-8422 |
| | | | | | 9122-9183 |
| | | | | | 9193-9575 |
| | | | | | 9798-9965 |
| | | | | | 10968-11142 |
| | | | | | 13086-13527 |
| | | | | | 14297-14833 |
| | | | | | 14884-15441 |
| | | | | | 17471-18082 |
| | | | | | 18238-18594 |
| | | | | | 19739-19883 |
| | | | | | 21785-21830 |
| | | | | | 26488-26856 |
| | | | | | 27782-28384 |
| | | | | | 28998-29534 |
| | | | | | 30453-30935 |
| | | | | | 30955-31016 |
| | | | | | 33179-33319 |
| | | | | | 34600-34740 |
| | | | | | 35370-35437 |
| | | | | | 40109-40560 |
| | | | | | 42883-43315 |
| | | | | | 44523-44951 |
| | | | | | 46402-46783 |
| | | | | | 46842-47351 |
| | | | | | 47930-48029 |
| | | | | | 48134-48176 |
| | | | | | 49382-49812 |
| | | | | | 49897-50277 |
| | | | | | 50393-52131 |
| | | | | | 52208-52741 |
| | | | | | 53025-53926 |
| HADFD69 | 434 | 754277 | AC073655 | 1805 | 1-324 |
| | | | | | 386-920 |
| | | | | | 1133-1642 |
| | | | | | 1835-1980 |
| | | | | | 2094-2246 |
| HADFD69 | 434 | 754277 | AC073655 | 1806 | 1-466 |
| HADFC15 | 435 | 659541 | AL138709 | 1807 | 1-1723 |
| HADFC15 | 435 | 659541 | AC016270 | 1808 | 1-1723 |
| HADFB60 | 436 | 740318 | AL139243 | 1809 | 1-163 |
| | | | | | 539-672 |
| | | | | | 1948-2236 |
| | | | | | 2352-2510 |
| | | | | | 3877-4805 |
| | | | | | 5384-5488 |
| | | | | | 5640-5907 |
| | | | | | 6029-6550 |
| | | | | | 7922-8161 |
| | | | | | 8943-9542 |
| HADFB60 | 436 | 740318 | AL139243 | 1810 | 1-279 |
| HADFB55 | 437 | 731686 | AC009947 | 1811 | 1-964 |
| HADFB55 | 437 | 731686 | AC008272 | 1812 | 1-964 |
| HADFB55 | 437 | 731686 | AC006991 | 1813 | 1-964 |
| HADFB55 | 437 | 731686 | AL359453 | 1814 | 1-1144 |
| HADFB55 | 437 | 731686 | AC024067 | 1815 | 1-964 |
| HADFB55 | 437 | 731686 | AL359096 | 1816 | 1-1143 |
| HADFB55 | 437 | 731686 | AC053522 | 1817 | 1-1143 |
| HADFB55 | 437 | 731686 | AC015973 | 1818 | 1-1145 |
| HADFB55 | 437 | 731686 | AC009947 | 1819 | 1-372 |
| HADFB55 | 437 | 731686 | AC008272 | 1820 | 1-314 |
| HADFB55 | 437 | 731686 | AC006991 | 1821 | 1-372 |
| HADFB55 | 437 | 731686 | AC009947 | 1822 | 1-314 |
| HADFB55 | 437 | 731686 | AC008272 | 1823 | 1-372 |
| HADFB55 | 437 | 731686 | AC006991 | 1824 | 1-314 |
| HADFB55 | 437 | 731686 | AL359453 | 1825 | 1-570 |
| HADFB55 | 437 | 731686 | AL359453 | 1826 | 1-314 |
| HADFB55 | 437 | 731686 | AC024067 | 1827 | 1-372 |
| HADFB55 | 437 | 731686 | AC024067 | 1828 | 1-314 |
| HADFB55 | 437 | 731686 | AL359096 | 1829 | 1-314 |
| HADFB55 | 437 | 731686 | AL359096 | 1830 | 1-570 |
| HADFB55 | 437 | 731686 | AC053522 | 1831 | 1-570 |
| HADFB55 | 437 | 731686 | AC053522 | 1832 | 1-314 |
| HADFB55 | 437 | 731686 | AC015973 | 1833 | 1-570 |
| HADFB55 | 437 | 731686 | AC015973 | 1834 | 1-314 |
| HADFB08 | 438 | 959273 | AC007385 | 1835 | 1-324 |
| HADEY09 | 439 | 625505 | AC026696 | 1836 | 1-298 |
| HADEY09 | 439 | 625505 | AC008908 | 1837 | 1-298 |
| HADEY09 | 439 | 625505 | AC007554 | 1838 | 1-298 |
| HADEU65 | 440 | 747880 | AC024649 | 1839 | 1-1136 |
| HADEU65 | 440 | 747880 | AC024649 | 1840 | 1-262 |
| HADEU65 | 440 | 747880 | AC024649 | 1841 | 1-575 |
| HADEU32 | 441 | 699194 | AC023255 | 1842 | 1-386 |
| | | | | | 557-941 |
| | | | | | 1575-2090 |
| HADEU32 | 441 | 699194 | AC022413 | 1843 | 1-386 |
| | | | | | 558-942 |
| | | | | | 1576-2091 |
| HADEU32 | 441 | 699194 | AC023255 | 1844 | 1-292 |
| HADEU32 | 441 | 699194 | AC023255 | 1845 | 1-942 |
| HADEU32 | 441 | 699194 | AC022413 | 1846 | 1-942 |
| HADEU32 | 441 | 699194 | AC022413 | 1847 | 1-292 |
| HADET68 | 442 | 906389 | AL359758 | 1848 | 1-545 |
| HADET68 | 442 | 906389 | AL359758 | 1849 | 1-688 |
| HADET68 | 442 | 906389 | AC073223 | 1850 | 1-3095 |
| HADET68 | 442 | 906389 | AL049715 | 1851 | 1-2763 |
| HADET68 | 442 | 906389 | AC019250 | 1852 | 1-3078 |
| HADET68 | 442 | 906389 | AC024119 | 1853 | 1-3096 |
| HADET68 | 442 | 906389 | AC073223 | 1854 | 1-1230 |
| HADET68 | 442 | 906389 | AC073223 | 1855 | 1-123 |
| HADET68 | 442 | 906389 | AL049715 | 1856 | 1-289 |
| HADET68 | 442 | 906389 | AL049715 | 1857 | 1-555 |
| HADET68 | 442 | 906389 | AC019250 | 1858 | 1-561 |
| HADET68 | 442 | 906389 | AC019250 | 1859 | 1-2529 |
| HADET68 | 442 | 906389 | AC024119 | 1860 | 1-3024 |
| | | | | | 3044-5814 |
| HADET68 | 442 | 906389 | AC024119 | 1861 | 1-538 |
| HADDS75 | 443 | 660816 | AC026883 | 1862 | 1-2256 |
| HADDS75 | 443 | 660816 | AC018783 | 1863 | 1-994 |
| HADDS75 | 443 | 660816 | AL139819 | 1864 | 1-4167 |
| | | | | | 4293-4775 |
| | | | | | 6064-6744 |
| | | | | | 7358-7647 |
| | | | | | 8068-8307 |
| | | | | | 8883-9182 |
| | | | | | 9338-9742 |
| | | | | | 10001-10476 |
| | | | | | 10753-11188 |
| | | | | | 11245-11508 |
| | | | | | 11845-12199 |
| | | | | | 12332-12472 |
| | | | | | 13258-13783 |
| | | | | | 16480-16767 |
| | | | | | 17297-17704 |
| HADDS75 | 443 | 660816 | AL359759 | 1865 | 1-4167 |
| | | | | | 4293-4775 |
| | | | | | 6065-6745 |
| | | | | | 7359-7648 |
| | | | | | 8069-8308 |
| | | | | | 8884-9183 |
| | | | | | 9339-9743 |
| | | | | | 10002-10480 |
| | | | | | 10757-11192 |
| | | | | | 11249-11512 |
| | | | | | 11849-12203 |
| | | | | | 12336-12476 |
| | | | | | 13262-13787 |
| | | | | | 16483-16770 |
| | | | | | 17300-17707 |
| HADDS75 | 443 | 660816 | AC026883 | 1866 | 1-98 |
| HADDS75 | 443 | 660816 | AC018783 | 1867 | 1-98 |
| HADDS75 | 443 | 660816 | AL139819 | 1868 | 1-114 |
| HADDS75 | 443 | 660816 | AL359759 | 1869 | 1-103 |
| HADDS21 | 444 | 670802 | AC016135 | 1870 | 1-845 |
| HADDS21 | 444 | 670802 | AC022305 | 1871 | 1-878 |
| HADDS21 | 444 | 670802 | AC018512 | 1872 | 1-776 |
| HADDS21 | 444 | 670802 | AC007411 | 1873 | 1-586 |
| HADDS21 | 444 | 670802 | AC002518 | 1874 | 1-150 |
| HADDS21 | 444 | 670802 | AC007411 | 1875 | 1-179 |
| HADDS07 | 445 | 849000 | AC022706 | 1876 | 1-2673 |
| HADDS07 | 445 | 849000 | AC022706 | 1877 | 1-4149 |
| HADDS07 | 445 | 849000 | AC022706 | 1878 | 1-3302 |
| | | | | | 3392-3702 |
| | | | | | 3725-3842 |
| | | | | | 4413-4576 |
| | | | | | 4588-6766 |
| HADDQ56 | 447 | 733340 | AC009331 | 1879 | 1-530 |
| HADDQ56 | 447 | 733340 | AC009331 | 1880 | 1-57 |
| | | | | | 111-518 |
| | | | | | 1457-2106 |
| | | | | | 2343-2595 |
| | | | | | 3802-4589 |
| | | | | | 9332-12079 |
| HADDQ56 | 447 | 733340 | AC009331 | 1881 | 1-347 |
| HADDP12 | 448 | 970537 | AC008679 | 1882 | 1-457 |
| HADDP12 | 448 | 970537 | AC008679 | 1883 | 1-302 |
| HADDP12 | 448 | 970537 | AC008679 | 1884 | 1-121 |
| HADDI89 | 449 | 865278 | AL136418 | 1885 | 1-431 |
| HADDI89 | 449 | 865278 | AL139054 | 1886 | 1-431 |
| HADDI89 | 449 | 865278 | AL136418 | 1887 | 1-124 |
| HADDI89 | 449 | 865278 | AL139054 | 1888 | 1-124 |
| HADDI89 | 449 | 865278 | AL136418 | 1889 | 1-284 |
| HADDI89 | 449 | 865278 | AL139054 | 1890 | 1-284 |
| HADDI54 | 450 | 729760 | AC073829 | 1891 | 1-462 |
| HADDI42 | 451 | 713700 | AC009144 | 1892 | 1-88 |
| HADDI42 | 451 | 713700 | AC009088 | 1893 | 1-286 |
| | | | | | 1767-1898 |
| | | | | | 3233-3471 |
| HADDI42 | 451 | 713700 | AC023230 | 1894 | 1-148 |
| HADDI42 | 451 | 713700 | AC073841 | 1895 | 1-91 |
| HADDI42 | 451 | 713700 | AC009286 | 1896 | 1-87 |
| HADDI42 | 451 | 713700 | AL360076 | 1897 | 1-93 |
| HADDI42 | 451 | 713700 | AC073841 | 1898 | 1-346 |
| | | | | | 428-529 |
| | | | | | 861-1951 |
| HADDE27 | 452 | 683382 | AL356365 | 1899 | 1-531 |
| HADDE27 | 452 | 683382 | AL356365 | 1900 | 1-142 |
| HADDE15 | 453 | 952542 | AC018606 | 1901 | 1-160 |
| | | | | | 763-1583 |
| | | | | | 1988-2201 |
| HADDC44 | 456 | 715928 | AL359706 | 1902 | 1-466 |
| HADDC42 | 457 | 713657 | AC012086 | 1903 | 1-468 |
| HADDC42 | 457 | 713657 | AC022001 | 1904 | 1-469 |
| HADDC42 | 457 | 713657 | AC018494 | 1905 | 1-468 |
| HADDC42 | 457 | 713657 | AC012086 | 1906 | 1-466 |
| HADDC42 | 457 | 713657 | AC022001 | 1907 | 1-500 |
| HADDC42 | 457 | 713657 | AC018494 | 1908 | 1-466 |
| HADDB62 | 459 | 743476 | AC024357 | 1909 | 1-457 |
| HADDB13 | 460 | 657120 | AC016722 | 1910 | 1-456 |
| HADDB13 | 460 | 657120 | AC020604 | 1911 | 1-456 |
| HADDB13 | 460 | 657120 | AC016722 | 1912 | 1-321 |
| HADDB13 | 460 | 657120 | AC020604 | 1913 | 1-321 |
| HADCZ08 | 462 | 959304 | AC073850 | 1914 | 1-402 |
| HADCZ08 | 462 | 959304 | AC073850 | 1915 | 1-410 |
| HADCX34 | 463 | 704030 | AC011739 | 1916 | 1-297 |
| | | | | | 6486-6888 |
| | | | | | 11346-11816 |
| | | | | | 12107-12458 |
| | | | | | 13636-13776 |
| | | | | | 14635-15382 |
| | | | | | 17916-18501 |
| HADCX34 | 463 | 704030 | AC011739 | 1917 | 1-517 |
| HADCW01 | 464 | 916399 | AC012431 | 1918 | 1-412 |
| | | | | | 810-1279 |
| | | | | | 1502-1630 |
| | | | | | 2316-2382 |
| | | | | | 3130-4418 |
| HADCW01 | 464 | 916399 | AC024483 | 1919 | 1-412 |
| | | | | | 810-1279 |
| | | | | | 1502-1630 |
| | | | | | 2316-2382 |
| | | | | | 3130-4418 |
| HADCW01 | 464 | 916399 | AC010300 | 1920 | 1-412 |
| | | | | | 810-1279 |
| | | | | | 1502-1630 |
| | | | | | 2316-2382 |
| | | | | | 3130-4416 |
| | | | | | 4989-5077 |
| | | | | | 5090-5599 |
| | | | | | 5990-6759 |
| | | | | | 6783-7080 |
| | | | | | 7321-8191 |
| HADCW01 | 464 | 916399 | AC012431 | 1921 | 1-399 |
| HADCW01 | 464 | 916399 | AC024483 | 1922 | 1-89 |
| HADCW01 | 464 | 916399 | AC010300 | 1923 | 1-399 |
| HADCW01 | 464 | 916399 | AC012431 | 1924 | 1-89 |
| HADCP50 | 466 | 723684 | AC018645 | 1925 | 1-434 |
| HADCP50 | 466 | 723684 | AC018645 | 1926 | 1-256 |
| | | | | | 450-753 |
| HADCO30 | 467 | 914688 | AC009034 | 1927 | 1-805 |
| | | | | | 915-2293 |
| | | | | | 2539-3030 |
| | | | | | 3326-3932 |
| HADCO30 | 467 | 914688 | AC009034 | 1928 | 1-251 |
| HADCO30 | 467 | 914688 | AC009034 | 1929 | 1-548 |
| | | | | | 3178-3274 |
| | | | | | 3940-4857 |
| HADCO03 | 468 | 924043 | AC024047 | 1930 | 1-1135 |
| HADCO03 | 468 | 924043 | AC003963 | 1931 | 1-1137 |
| HADCO03 | 468 | 924043 | AC024047 | 1932 | 1-511 |
| HADCO03 | 468 | 924043 | AC003963 | 1933 | 1-968 |
| HADCN29 | 469 | 690600 | AC055747 | 1934 | 1-1617 |
| HADCN29 | 469 | 690600 | AC055747 | 1935 | 1-147 |
| HADCN29 | 469 | 690600 | AC055747 | 1936 | 1-611 |
| HADCH77 | 470 | 826137 | AC002395 | 1937 | 1-612 |
| HADCH77 | 470 | 826137 | AC002395 | 1938 | 1-59 |
| | | | | | 74-106 |
| | | | | | 1511-1689 |
| | | | | | 3579-3787 |
| | | | | | 5340-5799 |
| | | | | | 6109-6683 |
| | | | | | 7051-7424 |
| | | | | | 7805-8432 |
| | | | | | 8925-9562 |
| | | | | | 9941-10051 |
| | | | | | 10323-10378 |
| HADCH77 | 470 | 826137 | AC002395 | 1939 | 1-258 |
| HADCD46 | 471 | 719005 | AL133384 | 1940 | 1-542 |
| HADCD46 | 471 | 719005 | AL133384 | 1941 | 1-272 |
| HADCD46 | 471 | 719005 | AL133384 | 1942 | 1-817 |
| HADAY29 | 472 | 690602 | AL133326 | 1943 | 1-332 |
| HADAY29 | 472 | 690602 | AL133326 | 1944 | 1-6053 |
| HADAY29 | 472 | 690602 | AL133326 | 1945 | 1-498 |
| HADAR23 | 474 | 675844 | AL161618 | 1946 | 1-935 |
| HADAR23 | 474 | 675844 | AL096772 | 1947 | 1-935 |
| HADAR23 | 474 | 675844 | AL161618 | 1948 | 1-572 |
| HADAR23 | 474 | 675844 | AL096772 | 1949 | 1-572 |
| HADAM60 | 475 | 740326 | AL138803 | 1950 | 1-615 |
| HADAM60 | 475 | 740326 | AL161656 | 1951 | 1-615 |
| HADAM60 | 475 | 740326 | AL138803 | 1952 | 1-321 |
| HADAM60 | 475 | 740326 | AL161656 | 1953 | 1-320 |
| HADAE96 | 476 | 796469 | AL157858 | 1954 | 1-434 |
| | | | | | 439-1127 |
| | | | | | 1277-1385 |
| | | | | | 1430-2038 |
| | | | | | 2086-2687 |
| HADAE96 | 476 | 796469 | AL157858 | 1955 | 1-235 |
| HADAE96 | 476 | 796469 | AL157858 | 1956 | 1-509 |
| HACCW79 | 478 | 774898 | AC018915 | 1957 | 1-1333 |
| | | | | | 1412-2063 |
| HACCW79 | 478 | 774898 | AC018915 | 1958 | 1-223 |
| | | | | | 3072-3796 |
| HACCT11 | 479 | 966886 | AC027793 | 1959 | 1-490 |
| HACCTI1 | 479 | 966886 | AC004666 | 1960 | 1-490 |
| HACCT11 | 479 | 966886 | AC027793 | 1961 | 1-120 |
| | | | | | 1011-1326 |
| | | | | | 3010-3239 |
| | | | | | 3284-4308 |
| | | | | | 4594-5006 |
| | | | | | 5019-6226 |
| HACCT11 | 479 | 966886 | AC027793 | 1962 | 1-104 |
| HACCT11 | 479 | 966886 | AC004666 | 1963 | 1-394 |
| | | | | | 1226-1352 |
| | | | | | 5108-5144 |
| | | | | | 5776-5920 |
| | | | | | 16221-16764 |
| | | | | | 16829-17215 |
| | | | | | 17243-17677 |
| | | | | | 23211-23330 |
| | | | | | 24166-24283 |
| | | | | | 25908-26342 |
| | | | | | 27565-27650 |
| | | | | | 27743-28059 |
| | | | | | 29949-30469 |
| | | | | | 30702-30800 |
| | | | | | 31110-31278 |
| | | | | | 31511-31630 |
| | | | | | 32521-32836 |
| | | | | | 34520-34749 |
| | | | | | 34794-35818 |
| | | | | | 36104-36516 |
| | | | | | 36529-37736 |
| HACCT11 | 479 | 966886 | AC004666 | 1964 | 1-91 |
| HACBW76 | 480 | 849054 | AC010480 | 1965 | 1-1711 |
| | | | | | 1807-2850 |
| | | | | | 3447-4265 |
| | | | | | 4688-6980 |
| | | | | | 7612-8456 |
| | | | | | 9236-10134 |
| | | | | | 10143-10669 |
| | | | | | 12191-12245 |
| | | | | | 13385-13805 |
| | | | | | 15792-15903 |
| | | | | | 17956-18305 |
| | | | | | 20839-21169 |
| | | | | | 21721-21984 |
| | | | | | 22298-22419 |
| | | | | | 22598-23554 |
| | | | | | 24410-24710 |
| | | | | | 25454-25984 |
| | | | | | 26006-26197 |
| HACBW76 | 480 | 849054 | AC020728 | 1966 | 1-840 |
| | | | | | 852-1717 |
| | | | | | 1813-2296 |
| | | | | | 2299-2856 |
| | | | | | 3453-4271 |
| | | | | | 4694-6989 |
| | | | | | 7621-8474 |
| | | | | | 9246-10144 |
| | | | | | 10153-10679 |
| | | | | | 12201-12255 |
| | | | | | 13089-13221 |
| | | | | | 13399-13819 |
| | | | | | 15806-15917 |
| | | | | | 17960-18309 |
| | | | | | 20843-21173 |
| | | | | | 21357-21434 |
| | | | | | 21724-21987 |
| | | | | | 22301-22422 |
| | | | | | 22601-23557 |
| | | | | | 24423-24723 |
| | | | | | 25467-25997 |
| | | | | | 26019-26210 |
| HACBW76 | 480 | 849054 | AC010480 | 1967 | 1-530 |
| HACBW76 | 480 | 849054 | AC020728 | 1968 | 1-291 |
| HACBW76 | 480 | 849054 | AC010480 | 1969 | 1-310 |
| HACBW76 | 480 | 849054 | AC020728 | 1970 | 1-530 |
| HACBU26 | 481 | 683006 | AL157395 | 1971 | 1-1377 |
| | | | | | 1831-4672 |
| HACBU26 | 481 | 683006 | AL157395 | 1972 | 1-552 |
| HACBU26 | 481 | 683006 | AL157395 | 1973 | 1-216 |
| HACBN71 | 483 | 872015 | AC018782 | 1974 | 1-1224 |
| | | | | | 1463-2010 |
| | | | | | 2048-2174 |
| | | | | | 3135-3512 |
| HACBN71 | 483 | 872015 | AC018782 | 1975 | 1-129 |
| HACBN71 | 483 | 872015 | AC018782 | 1976 | 1-460 |
| | | | | | 1163-1593 |
| | | | | | 1644-1768 |
| | | | | | 1797-1903 |
| | | | | | 2271-2568 |
| | | | | | 2604-2981 |
| | | | | | 3064-3236 |
| | | | | | 4035-4230 |
| | | | | | 4840-4920 |
| | | | | | 5012-5119 |
| | | | | | 5352-5387 |
| | | | | | 7427-7588 |
| | | | | | 7851-8701 |
| HACBJ83 | 484 | 875263 | AL158839 | 1977 | 1-283 |
| HACBJ83 | 484 | 875263 | AL158839 | 1978 | 1-1912 |
| HACBJ83 | 484 | 875263 | AL158839 | 1979 | 1-346 |
| HACBJ17 | 485 | 663371 | AL356577 | 1980 | 1-1536 |
| HACBJ17 | 485 | 663371 | AL049713 | 1981 | 1-1536 |
| HACBJ17 | 485 | 663371 | AL356577 | 1982 | 1-185 |
| HACBJ17 | 485 | 663371 | AL049713 | 1983 | 1-185 |
| HACBB13 | 487 | 698800 | AC044881 | 1984 | 1-1106 |
| | | | | | 1288-1949 |
| | | | | | 2100-3536 |
| HACBB13 | 487 | 698800 | AC026291 | 1985 | 1-1106 |
| | | | | | 1289-1950 |
| | | | | | 2095-3530 |
| HACBB13 | 487 | 698800 | AC026291 | 1986 | 1-501 |
| HACAB93 | 488 | 792382 | AC073585 | 1987 | 1-1886 |
| HACAB93 | 488 | 792382 | AC073585 | 1988 | 1-612 |
| HACAA57 | 489 | 733887 | AC027384 | 1989 | 1-403 |
| | | | | | 415-914 |
| | | | | | 956-1508 |
| HACAA57 | 489 | 733887 | AL357732 | 1990 | 1-403 |
| | | | | | 415-914 |
| | | | | | 956-1508 |
| HACAA57 | 489 | 733887 | AL356429 | 1991 | 1-405 |
| | | | | | 417-916 |
| | | | | | 958-1510 |
| HACAA57 | 489 | 733887 | AC073499 | 1992 | 1-403 |
| | | | | | 415-914 |
| | | | | | 956-1508 |
| HACAA57 | 489 | 733887 | AL356429 | 1993 | 1-530 |
| HACAA57 | 489 | 733887 | AC027384 | 1994 | 1-530 |
| HACAA57 | 489 | 733887 | AL357732 | 1995 | 1-530 |
| HACAA57 | 489 | 733887 | AC073499 | 1996 | 1-530 |
| HACAA03 | 490 | 924513 | AC016684 | 1997 | 1-656 |
| HACAA03 | 490 | 924513 | AC020901 | 1998 | 1-1189 |
| HACAA03 | 490 | 924513 | AC026427 | 1999 | 1-656 |
| HACAA03 | 490 | 924513 | AC010248 | 2000 | 1-1183 |
| HABGA24 | 491 | 676827 | AL121926 | 2001 | 1-203 |
| | | | | | 1830-1953 |
| | | | | | 2743-2933 |
| | | | | | 3071-3533 |
| | | | | | 4061-4265 |
| | | | | | 5066-5270 |
| | | | | | 5371-6058 |
| | | | | | 6482-6626 |
| | | | | | 6816-6942 |
| | | | | | 7029-7116 |
| | | | | | 7408-7737 |
| HABGA24 | 491 | 676827 | AL121926 | 2002 | 1-101 |
| HABGA24 | 491 | 676827 | AL121926 | 2003 | 1-463 |

[0059] Table 1B summarizes additional polynucleotides encompassed by the invention (including cDNA clones related to the sequences (Clone ID NO:Z), contig sequences (contig identifier (Contig ID:) contig nucleotide sequence identifiers (SEQ ID NO:X)), and genomic sequences (SEQ ID NO:B). The first column provides a unique clone identifier, “Clone ID NO:Z”, for a cDNA clone related to each contig sequence. The second column provides the sequence identifier, “SEQ ID NO:X”, for each contig sequence. The third column provides a unique contig identifier, “Contig ID:” for each contig sequence. The fourth column, provides a BAC identifier “BAC ID NO:A” for the BAC clone referenced in the corresponding row of the table. The fifth column provides the nucleotide sequence identifier, “SEQ ID NO:B” for a fragment of the BAC clone identified in column four of the corresponding row of the table. The sixth column, “Exon From-To”, provides the location (i.e., nucleotide position numbers) within the polynucleotide sequence of SEQ ID NO:B which delineate certain polynucleotides of the invention that are also exemplary members of polynucleotide sequences that encode polypeptides of the invention (e.g., polypeptides containing amino acid sequences encoded by the polynucleotide sequences delineated in column six, and fragments and variants thereof).

TABLE 2

| | | SEQ | | | | Score/ | | |
|---|---|---|---|---|---|---|---|---|
| Clone ID | Contig | ID | Analysis | | PFam/NR Accession | Percent | NT | NT |
| NO: Z | ID: | NO: X | Method | PFam/NR Description | Number | Identity | From | To |
| HACAD23 | 926345 | 12 | blastx.2 | (AF123591) fertilization | gb\|AAD23572.1\|AF1 | 40% | 75 | 413 |
| | | | | envelope outer layer | 23591_1 | 52% | 373 | 441 |
| | | | | protein [Cyprinus carpio] | | | | |
| HACAD23 | 926346 | 492 | blastx.14 | VMO-I [Gallus gallus] | gi\|487906\|dbj\|BAA05 | 46% | 97 | 174 |
| | | | | | 086.1\| | 58% | 298 | 333 |
| | | | | | | 66% | 175 | 201 |
| HACBA49 | 722875 | 14 | blastx.2 | (AE000303) orf, | gb\|AAC75206.1\| | 60% | 426 | 214 |
| | | | | hypothetical protein | | | | |
| | | | | [Eseherichia coli] | | | | |
| HADCK83 | 609846 | 20 | blastx.2 | (AF010144) neuronal | gb\|AAC08737.1\| | 74% | 597 | 424 |
| | | | | thread protein AD7c-NTP | | 76% | 585 | 436 |
| | | | | [Homo sapiens] | | 86% | 446 | 402 |
| HADCQ37 | 970564 | 27 | blastx.2 | (AF064748) S3-12 [Mus | gb\|AAC23666.1\| | 55% | 56 | 547 |
| | | | | musculus] | | 55% | 56 | 547 |
| | | | | | | 54% | 56 | 547 |
| | | | | | | 53% | 56 | 547 |
| | | | | | | 54% | 56 | 547 |
| | | | | | | 51% | 56 | 586 |
| | | | | | | 53% | 56 | 547 |
| | | | | | | 50% | 56 | 586 |
| | | | | | | 54% | 56 | 547 |
| | | | | | | 53% | 56 | 547 |
| | | | | | | 50% | 56 | 586 |
| | | | | | | 53% | 56 | 547 |
| | | | | | | 51% | 53 | 547 |
| | | | | | | 52% | 56 | 547 |
| | | | | | | 53% | 56 | 523 |
| | | | | | | 48% | 56 | 586 |
| | | | | | | 48% | 56 | 586 |
| | | | | | | 47% | 53 | 586 |
| | | | | | | 49% | 56 | 547 |
| | | | | | | 46% | 56 | 586 |
| | | | | | | 47% | 56 | 547 |
| | | | | | | 46% | 56 | 586 |
| | | | | | | 46% | 56 | 586 |
| | | | | | | 49% | 56 | 526 |
| | | | | | | 50% | 143 | 547 |
| | | | | | | 48% | 56 | 418 |
| | | | | | | 46% | 56 | 415 |
| | | | | | | 38% | 56 | 418 |
| | | | | | | 40% | 499 | 711 |
| | | | | | | 41% | 517 | 711 |
| | | | | | | 41% | 517 | 711 |
| | | | | | | 39% | 493 | 711 |
| | | | | | | 39% | 493 | 711 |
| | | | | | | 45% | 517 | 696 |
| | | | | | | 43% | 517 | 711 |
| | | | | | | 45% | 517 | 696 |
| | | | | | | 43% | 517 | 696 |
| | | | | | | 45% | 517 | 696 |
| | | | | | | 43% | 517 | 696 |
| | | | | | | 43% | 517 | 696 |
| | | | | | | 43% | 517 | 696 |
| | | | | | | 40% | 517 | 711 |
| | | | | | | 41% | 517 | 696 |
| | | | | | | 45% | 517 | 696 |
| | | | | | | 40% | 517 | 711 |
| | | | | | | 41% | 517 | 696 |
| | | | | | | 46% | 517 | 702 |
| | | | | | | 43% | 517 | 696 |
| | | | | | | 43% | 517 | 696 |
| | | | | | | 43% | 517 | 696 |
| | | | | | | 40% | 517 | 696 |
| | | | | | | 36% | 517 | 696 |
| HADCU18 | 666360 | 28 | blastx.2 | (AF064748) S3-12 [Mus | gb\|AAC23666.1\| | 53% | 17 | 400 |
| | | | | musculus] | | | | |
| HADDF89 | 786876 | 34 | blastx.2 | (AK000496) unnamed | dbj\|BAA91205.1\| | 78% | 115 | 2 |
| | | | | protein product [Homo | | | | |
| | | | | sapiens] | | | | |
| HADDQ25 | 849002 | 35 | blastx.2 | (AF090942) PRO0657 | gb\|AAF24054.1\|AF0 | 65% | 374 | 279 |
| | | | | [Homo sapiens] | 90942_1 | | | |
| HADFG58 | 727536 | 37 | blastx.2 | zinc finger protein [Homo | gb\|AAA59469.1\| | 65% | 210 | 296 |
| | | | | sapiens] | | 32% | 76 | 186 |
| | | | | | | 32% | 76 | 186 |
| | | | | | | 46% | 32 | 70 |
| HADFX35 | 675830 | 39 | blastx.2 | (AK000496) unnamed | dbj\|BAA91205.1\| | 65% | 353 | 171 |
| | | | | protein product [Homo | | 66% | 448 | 386 |
| | | | | sapiens] | | | | |
| HADGR61 | 848971 | 43 | blastx.2 | (AJ223366) hypothetical | emb\|CAB65727.1\| | 85% | 210 | 368 |
| | | | | protein [Homo sapiens] | | 97% | 2 | 124 |
| | | | | | | 45% | 109 | 213 |
| | | | | | | 58% | 47 | 82 |
| HARND80 | 864604 | 56 | blastx.2 | (AF096286) pecanex 1 | gb\|AAF21809.1\|AF0 | 78% | 30 | 572 |
| | | | | [Mus musculus] | 96286_1 | | | |
| HBIOS05 | 930776 | 66 | HMMER | PFAM: Zinc finger, C2H2 | PF00096 | 10.54 | 168 | 230 |
| | | | 1.8 | type | | | | |
| HERAC92 | 973454 | 69 | blastx.2 | (AK000385) unnamed | db\|BAA91131.1\| | 61% | 503 | 387 |
| | | | | protein product [Homo | | 90% | 367 | 305 |
| | | | | sapiens] | | | | |
| HERAJ78 | 973676 | 74 | blastx.2 | reverse transcriptase | gb\|AAB02291.1\| | 44% | 84 | 494 |
| | | | | [Homo sapiens] | | | | |
| HFEAN43 | 524355 | 85 | blastx.2 | (AF161356) HSPC093 | gb\|AAF28916.1\|AF1 | 41% | 100 | 285 |
| | | | | [Homo sapiens] | 61356_1 | 64% | 71 | 121 |
| HFEAO67 | 954402 | 86 | blastx.2 | similarto | dbj\|BAA11482.1\| | 84% | 15 | 344 |
| | | | | Schizosaceharomyces | | | | |
| | | | | pombe cut1 + protein | | | | |
| | | | | which 1 | | | | |
| HFEBB35 | 974535 | 90 | blastx.2 | (AL096881) hypothetical | emb\|CAB51405.1\| | 68% | 58 | 306 |
| | | | | protein [Homo sapiens] | | | | |
| HKAAU11 | 966953 | 97 | blastx.2 | (AF198489) LBP-32 | gb\|AAF32276.1\|AF1 | 62% | 179 | 397 |
| | | | | [Homo sapiens] | 98489_1 | | | |
| HKABR48 | 702372 | 99 | blastx.2 | (AK000207) unnamed | dbj\|BAA91009.1\| | 35% | 321 | 821 |
| | | | | protein product [Homo | | | | |
| | | | | sapiens] | | | | |
| HKACU93 | 908022 | 104 | blastx.2 | (AF156272) RING finger | gb\|AAD40287.1\| | 26% | 62 | 436 |
| | | | | protein terf [Rattus | | 57% | 3 | 101 |
| | | | | norvegicus] | | 48% | 438 | 530 |
| | | | | | | 38% | 21 | 74 |
| HKADC82 | 944994 | 106 | blastx.2 | (AF155511) KX antigen | gb\|AAF14527.1\|AF1 | 30% | 188 | 526 |
| | | | | [Mus musculus] | 55511_1 | 47% | 3 | 185 |
| HKADP74 | 765535 | 107 | blastx.2 | (AF063308) coiled-coil | gb\|AAD02813.1\| | 68% | 90 | 548 |
| | | | | related protein DEEPEST | | | | |
| | | | | [Homo sapiens] | | | | |
| HKAFO42 | 713722 | 113 | blastx.2 | (AF118082) PRO1902 | gb\|AAF22026.1\|AF1 | 65% | 2 | 79 |
| | | | | [Homo sapiens] | 18094_21 | 52% | 79 | 135 |
| HKAHF84 | 887386 | 115 | blastx.2 | (AF095719) | gb\|AAF23230.1\|AF0 | 96% | 3 | 329 |
| | | | | carboxypeptidase A3 | 95719_1 | | | |
| | | | | [Homo sapiens] | | | | |
| HKAJW52 | 836587 | 123 | blastx.2 | (AF154107) UDP- | gb\|AAF15313.1\|AF1 | 100% | 16 | 171 |
| | | | | GalNAc: polypeptide 1 | 54107_1 | | | |
| HKAOE10 | 963543 | 127 | blastx.2 | (AF090931) PRO0483 | gb\|AAF24046.1\|AF0 | 65% | 109 | 5 |
| | | | | [Homo sapiens] | 90931_1 | | | |
| HKAON82 | 779247 | 129 | blastx.2 | (AL030998) dJ466I8.1 | emb\|CAA19742.1\| | 55% | 402 | 154 |
| | | | | (Coagulation Factor V | | 43% | 402 | 154 |
| | | | | (Activated Protein 1 1 | | | | |
| HKAPN78 | 973220 | 131 | blastx.2 | (AK000385) unnamed | dbj\|BAA91131.1\| | 67% | 274 | 56 |
| | | | | protein product [Homo | | | | |
| | | | | sapiens] | | | | |
| HOUCS91 | 526717 | 138 | blastx.2 | (AF090930) PRO0478 | gb\|AAF24045.1\|AF0 | 79% | 250 | 351 |
| | | | | [Homo sapiens] | 90930_1 | | | |
| HOUDX25 | 524248 | 142 | blastx.2 | (AE000218) orf, | gb\|AAC74280.1\| | 100% | 146 | 241 |
| | | | | hypothetical protein | | 89% | 61 | 144 |
| | | | | [Escherichia coli] | | | | |
| HOUFB87 | 837251 | 144 | blastx.2 | (AK000496) unnamed | dbj\|BAA91205.1\| | 67% | 690 | 430 |
| | | | | protein product [Homo | | | | |
| | | | | sapiens] | | | | |
| HOUFZ64 | 750784 | 151 | blastx.2 | (AK001264) unnamed | dbj\|BAA91588.1\| | 93% | 3 | 98 |
| | | | | protein product [Homo | | | | |
| | | | | sapiens] | | | | |
| HSTAZ54 | 508368 | 171 | blastx.2 | (AK001797) unnamed | dbj\|BAA919l7.1\| | 94% | 232 | 336 |
| | | | | protein product [Homo | | | | |
| | | | | sapiens] | | | | |
| HSTBC04 | 506961 | 172 | blastx.2 | ranbp3-a [Homo sapiens] | emb\|CAA69956.1\| | 100% | 128 | 289 |
| HWDAO26 | 679520 | 179 | blastx.2 | cysteine rich hair keratin | emb\|CAA56339.1\| | 35% | 143 | 400 |
| | | | | associated protein | | 28% | 50 | 325 |
| | | | | [Oryctolagus cuniculus] | | 35% | 143 | 376 |
| | | | | | | 37% | 197 | 376 |
| | | | | | | 35% | 206 | 400 |
| | | | | | | 46% | 391 | 435 |
| HWDAS64 | 729159 | 182 | HMMER | PFAM: Intermediate | PF00038 | 26.4 | 258 | 374 |
| | | | 2.1.1 | filament proteins | | | | |
| | | | blastx.2 | (AB012033) keratin 6 | dbj\|BAA34178.1\| | 58% | 261 | 476 |
| | | | | alpha [Mus musculus] | | | | |
| HWEAD11 | 965030 | 184 | blastx.2 | (AK000464) unnamed | dbj\|BAA91183.1\| | 97% | 85 | 216 |
| | | | | protein product [Homo | | | | |
| | | | | sapiens] | | | | |
| HWHGW34 | 670622 | 190 | blastx.2 | keratin 1 [Homo sapiens] | gb\|AAB47721.1\| | 60% | 311 | 424 |
| | | | | | | 82% | 197 | 247 |
| HWHPF60 | 675703 | 195 | blastx.2 | (AK000597) unnamed | dbj\|BAA91278.1\| | 74% | 556 | 828 |
| | | | | protein product [Homo | | 43% | 447 | 812 |
| | | | | sapiens] | | | | |
| HWHQI82 | 739230 | 199 | blastx.2 | (AC007059) Human | gb\|AAD19818.1\| | 100% | 1 | 159 |
| | | | | homolog of Mus musculus | | 92% | 177 | 215 |
| | | | | wizL protein [AA 4-1561] | | | | |
| | | | | [Homo sapiens] | | | | |
| HWHQO07 | 952660 | 200 | blastx.2 | (AF118086) PRO1992 | gb\|AAF22030.1\|AF1 | 61% | 132 | 245 |
| | | | | [Homo sapiens] | 18094_25 | | | |
| HWHQO33 | 670190 | 201 | blastx.2 | BIIIB4 high-sulfur keratin | gb\|AAA31543.1\| | 71% | 51 | 326 |
| | | | | [Ovis aries] | | | | |
| HWHQX77 | 771865 | 207 | blastx.2 | (AK000385) unnamed | dbj\|BAA91131.1\| | 80% | 104 | 238 |
| | | | | protein product [Homo | | 64% | 9 | 110 |
| | | | | sapiens] | | | | |
| HWHRA44 | 716334 | 211 | blastx.2 | (AF090894) PRO0113 | gb\|AAF24018.1\|AF0 | 66% | 48 | 182 |
| | | | | [Homo sapiens] | 90894_1 | | | |
| HWJAC59 | 761620 | 213 | HMMER | PFAM: Core histones | PF00125 | 10.11 | 47 | 106 |
| | | | 1.8 | H2A, H2B, H3 and H4 | | | | |
| HWHQL26 | 694021 | 221 | blastx.2 | zinc finger = ZNF126 | gb\|AAB24881.1\| | 50% | 142 | 246 |
| | | | | [human, Peptide Partial, | | 45% | 257 | 322 |
| | | | | 98 aa] [Homo sapiens] | | | | |
| HWHPO68 | 752782 | 228 | blastx.2 | (AB026833) chlorided | bjj\|BAA77810.1\| | 90% | 126 | 497 |
| | | | | channel protein [Homo | | 100% | 1 | 126 |
| | | | | sapiens] | | | | |
| HWHPK51 | 725456 | 232 | blastx.2 | (AK001660) unnamed | dbj\|BAA91819.1\| | 96% | 156 | 245 |
| | | | | protein product [Homo | | 100% | 251 | 289 |
| | | | | sapiens] | | | | |
| HWHGY56 | 733124 | 249 | blastx.2 | (AL080149) hypothetical | emb\|CAB45742.1\| | 79% | 77 | 253 |
| | | | | protein [Homo sapiens] | | 69% | 285 | 398 |
| | | | | | | 100% | 3 | 23 |
| HWHGW72 | 945692 | 250 | HMMER | PFAM: ATP P2X receptor | PF00864 | 438.5 | 247 | 855 |
| | | | 2.1.1 | | | | | |
| | | | blastx.2 | (AF190822) P2X2A | gb\|AAF19170.1\|AF1 | 91% | 190 | 939 |
| | | | | receptor [Homo sapiens] | 90822_1 | | | |
| HWHGF95 | 947019 | 253 | HMMER | PFAM: Trypsin | PF00089 | 309.92 | 56 | 724 |
| | | | 1.8 | | | | | |
| | | | blastx.2 | (AF135026) kallikrein- | gb\|AAD26427.2\|AF1 | 93% | 35 | 742 |
| | | | | like protein 3 KLK-L3 | 35026_1 | | | |
| | | | | [Homo sapiens] | | | | |
| HWHGE01 | 915933 | 254 | blastx.2 | (AK001510) unnamed | dbj\|BAA91730.1\| | 100% | 2 | 280 |
| | | | | protein product [Homo | | | | |
| | | | | sapiens] | | | | |
| HWHGC57 | 942388 | 256 | HMMER | PFAM: Cadherin | PF00028 | 40.03 | 59 | 253 |
| | | | 1.8 | | | | | |
| | | | blastx.2 | (AK000054) unnamed | dbj\|BAA90911.1\| | 39% | 71 | 499 |
| | | | | protein product [Homo | | 36% | 122 | 409 |
| | | | | sapiens] | | 35% | 493 | 603 |
| | | | | | | 43% | 490 | 600 |
| | | | | | | 39% | 490 | 588 |
| | | | | | | 42% | 600 | 662 |
| HWHGB85 | 889955 | 257 | blastx.2 | (AF161511) HSPC162 | gb\|AAF29126.1\|AF1 | 98% | 385 | 618 |
| | | | | [Homo sapiens] | 61511_1 | | | |
| HWFBB09 | 575533 | 262 | blastx.2 | (AF118082) PRO1902 | gb\|AAF22026.1\|AF1 | 63% | 3 | 158 |
| | | | | [Homo sapiens] | 18094_21 | | | |
| HWFAD84 | 504489 | 264 | blastx.2 | (AK002129) unnamed | dbj\|BAA92096.1\| | 70% | 152 | 262 |
| | | | | protein product [Homo | | | | |
| | | | | sapiens] | | | | |
| HWDAY07 | 952441 | 268 | blastx.2 | (AF174605) F-box protein | gb\|AAF04526.1\|AF1 | 96% | 285 | 995 |
| | | | | Fbx25 [Homo sapiens] | 74605_1 | 97% | 181 | 285 |
| HWDAS21 | 670233 | 269 | blastx.2 | repressor transcriptional | gb\|AAA79179.1\| | 48% | 516 | 1 |
| | | | | factor [Homo sapiens] | | 53% | 516 | 88 |
| | | | | | | 50% | 516 | 88 |
| | | | | | | 58% | 516 | 169 |
| | | | | | | 59% | 516 | 175 |
| | | | | | | 56% | 516 | 169 |
| | | | | | | 51% | 516 | 88 |
| | | | | | | 48% | 516 | 94 |
| | | | | | | 51% | 516 | 88 |
| | | | | | | 56% | 516 | 175 |
| | | | | | | 50% | 516 | 151 |
| | | | | | | 56% | 516 | 187 |
| | | | | | | 49% | 516 | 175 |
| | | | | | | 41% | 450 | 88 |
| | | | | | | 29% | 498 | 88 |
| HWDAD40 | 881233 | 277 | blastx.2 | (AK000284) unnamed | dbj\|BAA91053.1\| | 98% | 445 | 293 |
| | | | | protein product [Homo | | | | |
| | | | | sapiens] | | | | |
| HSTAO59 | 908993 | 279 | HMMER | PFAM: Zinc finger, C2H2 | PF00096 | 55.2 | 271 | 339 |
| | | | 2.1.1 | type | | | | |
| | | | blastx.2 | Zfp64 [Mus musculus] | gb\|AAC53039.1\| | 78% | 1 | 342 |
| | | | | | | 40% | 10 | 339 |
| | | | | | | 42% | 58 | 342 |
| | | | | | | 40% | 64 | 333 |
| | | | | | | 36% | 1 | 333 |
| | | | | | | 35% | 1 | 339 |
| | | | | | | 65% | 329 | 442 |
| | | | | | | 38% | 356 | 433 |
| | | | | | | 41% | 353 | 424 |
| | | | | | | 29% | 353 | 424 |
| | | | | | | 30% | 103 | 186 |
| HSTAH84 | 783227 | 280 | blastx.2 | Pro-Pol-dUTPase | emb\|CAA73251.1\| | 40% | 11 | 226 |
| | | | | polyprotein [Mus | | 50% | 231 | 335 |
| | | | | musculus] | | 70% | 296 | 355 |
| HOUET93 | 792495 | 291 | blastx.2 | (AE000413) putative | gb\|AAC76395.1\| | 85% | 20 | 202 |
| | | | | amino acid/amine | | | | |
| | | | | transport protein | | | | |
| | | | | [Escherichia coli] | | | | |
| HOUEK01 | 965449 | 295 | blastx.2 | (AL049730) putative | emb\|CAB53752.1\| | 66% | 469 | 293 |
| | | | | protein [Arabidopsis | | 54% | 515 | 450 |
| | | | | thaliana] | | | | |
| HOUDR29 | 576473 | 298 | blastx.2 | (AF090944) PRO0663 | gb\|AAF24056.1\|AF0 | 86% | 176 | 66 |
| | | | | [Homo sapiens] | 90944_1 | | | |
| HOUCR25 | 559993 | 301 | blastx.2 | put. ORF [Homo sapiens] | emb\|CAA39297.1\| | 58% | 46 | 204 |
| HOUAF65 | 526540 | 306 | blastx.2 | (AK000844) unnamed | dbj\|BAA91396.1\| | 66% | 58 | 165 |
| | | | | protein product [Homo | | | | |
| | | | | sapiens] | | | | |
| HLIBE40 | 887417 | 311 | blastx.2 | (AF067660) Bcl-2 | gb\|AAC83150.1] | 64% | 318 | 434 |
| | | | | homolog [Mus museums] | | 35% | 136 | 339 |
| | | | | | | 42% | 77 | 139 |
| HKAOO90 | 934020 | 313 | blastx.2 | (AK001750) unnamed | dbj\|BAA9l88l.1\| | 81% | 3 | 629 |
| | | | | protein product [Homo | | | | |
| | | | | sapiens] | | | | |
| HKAIK82 | 779306 | 317 | blastx.2 | (AF161356) HSPC093 | gb\|AAF28916.1\|AF1 | 64% | 355 | 471 |
| | | | | [Homo sapiens] | 61356_1 | 69% | 559 | 597 |
| | | | | | | 58% | 500 | 550 |
| HKAHI69 | 916528 | 319 | blastx.2 | (AF083110) sirtuin type 5 | gb\|AAD4O853.1\|AF0 | 73% | 272 | 634 |
| | | | | [Homo sapiens] | 83110_1 | | | |
| HKAHA10 | 857339 | 321 | blastx.2 | (AK001527) unnamed | dbj\|BAA91741.1\| | 59% | 19 | 195 |
| | | | | protein product [Homo | | 59% | 192 | 272 |
| | | | | sapiens] | | 42% | 242 | 325 |
| HKAGC23 | 912677 | 322 | blastx.2 | rab18 [Mus musculus] | emb\|CAA56583.1\| | 97% | 69 | 170 |
| HKAFD03 | 924048 | 326 | blastx.2 | (AF113685) PRO0974 | gb\|AAF29584.I\|AF1 | 49% | 519 | 319 |
| | | | | [Homo sapiens] | 13685_1 | | | |
| HKAEG61 | 925951 | 328 | HMMER | PFAM: Laminin B | PF00052 | 0.46 | 343 | 278 |
| | | | 1.8 | (Domain IV) | | | | |
| | | | blastx.2 | Eps8 [Mus musculus] | gb\|AAA16358.1\| | 44% | 348 | 118 |
| | | | | | | 36% | 449 | 342 |
| HKADR84 | 800106 | 329 | blastx.2 | (AK002148) unnamed | dbj\|BAA92109.1\| | 97% | 172 | 279 |
| | | | | protein product [Homo | | | | |
| | | | | sapiens] | | | | |
| HKADP50 | 971356 | 330 | HMMER | PFAM: PLAT/LH2 | PF01477 | 108.4 | 291 | 635 |
| | | | 2.1.1 | domain | | | | |
| | | | blastx.2 | lipoxygenase-3 [Mus | emb\|CAB46101.1\| | 86% | 288 | 668 |
| | | | | musculus] | | 81% | 736 | 1089 |
| | | | | | | 81% | 668 | 748 |
| | | | | | | 37% | 853 | 939 |
| | | | | | | 61% | 1094 | 1147 |
| HKADO84 | 911567 | 332 | blastx.2 | (AL117537) hypothetical | emb\|CAB55983.1\| | 48% | 4 | 252 |
| | | | | protein [Homo sapiens] | | | | |
| HKACP23 | 881718 | 339 | blastx.2 | (AK000363) unnamed | dbj\|BAA91112.1\| | 77% | 3 | 431 |
| | | | | protein product [Homo | | | | |
| | | | | sapiens] | | | | |
| HKACO69 | 614156 | 340 | blastx.2 | (AF037261)SH3- | gb\|AAC09244.1\| | 74% | 106 | 303 |
| | | | | containing adaptor | | 78% | 9 | 65 |
| | | | | molecule-1 [Homo | | | | |
| | | | | sapiens] | | | | |
| HKACL83 | 881711 | 342 | blastx.2 | actin filament protein | gb\|AAA67326.1l | 57% | 4 | 318 |
| | | | | [Gallus gallus] | | 58% | 481 | 573 |
| HFEBJ61 | 576092 | 356 | blastx.2 | reverse transcriptase | gb\|AAC64414.1\| | 56% | 211 | 321 |
| | | | | [Peromyscus leucopus] | | 51% | 74 | 154 |
| | | | | | | 50% | 326 | 355 |
| | | | | | | 36% | 153 | 209 |
| HFEAJ78 | 855319 | 362 | blastx.2 | (AF010144) neuronal | gb\|AAC08737.1\| | 69% | 498 | 352 |
| | | | | thread protein AD7c-NTP | | | | |
| | | | | [Homo sapiens] | | | | |
| HFEAI49 | 722129 | 364 | blastx.2 | keratin type I [Homo | emb\|CAA76386.1\| | 100% | 1 | 105 |
| | | | | sapiens] | | | | |
| HERAS69 | 974532 | 370 | blastx.2 | unknown protein [Homo | gb\|AAA88036.1\| | 42% | 369 | 229 |
| | | | | sapiens] | | 66% | 482 | 447 |
| | | | | | | 26% | 199 | 122 |
| | | | | | | 40% | 233 | 189 |
| HERAH85 | 928415 | 380 | blastx.2 | (AK000385) unnamed | dbj\|BAA91131.1\| | 78% | 185 | 337 |
| | | | | protein product [Homo | | 84% | 321 | 419 |
| | | | | sapiens] | | | | |
| HERAD26 | 520370 | 388 | blastx.2 | (AF090895) PRO0117 | gb\|AAF24019.1\|AF0 | 76% | 63 | 188 |
| | | | | [Homo sapiens] | 90895_1 | 66% | 316 | 342 |
| HBIOZ10 | 973131 | 393 | HMMER | PFAM: Eukaryotic protein | PF00069 | 121.1 | 3 | 365 |
| | | | 1.8 | kinase domain | | | | |
| | | | blastx.2 | (AF003134) strong | gb\|AAB54139.1\| | 60% | 3 | 305 |
| | | | | similarity to the | | | | |
| | | | | CDC2/CDX subfamily of | | | | |
| | | | | ser/thr protein kinases | | | | |
| | | | | [Caenorhabditis elegans] | | | | |
| HBIOM94 | 973137 | 396 | HMMER | PFAM: Ank repeat | PF00023 | 37.4 | 476 | 574 |
| | | | 2.1.1 | | | | | |
| | | | blastx.2 | contains 10 ankyrin-like | gb\|AAC96986.1\| | 33% | 479 | 757 |
| | | | | repeats; similar to human | | 31% | 291 | 482 |
| | | | | ankyrin, 1 bursaria | | 25% | 786 | 962 |
| | | | | Chiorella virus 1] | | 29% | 285 | 467 |
| HAWAY15 | 829255 | 405 | blastx.2 | (AK001675) unnamed | dbj\|BAA9l828.1\| | 98% | 130 | 363 |
| | | | | protein product [Homo | | 66% | 78 | 113 |
| | | | | sapiens] | | 100% | 70 | 90 |
| HARMM53 | 854369 | 418 | blastx.2 | zinc finger protein [Rattus | emb\|CAA42610.1\| | 96% | 188 | 427 |
| | | | | norvegicus] | | 82% | 1 | 123 |
| | | | | | | 80% | 426 | 515 |
| HADFW06 | 935340 | 429 | blastx.2 | (AF118082) PRO1902 | gb\|AAF22026.1\|AF1 | 64% | 172 | 5 |
| | | | | [Homo sapiens] | 18094_21 | 73% | 228 | 172 |
| HADFD69 | 754277 | 434 | blastx.2 | (AF155115) NY-REN-58 | gb\|AAD42881.1\|AF1 | 88% | 1 | 459 |
| | | | | antigen [Homo sapiens] | 55115_1 | | | |
| HADFB60 | 740318 | 436 | blastx.2 | (AF036705) Similar to | gb\|AAB95172.1\| | 59% | 190 | 411 |
| | | | | phytoene desaturase; | | 64% | 395 | 433 |
| | | | | coded for by C. 11 cDNA | | | | |
| | | | | yk303f4.5; coded for by | | | | |
| | | | | C. elegans cDNA | | | | |
| | | | | yk257d4.5; coded for | | | | |
| HADFB08 | 959273 | 438 | HMMER | PFAM: Src homology | PF00018 | 2.83 | 158 | 202 |
| | | | 1.8 | domain 3 | | | | |
| HADET68 | 906389 | 442 | blastx.2 | EGF repeat | gb\|AAB01338.1\| | 92% | 768 | 655 |
| | | | | transmembrane protein | | 54% | 169 | 137 |
| | | | | [Mus musculus] | | | | |
| HADDS21 | 670802 | 444 | blastx.2 | ZZ:beta-Gal′IgG-binding | gb\|AAB00807.1\| | 95% | 86 | 226 |
| | | | | fusion protein | | | | |
| | | | | [unidentified cloning 1 | | | | |
| HADDS07 | 849000 | 445 | blastx.2 | (AF113685) PR00974 | gb\|AAF29584.1\|AFI | 54% | 49 | 231 |
| | | | | [Homo sapiens] | 13685_1 | 70% | 234 | 305 |
| | | | | | | 57% | 24 | 80 |
| HADDI89 | 865278 | 449 | blastx.2 | (AF118086) PRO1992 | gb\|AAF22030.1\|AF1 | 77% | 14 | 67 |
| | | | | [Homo sapiens] | 18094_25 | 78% | 184 | 225 |
| HADDE15 | 952542 | 453 | blastx.2 | (AC018849) putative N- | gb\|AAF27136.1\|AC0 | 46% | 17 | 715 |
| | | | | terminal acetyltransferase | 18849_24 | | | |
| | | | | [Arabidopsis thaliana] | | | | |
| HADCZ08 | 959304 | 462 | blastx.2 | (AK002129) unnamed | dbj\|BAA92096.1\| | 73% | 252 | 365 |
| | | | | protein product [Homo | | | | |
| | | | | sapiens] | | | | |
| HACBW76 | 849054 | 480 | blastx.2 | (AF161356) HSPC093 | gb\|AAF28916.1\|AF1 | 45% | 404 | 225 |
| | | | | [Homo sapiens] | 61356_1 | 44% | 498 | 397 |
| HACBU26 | 683006 | 481 | blastx.2 | (AF083384) 45kDa | gb\|AAC64085.1\| | 100% | 194 | 409 |
| | | | | splicing factor; SPF 45 | | 88% | 545 | 652 |
| | | | | [Homo sapiens] | | | | |
| HACBJ83 | 875263 | 484 | blastx.2 | (AF126164) alternative | gb\|AAD33289.1\|AF1 | 77% | 126 | 350 |
| | | | | HHLA3 protein [Homo | 26164_1 | | | |
| | | | | sapiens] | | | | |
| HACBH42 | 933951 | 486 | blastx.2 | (AF124251) SH2- | gb\|AAD28246.1\|AF1 | 54% | 47 | 427 |
| | | | | containing protein Nsp3 | 24251_1 | 100% | 1 51 | |
| | | | | [Homo sapiens] | | | | |
| HACBB13 | 698800 | 487 | blastx.2 | (AK001782) unnamed | dbj\|BAA91907.1\| | 78% | 425 | 216 |
| | | | | protein product [Homo | | | | |
| | | | | sapiens] | | | | |
| HABGA24 | 676827 | 491 | blastx.2 | (AJ245600) hypothetical | emb\|CAB53247.1\| | 98% | 17 | 175 |
| | | | | protein [Homo sapiens] | | | | |

[0060] Table 2 further characterizes certain encoded polypeptides of the invention, by providing the results of comparisons to protein and protein family databases. The first column provides a unique clone identifier, “Clone ID NO:”, corresponding to a cDNA clone disclosed in Table 1A. The second column provides the unique contig indentifier, “Contig ID:” which allows correlation with the information in Table 1A. The third column provides the sequence identifier, “SEQ ID NO:X”, for the contig polynucleotide sequences. The fourth column provides the analysis method by which the homology/identity disclosed in the row was determined. The fifth column provides a description of PFam/NR hits having significant matches identified by each analysis. Column six provides the accession number of the PFam/NR hit disclosed in the fifth column. Column seven, “Score/Percent Identity”, provides a quality score or the percent identity, of the hit disclosed in column five. Comparisons were made between polypeptides encoded by polynucleotides of the invention and a non-redundant protein idatabase (herein referred to as “NR”), or a database of protein families (herein referred to as “PFam”), as described below.

[0061] The NR database, which comprises the NBRF PIR database, the NCBI GenPept database, and the SIB SwissProt and TrEMBL databases, was made non-redundant using the computer program nrdb2 (Warren Gish, Washington University in Saint Louis). Each of the polynucleotides shown in Table 1A, column 3 (e.g., SEQ ID NO:X or the ‘Query’ sequence) was used to search against the NR database. The computer program BLASTX was used to compare a 6-frame translation of the Query sequence to the NR database (for information about the BLASTX algorithm please see Altshul et al., J. Mol. Biol. 215:403-410 (1990), and Gish et al., Nat. Genet. 3:266-272 (1993)). A description of the sequence that is most similar to the Query sequence (the highest scoring ‘Subject’) is shown in column five of Table 2 and the database accession number for that sequence is provided in column six. The highest scoring ‘Subject’ is reported in Table 2 if (a) the estimated probability that the match occurred by chance alone is less than 1.0e-07, and (b) the match was not to a known repetitive element. BLASTX returns alignments of short polypeptide segments of the Query and Subject sequences which share a high degree of similarity; these segments are known as High-Scoring Segment Pairs or HSPs. Table 2 reports the degree of similarity between the Query and the Subject for each HSP as a percent identity in Column 7. The percent identity is determined by dividing the number of exact matches between the two aligned sequences in the HSP, dividing by the number of Query amino acids in the HSP and multiplying by 100. The polynucleotides of SEQ ID NO:X which encode the polypeptide sequence that generates an HSP are delineated by columns 8 and 9 of Table 2.

[0062] The PFam database, PFam version 5.2, (Sonnhammer et al., Nucl. Acids Res., 26:320-322, (1998)) consists of a series of multiple sequence alignments; one alignment for each protein family. Each multiple sequence alignment is converted into a probability model called a Hidden Markov Model, or HMM, that represents the position-specific variation among the sequences that make up the multiple sequence alignment (see, e.g., R. Durbin et al., Biological sequence analysis: probabilistic models of proteins and nucleic acids, Cambridge University Press, 1998 for the theory of HMMs). The program HMMER version 1.8 (Sean Eddy, Washington University in Saint Louis) was used to compare the predicted protein sequence for each Query sequence (SEQ ID NO:Y in Table 1A) to each of the HMMs derived from PFam version 5.2. A HMM derived from PFam version 5.2 was said to be a significant match to a polypeptide of the invention if the score returned by HMMER 1.8 was greater than 0.8 times the HMMER 1.8 score obtained with the most distantly related known member of that protein family. The description of the PFam family which shares a significant match with a polypeptide of the invention is listed in column 5 of Table 2, and the database accession number of the PFam hit is provided in column 6. Column 7 provides the score returned by HMMER version 1.8 for the alignment. Columns 8 and 9 delineate the polynucleotides of SEQ ID NO:X which encode the polypeptide sequence which shows a significant match to a PFam protein family.

[0063] As mentioned, columns 8 and 9 in Table 2, “NT From” and “NT To”, delineate the polynucleotides of “SEQ ID NO:X” that encode a polypeptide having a significant match to the PFam/NR database as disclosed in the fifth column of Table 2. In one embodiment, the invention provides a protein comprising, or alternatively consisting of, a polypeptide encoded by the polynucleotides of SEQ ID NO:X delineated in columns 8 and 9 of Table 2. Also provided are polynucleotides encoding such proteins, and the complementary strand thereto.

[0064] The nucleotide sequence SEQ ID NO:X and the translated SEQ ID NO:Y are sufficiently accurate and otherwise suitable for a variety of uses well known in the art and described further below. For instance, the nucleotide sequences of SEQ ID NO:X are useful for designing nucleic acid hybridization probes that will detect nucleic acid sequences contained in SEQ ID NO:X or the cDNA contained in Clone ID NO:Z. These probes will also hybridize to nucleic acid molecules in biological samples, thereby enabling immediate applications in chromosome mapping, linkage analysis, tissue identification and/or typing, and a variety of forensic and diagnostic methods of the invention. Similarly, polypeptides identified from SEQ ID NO:Y may be used to generate antibodies which bind specifically to these polypeptides, or fragments thereof, and/or to the polypeptides encoded by the cDNA clones identified in, for example, Table 1A.

[0065] Nevertheless, DNA sequences generated by sequencing reactions can contain sequencing errors. The errors exist as misidentified nucleotides, or as insertions or deletions of nucleotides in the generated DNA sequence. The erroneously inserted or deleted nucleotides cause frame shifts in the reading frames of the predicted amino acid sequence. In these cases, the predicted amino acid sequence diverges from the actual amino acid sequence, even though the generated DNA sequence may be greater than 99.9% identical to the actual DNA sequence (for example, one base insertion or deletion in an open reading frame of over 1000 bases).

[0066] Accordingly, for those applications requiring precision in the nucleotide sequence or the amino acid sequence, the present invention provides not only the generated nucleotide sequence identified as SEQ ID NO:X, and a predicted translated amino acid sequence identified as SEQ ID NO:Y, but also a sample of plasmid DNA containing cDNA Clone ID NO:Z (deposited with the ATCC on Oct. 5, 2000, and receiving ATCC designation numbers PTA 2574 and PTA 2575, deposited with the ATCC on Jan. 5, 2001, having the depositor reference numbers TS-1, TS-2, AC-1, and AC-2; and/or as set forth, for example, in Table 1A, 6 and 7). The nucleotide sequence of each deposited clone can readily be determined by sequencing the deposited clone in accordance with known methods. Further, techniques known in the art can be used to verify the nucleotide sequences of SEQ ID NO:X.

[0067] The predicted amino acid sequence can then be verified from such deposits. Moreover, the amino acid sequence of the protein encoded by a particular clone can also be directly determined by peptide sequencing or by expressing the protein in a suitable host cell containing the deposited human cDNA, collecting the protein, and determining its sequence.

[0068] RACE Protocol for Recovery of Full-length Genes

[0069] Partial cDNA clones can be made full-length by utilizing the rapid amplification of cDNA ends (RACE) procedure described in Frohman, M. A., et al., Proc. Nat'l. Acad. Sci. USA, 85:8998-9002 (1988). A cDNA clone missing either the 5′ or 3′ end can be reconstructed to include the absent base pairs extending to the translational start or stop codon, respectively. In some cases, cDNAs are missing the start codon of translation. The following briefly describes a modification of this original 5′ RACE procedure. Poly A+ or total RNA is reverse transcribed with Superscript II (Gibco/BRL) and an antisense or complementary primer specific to the cDNA sequence. The primer is removed from the reaction with a Microcon Concentrator (Amicon). The first-strand cDNA is then tailed with dATP and terminal deoxynucleotide transferase (Gibco/BRL). Thus, an anchor sequence is produced which is needed for PCR amplification. The second strand is synthesized from the dA-tail in PCR buffer, Taq DNA polymerase (Perkin-Elmer Cetus), an oligo-dT primer containing three adjacent restriction sites (XhoI, SalI and ClaI) at the 5′ end and a primer containing just these restriction sites. This double-stranded cDNA is PCR amplified for 40 cycles with the same primers as well as a nested cDNA-specific antisense primer. The PCR products are size-separated on an ethidium bromide-agarose gel and the region of gel containing cDNA products the predicted size of missing protein-coding DNA is removed. cDNA is purified from the agarose with the Magic PCR Prep kit (Promega), restriction digested with XhoI or SalI, and ligated to a plasmid such as pBluescript SKII (Stratagene) at XhoI and EcoRI sites. This DNA is transformed into bacteria and the plasmid clones sequenced to identify the correct protein-coding inserts. Correct 5′ ends are confirmed by comparing this sequence with the putatively identified homologue and overlap with the partial cDNA clone. Similar methods known in the art and/or commercial kits are used to amplify and recover 3′ ends.

[0070] Several quality-controlled kits are commercially available for purchase. Similar reagents and methods to those above are supplied in kit form from Gibco/BRL for both 5′ and 3′ RACE for recovery of full length genes. A second kit is available from Clontech which is a modification of a related technique, SLIC (single-stranded ligation to single-stranded cDNA), developed by Dumas et al., Nucleic Acids Res., 19:5227-32 (1991). The major differences in procedure are that the RNA is alkaline hydrolyzed after reverse transcription and RNA ligase is used to join a restriction site-containing anchor primer to the first-strand cDNA. This obviates the necessity for the dA-tailing reaction which results in a polyT stretch that is difficult to sequence past.

[0071] An alternative to generating 5′ or 3′ cDNA from RNA is to use cDNA library double-stranded DNA. An asymmetric PCR-amplified antisense cDNA strand is synthesized with an antisense cDNA-specific primer and a plasmid-anchored primer. These primers are removed and a symmetric PCR reaction is performed with a nested cDNA-specific antisense primer and the plasmid-anchored primer.

[0072] RNA Ligase Protocol for Generating the 5′ or 3′ End Sequences to Obtain Full Length Genes

[0073] Once a gene of interest is identified, several methods are available for the identification of the 5′ or 3′ portions of the gene which may not be present in the original cDNA plasmid. These methods include, but are not limited to, filter probing, clone enrichment using specific probes and protocols similar and identical to 5′ and 3′ RACE. While the full length gene may be present in the library and can be identified by probing, a useful method for generating the 5′ or 3′ end is to use the existing sequence information from the original cDNA to generate the missing information. A method similar to 5′ RACE is available for generating the missing 5′ end of a desired full-length gene. (This method was published by Fromont-Racine et al., Nucleic Acids Res., 21(7):1683-1684 (1993)). Briefly, a specific RNA oligonucleotide is ligated to the 5′ ends of a population of RNA presumably containing full-length gene RNA transcript. A primer set containing a primer specific to the ligated RNA oligonucleotide and a primer specific to a known sequence of the gene of interest, is used to PCR amplify the 5′ portion of the desired full length gene which may then be sequenced and used to generate the full length gene. This method starts with total RNA isolated from the desired source, poly A RNA may be used but is not a prerequisite for this procedure. The RNA preparation may then be treated with phosphatase if necessary to eliminate 5′ phosphate groups on degraded or damaged RNA, which may interfere with the later RNA ligase step. The phosphatase, if used, is then inactivated and the RNA is treated with tobacco acid pyrophosphatase in order to remove the cap structure present at the 5′ ends of messenger RNAs. This reaction leaves a 5′ phosphate group at the 5′ end of the cap cleaved RNA which can then be ligated to an RNA oligonucleotide using T4 RNA ligase. This modified RNA preparation can then be used as a template for first strand cDNA synthesis using a gene specific oligonucleotide. The first strand synthesis reaction can then be used as a template for PCR amplification of the desired 5′ end using a primer specific to the ligated RNA oligonucleotide and a primer specific to the known sequence of the connective tissue antigen of interest. The resultant product is then sequenced and analyzed to confirm that the 5′ end sequence belongs to the relevant connective tissue antigen.

[0074] The present invention also relates to vectors or plasmids, which include such DNA sequences, as well as the use of the DNA sequences. The material deposited with the ATCC (deposited with the ATCC on Oct. 5, 2000, and receiving ATCC designation numbers PTA 2574 and PTA 2575; deposited with the ATCC on Jan. 5, 2001, having the depositor reference numbers TS-1, TS-2, AC-1, and AC-2; and/or as set forth, for example, in Table 1A, 6 and 7).is a mixture of cDNA clones derived from a variety of human tissue and cloned in either a plasmid vector or a phage vector, as shown, for example, in Table 7. These deposits are referred to as “the deposits” herein. The tissues from which some of the clones were derived are listed in Table 7, and the vector in which the corresponding cDNA is contained is also indicated in Table 7. The deposited material includes cDNA clones corresponding to SEQ ID NO:X described, for example, in Table 1A (Clone ID NO:Z). A clone which is isolatable from the ATCC Deposits by use of a sequence listed as SEQ ID NO:X, may include the entire coding region of a human gene or in other cases such clone may include a substantial portion of the coding region of a human gene. Furthermore, although the sequence listing may in some instances list only a portion of the DNA sequence in a clone included in the ATCC Deposits, it is well within the ability of one skilled in the art to sequence the DNA included in a clone contained in the ATCC Deposits by use of a sequence (or portion thereof) described in, for example Tables 1A or 2 by procedures hereinafter further described, and others apparent to those skilled in the art.

[0075] Also provided in Table 7 is the name of the vector which contains the cDNA clone. Each vector is routinely used in the art. The following additional information is provided for convenience.

[0076] Vectors Lambda Zap (U.S. Pat. Nos. 5,128,256 and 5,286,636), Uni-Zap XR (U.S. Pat. Nos. 5,128,256 and 5,286,636), Zap Express (U.S. Pat. Nos. 5,128,256 and 5,286,636), pBluescript (pBS) (Short, J. M. et al., Nucleic Acids Res. 16:7583-7600 (1988); Alting-Mees, M. A. and Short, J. M., Nucleic Acids Res. 17:9494 (1989)) and pBK (Alting-Mees, M. A. et al., Strategies 5:58-61 (1992)) are commercially available from Stratagene Cloning Systems, Inc., 11011 N. Torrey Pines Road, La Jolla, Calif., 92037. pBS contains an ampicillin resistance gene and pBK contains a neomycin resistance gene. Phagemid pBS may be excised from the Lambda Zap and Uni-Zap XR vectors, and phagemid pBK may be excised from the Zap Express vector. Both phagemids may be transformed into E. coli strain XL-1 Blue, also available from Stratagene.

[0077] Vectors pSport1, pCMVSport 1.0, pCMVSport 2.0 and pCMVSport 3.0, were obtained from Life Technologies, Inc., P. O. Box 6009, Gaithersburg, Md. 20897. All Sport vectors contain an ampicillin resistance gene and may be transformed into E. coli strain DH10B, also available from Life Technologies. See, for instance, Gruber, C. E., et al., Focus 15:59-(1993). Vector lafinid BA (Bento Soares, Columbia University, New York, N.Y.) contains an ampicillin resistance gene and can be transformed into E. coli strain XL-1 Blue. Vector pCR®2.1, which is available from Invitrogen, 1600 Faraday Avenue, Carlsbad, Calif. 92008, contains an ampicillin resistance gene and may be transformed into E. coli strain DH10B, available from Life Technologies. See, for instance, Clark, J. M., Nuc. Acids Res. 16:9677-9686 (1988) and Mead, D. et al., Bio/Technology 9: (1991).

[0078] The present invention also relates to the genes corresponding to SEQ ID NO:X, SEQ ID NO:Y, and/or the deposited clone (Clone ID NO:Z). The corresponding gene can be isolated in accordance with known methods using the sequence information disclosed herein. Such methods include preparing probes or primers from the disclosed sequence and identifying or amplifying the corresponding gene from appropriate sources of genomic material.

[0079] Also provided in the present invention are allelic variants, orthologs, and/or species homologs. Procedures known in the art can be used to obtain full-length genes, allelic variants, splice variants, full-length coding portions, orthologs, and/or species homologs of connective tissue associated genes corresponding to SEQ ID NO:X or the complement thereof, polypeptides encoded by SEQ ID NO:X or the complement thereof, and/or the cDNA contained in Clone ID NO:Z, using information from the sequences disclosed herein or the clones deposited with the ATCC. For example, allelic variants and/or species homologs may be isolated and identified by making suitable probes or primers from the sequences provided herein and screening a suitable nucleic acid source for allelic variants and/or the desired homologue.

[0080] The polypeptides of the invention can be prepared in any suitable manner. Such polypeptides include isolated naturally occurring polypeptides, recombinantly produced polypeptides, synthetically produced polypeptides, or polypeptides produced by a combination of these methods. Means for preparing such polypeptides are well understood in the art.

[0081] The polypeptides may be in the form of the secreted protein, including the mature form, or may be a part of a larger protein, such as a fusion protein (see below). It is often advantageous to include an additional amino acid sequence which contains secretory or leader sequences, pro-sequences, sequences which aid in purification, such as multiple histidine residues, or an additional sequence for stability during recombinant production.

[0082] The polypeptides of the present invention are preferably provided in an isolated form, and preferably are substantially purified. A recombinantly produced version of a polypeptide, including the secreted polypeptide, can be substantially purified using techniques described herein or otherwise known in the art, such as, for example, by the one-step method described in Smith and Johnson, Gene 67:31-40 (1988). Polypeptides of the invention also can be purified from natural, synthetic or recombinant sources using techniques described herein or otherwise known in the art, such as, for example, antibodies of the invention raised against the connective tissue polypeptides of the present invention in methods which are well known in the art.

[0083] The present invention provides a polynucleotide comprising, or alternatively consisting of, the nucleic acid sequence of SEQ ID NO:X, and/or the cDNA sequence contained in Clone ID NO:Z. The present invention also provides a polypeptide comprising, or alternatively, consisting of, the polypeptide sequence of SEQ ID NO:Y, a polypeptide encoded by SEQ ID NO:X or a complement thereof, a polypeptide encoded by the cDNA contained in Clone ID NO:Z, and/or the polypeptide sequence encoded by a nucleotide sequence in SEQ ID NO:B as defined in column 6 of Table 1B. Polynucleotides encoding a polypeptide comprising, or alternatively consisting of the polypeptide sequence of SEQ ID NO:Y, a polypeptide encoded by SEQ ID NO:X, a polypeptide encoded by the cDNA contained in Clone ID NO:Z and/or a polypeptide sequence encoded by a nucleotide sequence in SEQ ID NO:B as defined in column 6 of Table 1B are also encompassed by the invention. The present invention further encompasses a polynucleotide comprising, or alternatively consisting of, the complement of the nucleic acid sequence of SEQ ID NO:X, a nucleic acid sequence encoding a polypeptide encoded by the complement of the nucleic acid sequence of SEQ ID NO:X, and/or the cDNA contained in Clone ID NO:Z.

[0084] Moreover, representative examples of polynucleotides of the invention comprise, or alternatively consist of, one, two, three, four, five, six, seven, eight, nine, ten, or more of the sequences delineated in Table 1B column 6, or any combination thereof. Additional, representative examples of polynucleotides of the invention comprise, or alternatively consist of, one, two, three, four, five, six, seven, eight, nine, ten, or more of the complementary strand(s) of the sequences delineated in Table 1B column 6, or any combination thereof In further embodiments, the above-described polynucleotides of the invention comprise, or alternatively consist of, sequences delineated in Table 1B, column 6, and have a nucleic acid sequence which is different from that of the BAC fragment having the sequence disclosed in SEQ ID NO:B (see Table 1B, column 5). In additional embodiments, the above-described polynucleotides of the invention comprise, or alternatively consist of, sequences delineated in Table 1B, column 6, and have a nucleic acid sequence which is different from that published for the BAC clone identified as BAC ID NO:A (see Table 1B, column 4). In additional embodiments, the above-described polynucleotides of the invention comprise, or alternatively consist of, sequences delineated in Table 1B, column 6, and have a nucleic acid sequence which is different from that contained in the BAC clone identified as BAC ID NO:A (see Table 1B, column 4). Polypeptides encoded by these polynucleotides, other polynucleotides that encode these polypeptides, and antibodies that bind these polypeptides are also encompassed by the invention. Additionally, fragments and variants of the above-described polynucleotides and polypeptides are also encompassed by the invention.

[0085] Further, representative examples of polynucleotides of the invention comprise, or alternatively consist of, one, two, three, four, five, six, seven, eight, nine, ten, or more of the sequences delineated in column 6 of Table 1B which correspond to the same Clone ID NO:Z (see Table 1B, column 1), or any combination thereof. Additional, representative examples of polynucleotides of the invention comprise, or alternatively consist of, one, two, three, four, five, six, seven, eight, nine, ten, or more of the complementary strand(s) of the sequences delineated in column 6 of Table 1B which correspond to the same Clone ID NO:Z (see Table 1B, column 1), or any combination thereof. In further embodiments, the above-described polynucleotides of the invention comprise, or alternatively consist of, sequences delineated in column 6 of Table 1B which correspond to the same Clone ID NO:Z (see Table 1B, column 1) and have a nucleic acid sequence which is different from that of the BAC fragment having the sequence disclosed in SEQ ID NO:B (see Table 1B, column 5). In additional embodiments, the above-described polynucleotides of the invention comprise, or alternatively consist of, sequences delineated in column 6 of Table 1B which correspond to the same Clone ID NO:Z (see Table 1B, column 1) and have a nucleic acid sequence which is different from that published for the BAC clone identified as BAC ID NO:A (see Table 1B, column 4). In additional embodiments, the above-described polynucleotides of the invention comprise, or alternatively consist of, sequences delineated in column 6 of Table 1B which correspond to the same Clone ID NO:Z (see Table 1B, column 1) and have a nucleic acid sequence which is different from that contained in the BAC clone identified as BAC ID NO:A (see Table 1B, column 4). Polypeptides encoded by these polynucleotides, other polynucleotides that encode these polypeptides, and antibodies that bind these polypeptides are also encompassed by the invention. Additionally, fragments and variants of the above-described polynucleotides and polypeptides are also encompassed by the invention.

[0086] Further, representative examples of polynucleotides of the invention comprise, or alternatively consist of, one, two, three, four, five, six, seven, eight, nine, ten, or more of the sequences delineated in column 6 of Table 1B which correspond to the same contig sequence identifer SEQ ID NO:X (see Table 1B, column 2), or any combination thereof. Additional, representative examples of polynucleotides of the invention comprise, or alternatively consist of, one, two, three, four, five, six, seven, eight, nine, ten, or more of the complementary strand(s) of the sequences delineated in column 6 of Table 1B which correspond to the same contig sequence identifer SEQ ID NO:X (see Table 1B, column 2), or any combination thereof. In further embodiments, the above-described polynucleotides of the invention comprise, or alternatively consist of, sequences delineated in column 6 of Table 1B which correspond to the same contig sequence identifer SEQ ID NO:X (see Table 1B, column 2) and have a nucleic acid sequence which is different from that of the BAC fragment having the sequence disclosed in SEQ ID NO:B (see Table 1B, column 5). In additional embodiments, the above-described polynucleotides of the invention comprise, or alternatively consist of, sequences delineated in column 6 of Table 1B which correspond to the same contig sequence identifer SEQ ID NO:X (see Table 1B, column 2) and have a nucleic acid sequence which is different from that published for the BAC clone identified as BAC ID NO:A (see Table 1B, column 4). In additional embodiments, the above-described polynucleotides of the invention comprise, or alternatively consist of, sequences delineated in column 6 of Table 1B which correspond to the same contig sequence identifer SEQ ID NO:X (see Table 1B, column 2) and have a nucleic acid sequence which is different from that contained in the BAC clone identified as BAC ID NO:A (See Table 1B, column 4). Polypeptides encoded by these polynucleotides, other polynucleotides that encode these polypeptides, and antibodies that bind these polypeptides are also encompassed by the invention. Additionally, fragments and variants of the above-described polynucleotides and polypeptides are also encompassed by the invention.

[0087] Moreover, representative examples of polynucleotides of the invention comprise, or alternatively consist of, one, two, three, four, five, six, seven, eight, nine, ten, or more of the sequences delineated in the same row of Table 1B column 6, or any combination thereof. Additional, representative examples of polynucleotides of the invention comprise, or alternatively consist of, one, two, three, four, five, six, seven, eight, nine, ten, or more of the complementary strand(s) of the sequences delineated in the same row of Table 1B column 6, or any combination thereof. In preferred embodiments, the polynucleotides of the invention comprise, or alternatively consist of, one, two, three, four, five, six, seven, eight, nine, ten, or more of the complementary strand(s) of the sequences delineated in the same row of Table 1B column 6, wherein sequentially delineated sequences in the table (i.e. corresponding to those exons located closest to each other) are directly contiguous in a 5′ to 3′ orientation. In further embodiments, above-described polynucleotides of the invention comprise, or alternatively consist of, sequences delineated in the same row of Table 1B, column 6, and have a nucleic acid sequence which is different from that of the BAC fragment having the sequence disclosed in SEQ ID NO:B (see Table 1B, column 5). In additional embodiments, the above-described polynucleotides of the invention comprise, or alternatively consist of, sequences delineated in the same row of Table 1B, column 6, and have a nucleic acid sequence which is different from that published for the BAC clone identified as BAC ID NO:A (see Table 1B, column 4). In additional embodiments, the above-described polynucleotides of the invention comprise, or alternatively consist of, sequences delineated in the same row of Table 1B, column 6, and have a nucleic acid sequence which is different from that contained in the BAC clone identified as BAC ID NO:A (see Table 1B, column 4). Polypeptides encoded by these polynucleotides, other polynucleotides that encode these polypeptides, and antibodies that bind these polypeptides are also encompassed by the invention.

[0088] In additional specific embodiments, polynucleotides of the invention comprise, or alternatively consist of, one, two, three, four, five, six, seven, eight, nine, ten, or more of the sequences delineated in column 6 of Table 1B, and the polynucleotide sequence of SEQ ID NO:X (e.g., as defined in Table 1B, column 2) or fragments or variants thereof. Polypeptides encoded by these polynucleotides, other polynucleotides that encode these polypeptides, and antibodies that bind these polypeptides are also encompassed by the invention.

[0089] In additional specific embodiments, polynucleotides of the invention comprise, or alternatively consist of, one, two, three, four, five, six, seven, eight, nine, ten, or more of the sequences delineated in column 6 of Table 1B which correspond to the same Clone ID NO:Z (see Table 1B, column 1), and the polynucleotide sequence of SEQ ID NO:X (e.g., as defined in Table 1A or 1B) or fragments or variants thereof. In preferred embodiments, the delineated sequence(s) and polynucleotide sequence of SEQ ID NO:X correspond to the same Clone ID NO:Z. Polypeptides encoded by these polynucleotides, other polynucleotides that encode these polypeptides, and antibodies that bind these polypeptides are also encompassed by the invention.

[0090] In further specific embodiments, polynucleotides of the invention comprise, or alternatively consist of, one, two, three, four, five, six, seven, eight, nine, ten, or more of the sequences delineated in the same row of column 6 of Table 1B, and the polynucleotide sequence of SEQ ID NO:X (e.g., as defined in Table 1A or 1B) or fragments or variants thereof. In preferred embodiments, the delineated sequence(s) and polynucleotide sequence of SEQ ID NO:X correspond to the same row of column 6 of Table 1B. Polypeptides encoded by these polynucleotides, other polynucleotides that encode these polypeptides, and antibodies that bind these polypeptides are also encompassed by the invention.

[0091] In additional specific embodiments, polynucleotides of the invention comprise, or alternatively consist of a polynucleotide sequence in which the 3′ 10 polynucleotides of one of the sequences delineated in column 6 of Table 1B and the 5′ 10 polynucleotides of the sequence of SEQ ID NO:X are directly contiguous. Nucleic acids which hybridize to the complement of these 20 contiguous polynucleotides under stringent hybridization conditions or alternatively, under lower stringency conditions, are also encompassed by the invention. Polypeptides encoded by these polynucleotides and/or nucleic acids, other polynucleotides and/or nucleic acids that encode these polypeptides, and antibodies that bind these polypeptides are also encompassed by the invention. Additionally, fragments and variants of the above-described polynucleotides, nucleic acids, and polypeptides are also encompassed by the invention.

[0092] In additional specific embodiments, polynucleotides of the invention comprise, or alternatively consist of, a polynucleotide sequence in which the 3′ 10 polynucleotides of one of the sequences delineated in column 6 of Table 1B and the 5′ 10 polynucleotides of a fragment or variant of the sequence of SEQ ID NO:X are directly contiguous Nucleic acids which hybridize to the complement of these 20 contiguous polynucleotides under stringent hybridization conditions or alternatively, under lower stringency conditions, are also encompassed by the invention. Polypeptides encoded by these polynucleotides and/or nucleic acids, other polynucleotides and/or nucleic acids encoding these polypeptides, and antibodies that bind these polypeptides are also encompassed by the invention. Additionally, fragments and variants of the above-described polynucleotides, nucleic acids, and polypeptides are also encompassed by the invention.

[0093] In specific embodiments, polynucleotides of the invention comprise, or alternatively consist of, a polynucleotide sequence in which the 3′ 10 polynucleotides of the sequence of SEQ ID NO:X and the 5′ 10 polynucleotides of the sequence of one of the sequences delineated in column 6 of Table 1B are directly contiguous. Nucleic acids which hybridize to the complement of these 20 contiguous polynucleotides under stringent hybridization conditions or alternatively, under lower stringency conditions, are also encompassed by the invention. Polypeptides encoded by these polynucleotides and/or nucleic acids, other polynucleotides and/or nucleic acids encoding these polypeptides, and antibodies that bind these polypeptides are also encompassed by the invention. Additionally, fragments and variants of the above-described polynucleotides, nucleic acids, and polypeptides are also encompassed by the invention.

[0094] In specific embodiments, polynucleotides of the invention comprise, or alternatively consist of, a polynucleotide sequence in which the 3′ 10 polynucleotides of a fragment or variant of the sequence of SEQ ID NO:X and the 5′ 10 polynucleotides of the sequence of one of the sequences delineated in column 6 of Table 1B are directly contiguous. Nucleic acids which hybridize to the complement of these 20 contiguous polynucleotides under stringent hybridization conditions or alternatively, under lower stringency conditions, are also encompassed by the invention. Polypeptides encoded by these polynucleotides and/or nucleic acids, other polynucleotides and/or nucleic acids encoding these polypeptides, and antibodies that bind these polypeptides are also encompassed by the invention. Additionally, fragments and variants of the above-described polynucleotides, nucleic acids, and polypeptides, are also encompassed by the invention.

[0095] In further specific embodiments, polynucleotides of the invention comprise, or alternatively consist of, a polynucleotide sequence in which the 3′ 10 polynucleotides of one of the sequences delineated in column 6 of Table 1B and the 5′ 10 polynucleotides of another sequence in column 6 are directly contiguous. Nucleic acids which hybridize to the complement of these 20 contiguous polynucleotides under stringent hybridization conditions or alternatively, under lower stringency conditions, are also encompassed by the invention. Polypeptides encoded by these polynucleotides and/or nucleic acids, other polynucleotides and/or nucleic acids encoding these polypeptides, and antibodies that bind these polypeptides are also encompassed by the invention. Additionally, fragments and variants of the above-described polynucleotides, nucleic acids, and polypeptides are also encompassed by the invention.

[0096] In specific embodiments, polynucleotides of the invention comprise, or alternatively consist of, a polynucleotide sequence in which the 3′ 10 polynucleotides of one of the sequences delineated in column 6 of Table 1B and the 5′ 10 polynucleotides of another sequence in column 6 corresponding to the same Clone ID NO:Z (see Table 1B, column 1) are directly contiguous. Nucleic acids which hybridize to the complement of these 20 lower stringency conditions, are also encompassed by the invention. Polypeptides encoded by these polynucleotides and/or nucleic acids, other polynucleotides and/or nucleic acids encoding these polypeptides, and antibodies that bind these polypeptides are also encompassed by the invention. Additionally, fragments and variants of the above-described polynucleotides, nucleic acids, and polypeptides are also encompassed by the invention.

[0097] In specific embodiments, polynucleotides of the invention comprise, or alternatively consist of, a polynucleotide sequence in which the 3′ 10 polynucleotides of one sequence in column 6 corresponding to the same contig sequence identifer SEQ ID NO:X (see Table 1B, column 2) are directly contiguous. Nucleic acids which hybridize to the complement of these 20 contiguous polynucleotides under stringent hybridization conditions or alternatively, under lower stringency conditions, are also encompassed by the invention. Polypeptides encoded by these polynucleotides and/or nucleic acids, other polynucleotides and/or nucleic acids encoding these polypeptides, and antibodies that bind these polypeptides are also encompassed by the invention. Additionally, fragments and variants of the above-described polynucleotides, nucleic acids, and polypeptides are also encompassed by the invention.

[0098] In specific embodiments, polynucleotides of the invention comprise, or alternatively consist of a polynucleotide sequence in which the 3′ 10 polynucleotides of one of the sequences delineated in column 6 of Table 1B and the 5′ 10 polynucleotides of another sequence in column 6 corresponding to the same row are directly contiguous. In preferred embodiments, the 3′ 10 polynucleotides of one of the sequences delineated in column 6 of Table 1B is directly contiguous with the 5′ 10 polynucleotides of the next sequential exon delineated in Table 1B, column 6. Nucleic acids which hybridize to the complement of these 20 contiguous polynucleotides under stringent hybridization conditions or alternatively, under lower stringency conditions, are also encompassed by the invention. Polypeptides encoded by these polynucleotides and/or nucleic acids, other polynucleotides and/or nucleic acids encoding these polypeptides, and antibodies that bind these polypeptides are also encompassed by the invention. Additionally, fragments and variants of the above-described polynucleotides, nucleic acids, and polypeptides are also encompassed by the invention.

[0099] Many polynucleotide sequences, such as EST sequences, are publicly available and accessible through sequence databases and may have been publicly available prior to conception of the present invention. Preferably, such related polynucleotides are specifically excluded from the scope of the present invention. Accordingly, for each contig sequence (SEQ ID NO:X) listed in the third column of Table 1A, preferably excluded are one or more polynucleotides comprising a nucleotide sequence described by the general formula of a−b, where a is any integer between 1 and the final nucleotide minus 15 of SEQ ID NO:X, b is an integer of 15 to the final nucleotide of SEQ ID NO:X, where both a and b correspond to the positions of nucleotide residues shown in SEQ ID NO:X, and where b is greater than or equal to a+14. More specifically, preferably excluded are one or more polynucleotides comprising a nucleotide sequence described by the general formula of a−b, where a and b are integers as defined in columns 4 and 5, respectively, of Table 3. In specific embodiments, the polynucleotides of the invention do not consist of at least one, two, three, four, five, ten, or more of the specific polynucleotide sequences referenced by the Genbank Accession No. as disclosed in column 6 of Table 3 (including for example, published sequence in connection with a particular BAC clone). In further embodiments, preferably excluded from the invention are the specific polynucleotide sequence(s) contained in the clones corresponding to at least one, two, three, four, five, ten, or more of the available material having the accession numbers identified in the sixth column of this Table (including for example, the actual sequence contained in an identified BAC clone). In no way is this listing meant to encompass all of the sequences which may be excluded by the general formula, it is just a representative example. All references available through these accessions are hereby incorporated by reference in their entirety.

TABLE 3

| | | | EST Disclaimer | | |
|---|---|---|---|---|---|
| Clone ID | SEQ ID | Contig | Range | Range | |
| NO: Z | NO: X | ID: | of a | of b | Accession #'s |
| HABGB54 | 11 | 952557 | 1-142 | 15-156 | |
| HACAD23 | 12 | 926345 | 1-429 | 15-443 | T26996, AW166535, A1096808, F07943, |
| | | | | | AI373466, and AI693899. |
| HACAI48 | 13 | 575814 | 1-187 | 15-201 | |
| HACBA49 | 14 | 722875 | 1-414 | 15-428 | |
| HACBT81 | 15 | 855720 | 1-342 | 15-356 | |
| HACCY20 | 16 | 845144 | 1-342 | 15-356 | |
| HADAM37 | 17 | 731696 | 1-392 | 15-406 | |
| HADAM69 | 18 | 699190 | 1-451 | 15-465 | |
| HADAR35 | 19 | 705743 | 1-446 | 15-460 | |
| HADCK83 | 20 | 609846 | 1-668 | 15-682 | AL042853, AI254913, AL138455, AI440117, |
| | | | | | AI554471, AL135357, AA769402, AA837741, |
| | | | | | AW245747, AL042753, AL037683, AA594157, |
| | | | | | AW081871, AI859946, AI253987, AA179163, |
| | | | | | AI085242, AL043289, AL043052, AA654781, |
| | | | | | AL040038, AA129746, AI249880, AA828395, |
| | | | | | AA446649, AL038606, AA768247, AW022655, |
| | | | | | AI251034, AL042538, AW023662, AI366555, |
| | | | | | AA464739, AA516190, AL040319, AW303098, |
| | | | | | AI696962, AA579419, AL042377, AA856841, |
| | | | | | AW303142, AI250552, AL035420, U89335, |
| | | | | | AC005879, AC007371, AC006115, AJ003147, |
| | | | | | AC005233, Z84484, AC005538, AC002563, |
| | | | | | AC007546, AL022336, AL021918, AC005899, |
| | | | | | AC006285, AC005940, AC005013, AL121603, |
| | | | | | AL023807, AF196779, AF207550, AC005102, |
| | | | | | Z85986, AF111167, U85195, AC004837, |
| | | | | | AL049643, AC007011, AC004491, AF031078, |
| | | | | | AC000025, AE000658, AC008372, AC004983, |
| | | | | | AF030876, AC005779, AL035458, AC004253, |
| | | | | | AC005387, Z97056, AC016025, AC006126, |
| | | | | | AC005962, AC005295, AC007055, AF030453, |
| | | | | | Z95331, AP000344, AC004408, AC007536, |
| | | | | | AL021397, AC003104, AC002126, AC006965, |
| | | | | | AL109798, AC004841, AC007308, AC005378, |
| | | | | | Z85987, AC004858, Z94056, Z84466, M63544, |
| | | | | | AC004975, AC005011, AJ011930, AC004832, |
| | | | | | AC002326, AF001548, AC004030, AP000245, |
| | | | | | AC002350, AL022476, AL031295, AC005529, |
| | | | | | AC005701, AL109623, AC005041, AP000352, |
| | | | | | AF001549, AL022721, AC005874, AF134471, |
| | | | | | AC005933, Z99716, AC005081, AL049776, |
| | | | | | AL021393, AC002395, AC005071, AF117829, |
| | | | | | Z84487, AC002369, AC020663, AC006571, |
| | | | | | AL050341, AC005520, AC002472, AL031282, |
| | | | | | Z98742, Z95113, AL031283, AP000141, |
| | | | | | AC005231, AC005067, AC005004, AC007686, |
| | | | | | AC002059, AP000338, AC006157, Y18000, |
| | | | | | AC004686, AC007386, AC002470, AL021155, |
| | | | | | AP000140, AL031678, AC005225, Z93017, |
| | | | | | AF205588, AC006480, AL021154, AC002347, |
| | | | | | AL096701, AC003663, AC004659, AC003043, |
| | | | | | AP000216, AC005562, AC004000, Z85996, |
| | | | | | AC005088, AC006449, M63480, AC007934, |
| | | | | | AC005368, AL049760, AF024533, AC005632, |
| | | | | | Z83844, AC004927, AC005519, AC004887, |
| | | | | | AC005072, AC004596, AL109984, AL031228, |
| | | | | | AC005015, AC006511, AC005778, AC006552, |
| | | | | | AC005207, AC005037, U91326, L78810, |
| | | | | | AL031230, AC004991, AL031281, AL049872, |
| | | | | | AL049759, AC005871, AL022320, AC002477, |
| | | | | | AC002425, Z69666, AC007876, AC004653, |
| | | | | | AC005399, AC005837, AC007151, AF190465, |
| | | | | | AB020864, AD000092, AC005932, AC004149, |
| | | | | | AC004126, AC000026, AL049539, AC002303, |
| | | | | | AL035587, AF053356, APOO0130, AC004882, |
| | | | | | AC005914, Z99128, AC005602, AL023553, |
| | | | | | AC004883, AL031681, AL034420, M63543, |
| | | | | | AP000042, AC000066, AC006004, AC005377, |
| | | | | | AC000070, AC007298, AC005324, AC005730, |
| | | | | | AC007845, AC008012, AL022313, AF017104, |
| | | | | | and Z98946. |
| HADCL22 | 21 | 674427 | 1-402 | 15-416 | AI700450, AI939604, AI201816, AI199345, and |
| | | | | | Z94161. |
| HADCO14 | 22 | 657572 | 1-295 | 15-309 | AC004933. |
| HADCO44 | 23 | 716559 | 1-320 | 15-334 | |
| HADCO48 | 24 | 865306 | 1-387 | 15-401 | |
| HADCO54 | 25 | 467197 | 1-355 | 15-369 | |
| HADCO57 | 26 | 734705 | 1-317 | 15-331 | AL080313. |
| HADCQ37 | 27 | 970564 | 1-833 | 15-847 | AW007846. |
| HADCU18 | 28 | 666360 | 1-436 | 15-450 | |
| HADCW65 | 29 | 719810 | 1-288 | 15-302 | AI215882, AA843578, AA479185, AI274524, |
| | | | | | AA383684, AA303411, F21903, AI868651, |
| | | | | | W77995, AI433148, AI693776, AA625709, |
| | | | | | AA235619, AW151261, AA936827, AI367631, |
| | | | | | AI249488, AA861454, AA302641, AI917956, |
| | | | | | AA421010, AI439022, AA447665, AA554318, |
| | | | | | AW083118, AI373036, AI806892, AA156886, |
| | | | | | AI085888, AA776515, AI335769, AI446645, |
| | | | | | D59872, AI190425, AA974206, AA252189, |
| | | | | | AI142943, AI359892, AI142945, AI829611, |
| | | | | | R66420, AI590628, AW131642, AA722880, |
| | | | | | AL037830, H43132, AA779652, AI077663, |
| | | | | | AI050013, AA678939, AA594115, AI168324, |
| | | | | | AA766077, AA336082, W93317, W73178, |
| | | | | | W73952, N21569, AI015576, AW265759, |
| | | | | | AA447813, H84185, AA535245, AA410845, |
| | | | | | and C21518. |
| HADCX38 | 30 | 705751 | 1-426 | 15-440 | |
| HADDB75 | 31 | 757028 | 1-463 | 15-477 | |
| HADDC66 | 32 | 787301 | 1-473 | 15-487 | AA453499, and AL049563. |
| HADDE78 | 33 | 773552 | 1-307 | 15-321 | |
| HADDF89 | 34 | 786876 | 1-394 | 15-408 | AW275510, AW270343, T06754, AA493695, |
| | | | | | AA635739, AI133297, AL119691, AW168618, |
| | | | | | AI473475, AA484373, AA639326, AA299189, |
| | | | | | AW023990, AW021735, AI311927, AA541423, |
| | | | | | T59524, R86151, AL038705, AA101689, |
| | | | | | AA765736, AA493708, AA745406, AI687343, |
| | | | | | AA580808, AW193461, AA572713, AL048925, |
| | | | | | AA634889, AI284640, AI751216, AI345157, |
| | | | | | AI039584, AW021207, AA829039, AA569471, |
| | | | | | AI306191, AW084466, AA469451, AI305894, |
| | | | | | AA279421, AI801482, AA806796, AA984801, |
| | | | | | AW302903, AW193265, AA526787, AL135377, |
| | | | | | AI559251, AA668807, R17793, AI350211, |
| | | | | | AA483223, AL036037, AI674174, AL037771, |
| | | | | | AI860013, AI247199, AI754658, AA226363, |
| | | | | | AI209074, AI654525, AW102846, AA478355, |
| | | | | | AI471887, AA846952, AW438643, AW269488, |
| | | | | | AA658362, AI584186, AI445674, AI933534, |
| | | | | | AA127426, AW128884, AA357991, |
| | | | | | AW103758, AA613397, AA458703, AI816141, |
| | | | | | AI969436, AW128900, AA664700, AI093030, |
| | | | | | H71429, AI805363, AI431303, AI953275, |
| | | | | | AI470646, AA492081, AA665199, AI268334, |
| | | | | | AI268336, AA811153, AA365413, AA508359, |
| | | | | | AI537506, AI027459, AA587587, AW302013, |
| | | | | | AW083364, AL045053, AI612142, AA584167, |
| | | | | | N35602, AA491814, AA623002, AW022406, |
| | | | | | AI868384, AI820807, AA757775, AI98588, |
| | | | | | AA535406, AA483929, AA610494, AI633390, |
| | | | | | AL044940, AI805547, AW020340, AL043009, |
| | | | | | AI207496, AI084294, AI305766, AW080125, |
| | | | | | AA356089, AI634384, AA446544, T51911, |
| | | | | | N29815, AW273218, AA503475, AI472222, |
| | | | | | AA506458, AA502860, AL041690, AI583252, |
| | | | | | AA847499, AA326372, AA702729, AA780944, |
| | | | | | AI110688, AI866160, AA577906, AW408707, |
| | | | | | AA668816, AA788982, AA456578, AI744995, |
| | | | | | AW276435, AA181823, AW088718, AI217936, |
| | | | | | AL046409, AI537077, AA493975, AI446404, |
| | | | | | AL046205, AL042853, AL044904, AA600869, |
| | | | | | AW410400, AI589461, AW276817, AA019312, |
| | | | | | T74382, AI908381, AI669453, AA579075, |
| | | | | | AA482923, AA188670, AI708009, AA828042, |
| | | | | | AA666332, AA836811, AI766275, T07911, |
| | | | | | AA468022, AL121385, AI963263, AA577755, |
| | | | | | AI133164, AA483256, AW188484, AI824706, |
| | | | | | AP000302, AP000114, AP000046, AL035417, |
| | | | | | AC005043, X55923, AP000049, AC007204, |
| | | | | | AP000311, AP000404, X60459, AL031774, |
| | | | | | Z84487, AC005288, AC012083, AC008064, |
| | | | | | AL022165, AL031846, AC005523, AL049643, |
| | | | | | AL031281, AC004686, AC005157, AB016897, |
| | | | | | AF077058, Z68344, AC005841, AP000351, |
| | | | | | AL121578, X55933, AC005725, AF146367, |
| | | | | | AF015150, AL022319, AC007308, X75335, |
| | | | | | AC004134, AC004417, AL031279, Z83843, |
| | | | | | L49046, X54177, AC002096, AC006126, |
| | | | | | AL035652, Z98043, AC000118, AL035073, |
| | | | | | AP000159, AP000017, AP000502, AL049544, |
| | | | | | Z98748, AC005162, AC006539, AC005532, |
| | | | | | AC002379, AC005026, AC006019, AL031055, |
| | | | | | AC008062, U91325, AC005909, AC006058, |
| | | | | | AC005913, AL009181, AF042090, AC006466, |
| | | | | | AC005666, AC006479, AL033397, AC018633, |
| | | | | | AP000459, AL031283, AC005084, AC006960, |
| | | | | | AP000962, AC003986, AL008718, AC006112, |
| | | | | | AC003101, AC000353, AF015153, X55932, |
| | | | | | U18399, AC004742, AL035458, AC005866, |
| | | | | | AL132992, X54175, D83989, AC003065, |
| | | | | | AC005033, AC006543, AC006538, AL132800, |
| | | | | | AP000297, AC004802, AF024533, AP000044, |
| | | | | | AP000112, AL008635, AC002119, Z83823, |
| | | | | | Z98742, Z97195, AL096829, AC005745, |
| | | | | | AC005759, AC005565, AL031602, AL031585, |
| | | | | | AC002301, AC004931, AC004848, AC007666, |
| | | | | | AL035089, AC007221, AL135922, X53549, |
| | | | | | AC005907, AC005256, AL031780, AC006560, |
| | | | | | AL035402, AC004519, U02531, AF184110, |
| | | | | | Z97196, AC005166, AF124523, AC005846, |
| | | | | | AC005587, AC002127, AC016027, AC006432, |
| | | | | | AC006059, AC016830, Z83845, U57006, |
| | | | | | AL109981, AL110292, AC004991, AL023281, |
| | | | | | AL080243, AC005409, AC005412, AC004990, |
| | | | | | AF001298, AF141309, X54179, L47228, |
| | | | | | Z84721, AC003982, AC004986, AC005385, |
| | | | | | AC008101, Z98745, Z82214, AC002377, |
| | | | | | Z82216, AC005951, AC009275, AC005678, |
| | | | | | AL031286, AL034373, AL096765, Z69666, |
| | | | | | AF010238, AF057159, AC004400, AP001059, |
| | | | | | AJ009610, U73167, U90094, AC000040, |
| | | | | | Z70042, AL035445, AC004559, AL049853, |
| | | | | | AC004712, Z69724, AC005253, AC005783, |
| | | | | | U63312, AL031719, AF041427, AC005387, |
| | | | | | AC004204, AP000349, AL035462, AC004940, |
| | | | | | Z82243, AC008168, AL031273, AL049556, |
| | | | | | U07562, AL008709, AL031728, AL096775, |
| | | | | | Z98046, Z98051, Z98750, AC005694, |
| | | | | | AC007999, AC004538, Z98752, AC006130, |
| | | | | | AC006077, AL023755, AC002316, AL035681, |
| | | | | | AL033523, AL121591, AC002564, AL022322, |
| | | | | | AC006365, AL031319, AL032822, AP000204, |
| | | | | | AP000126, AP000201, AC005911, Z78022, |
| | | | | | AC003103, AC004230, AL035661, AL109618, |
| | | | | | Z81369, AC004111, AL022163, Z93023, |
| | | | | | AL035252, AC004987, U85196, AC004016, |
| | | | | | AL050401, AC013417, Z82210, AC004006, |
| | | | | | AC003075, Z98950, AC006208, AL031295, |
| | | | | | AC002045, AC003085, Z97056, and |
| | | | | | AC006251. |
| HADDQ25 | 35 | 849002 | 1-372 | 15-386 | AC007406, and AL121653. |
| HADEU56 | 36 | 733346 | 1-461 | 15-475 | AC003002. |
| HADFG58 | 37 | 727536 | 1-285 | 15-299 | AA779075, AI371007, AA127347, AA077952, |
| | | | | | N24841, AA339714, AW057699, AI820539, |
| | | | | | AA503258, AW304531, AW407578, AI561116, |
| | | | | | AA437405, AI453383, AI254798, F12535, |
| | | | | | AI683682, AL045077, AI216799, AW238127, |
| | | | | | AW274349, AI890348, AW303196, AW301350, |
| | | | | | AI378729, AA573033, AI830390, AL037554, |
| | | | | | AL049758, AP000555, AL035464, AC006511, |
| | | | | | AC000070, AC005858, AC005040, AC002350, |
| | | | | | AC005722, AC002550, AC009464, AC005243, |
| | | | | | AC005254, AC004895, AC002553, Z99289, |
| | | | | | U60062, AL021977, AC002425, AC004494, |
| | | | | | X96421, AL035072, AL109627, Z99943, |
| | | | | | AC006040, AF141325, AP000349, AL049757, |
| | | | | | AP001037, AC002072, AC002996, AC008008, |
| | | | | | AC008045, AC005562, AC006596, AC005829, |
| | | | | | AC005756, Z84480, AL034369, AP000689, |
| | | | | | AC004448, AL020995, AC005399, AC010200, |
| | | | | | AB003151, AC010170, AC005409, AC005874, |
| | | | | | AF134471, AC006111, AC006515, AC002041, |
| | | | | | AL031255, AC006538, AC006115, Y10196, |
| | | | | | AP000066, U47924, AC000075, AC004796, |
| | | | | | AC005664, AC005280, AC004765, AC000097, |
| | | | | | AL033527, U96629, AC006547, AF069291, |
| | | | | | AC006039, U93237, AC007565, AL049557, |
| | | | | | AC003043, AC00S519, AL031848, AC004890, |
| | | | | | AC000134, Z80771, Z82201, AC005345, |
| | | | | | AC005837, AL121658, and AC005746. |
| HADFX30 | 38 | 970565 | 1-407 | 15-421 | |
| HADFX35 | 39 | 675830 | 1-437 | 15-451 | AW156911, AC005829, AL121603, AC005520, |
| | | | | | AL049793, AL049712, AL024507, AB015355, |
| | | | | | AC004491, AL022329, AL035086, AC004019, |
| | | | | | AL022326, AL035413, AL031681, Z99943, |
| | | | | | AC005057, AC005081, AC007225, AC002126, |
| | | | | | AL080317, AC006205, AL022316, AP000555, |
| | | | | | AC004821, AC009247, AL135744, AC004099, |
| | | | | | AC007308, AC005663, AC005920, AC005924, |
| | | | | | AC005914, AC002070, AC007666, AC005808, |
| | | | | | AC006487, AC007546, AC005899, AL049839, |
| | | | | | Z95331, AL022336, AL022311, AL133245, |
| | | | | | AC000052, AC005622, U85195, U80017, |
| | | | | | AC006285, AC006509, AC005037, AB003151, |
| | | | | | AE000658, AC000120, AC004966, AF165926, |
| | | | | | AC002425, AC005625, AC005531, AC004000, |
| | | | | | AC006277, L78810, AL035422, Z98941, |
| | | | | | AC007226, AL049830, AL022320, AC004814, |
| | | | | | AL050307, AL020997, AL121652, AC004382, |
| | | | | | AC006071, AC009363, AL035685, AC002477, |
| | | | | | AP000008, AC007011, U78027, AC005091, |
| | | | | | AL031685, AL109801, AL050308, AP000704, |
| | | | | | AP000501, AC004893, AC005365, and |
| | | | | | AL049760. |
| HADGA36 | 40 | 705766 | 1-142 | 15-156 | AW004899, and AL022315. |
| HADGD54 | 41 | 729761 | 1-452 | 15-466 | AA320586, AA847399, and Z98751. |
| HADGE37 | 42 | 744768 | 1-247 | 15-261 | R87697, R87196, AA323557, AA324542, and |
| | | | | | AB018269. |
| HADGR61 | 43 | 848971 | 1-454 | 15-468 | AJ223366. |
| HADXA61 | 44 | 741926 | 1-290 | 15-304 | |
| HARMG09 | 45 | 705996 | 1-399 | 15-413 | |
| HARMG0 | 46 | 933284 | 1-418 | 15-432 | |
| HARMM43 | 47 | 714763 | 1-568 | 15-582 | |
| HARMP39 | 48 | 705255 | 1-584 | 15-598 | |
| HARMP42 | 49 | 713247 | 1-486 | 15-500 | |
| HARMS39 | 50 | 933273 | 1-516 | 15-530 | |
| HARMS77 | 51 | 752659 | 1-369 | 15-383 | AC005104. |
| HARMU03 | 52 | 923179 | 1-178 | 15-192 | |
| HARMX01 | 53 | 915475 | 1-795 | 15-809 | AI151176, AI539290, AI539301, and |
| | | | | | AA583214. |
| HARMX35 | 54 | 759963 | 1-270 | 15-284 | |
| HARNC40 | 55 | 710613 | 1-572 | 15-586 | |
| HARND80 | 56 | 864604 | 1-610 | 15-624 | AA299458, and AA704983. |
| HARNH15 | 57 | 687972 | 1-554 | 15-568 | |
| HARNH52 | 58 | 726277 | 1-333 | 15-347 | |
| HARNO29 | 59 | 690043 | 1-378 | 15-392 | |
| HAWAD93 | 60 | 508724 | 1-327 | 15-341 | AA320055, and AA320651. |
| HAWAP49 | 61 | 537199 | 1-402 | 15-416 | AI734261, AA302758, AA320387, W21246, |
| | | | | | and AI668672. |
| HBIMG05 | 62 | 930827 | 1-560 | 15-574 | AL118898, and AB006622. |
| HBIMS01 | 63 | 913827 | 1-601 | 15-615 | |
| HB1OO63 | 64 | 969020 | 1-337 | 15-351 | AA397622, T05793, AW163073, AI878983, |
| | | | | | N52689, and T05288. |
| HBIOP02 | 65 | 918022 | 1-98 | 15-112 | |
| HBIOS05 | 66 | 930776 | 1-457 | 15-471 | |
| HBIOX83 | 67 | 965609 | 1-400 | 15-414 | D31021, and Z98258. |
| HERAC86 | 68 | 973654 | 1-672 | 15-686 | |
| HERAC92 | 69 | 973454 | 1-489 | 15-503 | AW193265, AW341903, AI061334, AI688846, |
| | | | | | AA843450, AI962050, AA743811, AA657835, |
| | | | | | AI344844, AI446205, AW080134, AI803809, |
| | | | | | AI281474, AW236342, AW270768, AW419262, |
| | | | | | AI350211, AW157005, AI028510, AW438643, |
| | | | | | AL039187, AA992126, AW151102, AA745356, |
| | | | | | AI284640, AA904275, AI014378, AI963720, |
| | | | | | AW029038, F17700, AW167154, AA515051, |
| | | | | | AI053672, H57846, H79308, AA747375, |
| | | | | | AA669961, AI580652, AA350859, AA352290, |
| | | | | | AW193432, AW265688, AI569086, AW008074, |
| | | | | | AI801600, AI082510, AI633007, AW275719, |
| | | | | | AA744272, T48723, AI583142, AA744001, |
| | | | | | AA745524, AI291037, AI251002, AW408063, |
| | | | | | F18974, AI270326, AW102955, AI283938, |
| | | | | | AA482711, AA074130, AW277174, AI291124, |
| | | | | | F31204, AW088058, F02412, AA491814, |
| | | | | | AW265294, AA865262, AW104748, AI679782, |
| | | | | | AI929531, AI610920, H62778, T05834, |
| | | | | | AI345654, AA744455, AI185394, AA557879, |
| | | | | | AI446464, AI431303, AA365586, AL041368, |
| | | | | | AA832016, AI291268, AA955031, AA526193, |
| | | | | | AA831801, AA493238, AI049722, AI282832, |
| | | | | | AA826303, F33566, AA228778, AA229785, |
| | | | | | AA358623, F37286, AI291823, AI537030, |
| | | | | | AL120483, AI918421, AA745588, AI339850, |
| | | | | | F28576, AA311535, AI341664, AA743966, |
| | | | | | AA586433, AA603911, AA584489, AA503258, |
| | | | | | H64777, AA610491, AI624212, AL119838, |
| | | | | | AI039809, H21488, AA603323, AW440976, |
| | | | | | AA743977, AL043721, AI708009, AA581903, |
| | | | | | AA569190, AL133723, AI619997, AA975645, |
| | | | | | AW270619, AA487542, AI270117, AI368745, |
| | | | | | AW021747, AL120008, AI160117, AW088202, |
| | | | | | AI797998, AL041412, AI570246, AI053489, |
| | | | | | AW166611, AA342189, AI802526, AI340453, |
| | | | | | AL118991, H41319, AA515128, AA878149, |
| | | | | | AI079910, AA469451, AI031759, AI889923, |
| | | | | | AA077605, AA493580, AI245693, AW166815, |
| | | | | | AI358571, AI205126, AA569065, AI567674, |
| | | | | | AI653886, AI312790, H84359, AI453233, |
| | | | | | AW162049, AA650244, AA768179, AA077776, |
| | | | | | AA551798, AA937686, AL038936, AI336054, |
| | | | | | AI537955, AA176605, AI613280, F36273, |
| | | | | | AI904894, AW327961, T40612, I51997, |
| | | | | | AF031078, AF030876, Z69591, X54176, |
| | | | | | Z84474, U18393, U67221, AF111170, |
| | | | | | AJ011930, M37551, AP000697, U18396, |
| | | | | | X55925, U57007, AL133448, U18399, |
| | | | | | AC005007, X54180, U57006, AP001037, |
| | | | | | AL031296, AC004036, U18395, AC006017, |
| | | | | | X55924, U63630, X55922, X55928, U18394, |
| | | | | | Z72521, U57009, AC007151, U18391, |
| | | | | | AL132987, U18392, U57005, AC006373, |
| | | | | | U18390, AC006463, AL121655, AC004655, |
| | | | | | Z82176, AC006111, AC002511, AP000025, |
| | | | | | Z49816, Z97630, AC011604, AC004755, |
| | | | | | AL023694, AC003109, AC004889, AC006285, |
| | | | | | AC016025, AC003101, Z31005, AF015153, |
| | | | | | AC002314, AL022302, AC009330, AC006312, |
| | | | | | AC006071, Z30979, AC000353, X54175, |
| | | | | | X55931, U18398, U18387, X55930, U57008, |
| | | | | | AL035400, AF002992, X55932, S75337, |
| | | | | | S77605, AC001643, AC004973, AL096862, |
| | | | | | L78810, AL109759, U02063, AC002319, |
| | | | | | X54178, AC007043, AC006946, AL035086, |
| | | | | | U14718, AP000282, AP000281, AP000108, |
| | | | | | AP000040, AL080243, AC007731, Z68323, |
| | | | | | AL049869, AC004019, X55926, AC007242, |
| | | | | | S75201, U14719, AC004685, AL109837, |
| | | | | | AC005988, Z99943, AL133289, AC004033, |
| | | | | | AC005747, AP000567, AC006449, AC003075, |
| | | | | | U57004, AC006277, AC005076, AC004544, |
| | | | | | U35114, AC004895, Z48484, AC002538, |
| | | | | | Y15994, AC005067, AC004854, AC004534, |
| | | | | | AC005081, AC005015, AF015148, AL023876, |
| | | | | | AL024498, AC006042, AC006241, Y15724, |
| | | | | | D83989, X54181, AC005378, AC003104, |
| | | | | | AL109662, AC005701, X75335, U78027, |
| | | | | | AC005048, U14714, Z69837, AC009225, |
| | | | | | Z98748, AC004955, AL022337, AC005531, |
| | | | | | AC005544, AF196779, AC005722, AC006130, |
| | | | | | Z83838, AC002509, AC007537, AC005500, |
| | | | | | AL023494, AL034430, AC015853, AF064864, |
| | | | | | AF165176, AC004139, AL137100, AC004671, |
| | | | | | Z97832, AC004975, S70694, AC005740, |
| | | | | | AL022313, AC006153, AC006012, AC002076, |
| | | | | | S70707, AC003110, AF020803, AL031274, |
| | | | | | AC005482, AF015720, AL031121, AL031650, |
| | | | | | AC004765, AC006953, AC002301, AC006101, |
| | | | | | AL109865, AC008038, AC000004, AB011134, |
| | | | | | AC003983, U14711, U14712, AF137396, |
| | | | | | AC003962, AC004804, AC005993, AC005871, |
| | | | | | AP000356, U62317, AL133570, AC007207, |
| | | | | | U14713, AC004647, AC005566, Z83847, |
| | | | | | U14710, Z86090, AC004552, AC006538, |
| | | | | | AC005516, AC005616, AC002347, AC005844, |
| | | | | | AL049830, U02048, AF015155, AC005781, |
| | | | | | AC007551, AC004502, AL020997, AP000432, |
| | | | | | AC008080, U02058, AL023879, Z32772, |
| | | | | | Z98950, AF135028, U14715, AF068862, |
| | | | | | AC004612, Z98744, AL109983, AC012380, |
| | | | | | AC007899, AC002379, AC004150, Z95400, |
| | | | | | AL132992, AL031904, AL021026, AC007370, |
| | | | | | AC005618, U02054, AL009181, AC004167, |
| | | | | | AL031774, AC006511, AC004526, AP000116, |
| | | | | | Z86064, AC006966, and AL049740. |
| HERAD04 | 70 | 927788 | 1-316 | 15-330 | |
| HERAD10 | 71 | 973489 | 1-361 | 15-375 | |
| HERAD21 | 72 | 954708 | 1-311 | 15-325 | AI638717. |
| HERAG57 | 73 | 973668 | 1-277 | 15-291 | |
| HERAJ78 | 74 | 973676 | 1-652 | 15-666 | AI809453, and AL031682. |
| HERAL93 | 75 | 974497 | 1-522 | 15 -536 | |
| HERAM84 | 76 | 529193 | 1-249 | 15-263 | Z55723, and Z65235. |
| HERAN13 | 77 | 973709 | 1-642 | 15-656 | |
| HERAR12 | 78 | 735275 | 1-375 | 15-389 | AI927443, AI266358, AA132549, AI079981, |
| | | | | | AI870712, AW263428, AA490266, AW418652, |
| | | | | | AA972895, AI768281, AI191657, W02789, |
| | | | | | AI017804, R71647, AI218213, AI365255, |
| | | | | | AW182194, AL043363, AI168763, AI200160, |
| | | | | | AI282487, AI619736, AI187753, AI092398, |
| | | | | | AW183322, AA883318, AA927126, AI984940, |
| | | | | | T47441, AW304024, AA629264, AW273798, |
| | | | | | AA548776, T33202, AI279942, AA095539, |
| | | | | | AI685308, AI745547, AI127947, AW337945, |
| | | | | | AI808702, AI885568, AI202575, AW074695, |
| | | | | | AW149825, R73085, AI147654, AI339389, |
| | | | | | AI915262, AI381327, R35637, R36260, Z42393, |
| | | | | | T52711, D79419, AA301775, W30929, |
| | | | | | AA063185, and AC004895. |
| HESAD92 | 79 | 537451 | 1-388 | 15-402 | AC005218. |
| HESAT22 | 80 | 537449 | 1-340 | 15-354 | |
| HESAT88 | 81 | 537446 | 1-210 | 15-224 | |
| HFEAG37 | 82 | 705454 | 1-221 | 15-235 | AA339935, and Z99289. |
| HFEAH35 | 83 | 504585 | 1-285 | 15-299 | AA339994, AA340086, and AL132987. |
| HFEAN02 | 84 | 932828 | 1-207 | 15-221 | AA339972. |
| HFEAN43 | 85 | 524355 | 1-302 | 15-316 | AI814735, AW193432, AW276435, AA654968, |
| | | | | | AI688846, AA649642, AW301350, AW303196, |
| | | | | | AW274349, T07451, AW193265, AW261871, |
| | | | | | AA350859, AI619997, AA515128, AW088058, |
| | | | | | AW088202, AI350211, AW302450, AA594145, |
| | | | | | AL041690, AI929531, AI962050, AW029038, |
| | | | | | AI471481, AA225155, F18974, AI061334, |
| | | | | | AA664407, AW419262, AI270117, F31204, |
| | | | | | AW438643, AI625244, AI499938, AI061296, |
| | | | | | AI564185, AI339850, AI469003, AA557879, |
| | | | | | AW236342, AA5I5051, AW264973, |
| | | | | | AA613227, AW021774, AA610611, AA610493, |
| | | | | | AI345123, AI344810, AI251002, AA649705, |
| | | | | | AA339714, F25867, AA551503, AI801600, |
| | | | | | AA664899, AA610783, AA368936, AI345654, |
| | | | | | AW338419, AI830390, AW341992, AI358501, |
| | | | | | AW028400, AI434706, T05101, AA829223, |
| | | | | | F01314, W95841, AA846981, AA664015, |
| | | | | | AI305766, AI352078, AL044940, AA858197, |
| | | | | | F26152, AA824655, F33121, AA824654, |
| | | | | | AL046409, AA741474, AA535661, AW021747, |
| | | | | | AW406447, AI613280, AI291124, F37286, |
| | | | | | AA501600, AI567674, F29989, N41375, |
| | | | | | N25296, AA553465, AA525824, AI754658, |
| | | | | | AA714453, AA602528, AI002834, H02631, |
| | | | | | AA364429, AI340453, AA259245, AA503258, |
| | | | | | AA599920, U57009, D83989, X75335, U57005, |
| | | | | | U57007, U18391, S77605, U18394, U57006, |
| | | | | | U18392, X55925, U18393, I51997, U18390, |
| | | | | | X55932, X54178, U18398, U57008, X54181, |
| | | | | | X55923, X54180, U18395, U02063, U18387, |
| | | | | | X55931, X54175, U14701, X55924, X55926, |
| | | | | | U18399, U57004, X54176, X55930, X55928, |
| | | | | | S70707, X54179, S75201, S75337, M87919, |
| | | | | | AF077058, Z22650, U14719, U14695, U14699, |
| | | | | | U14713, U14707, U14712, S70706, Z30961, |
| | | | | | U67827, AC006576, X55927, U14700, U14703, |
| | | | | | AL078463, S70689, U14711, AC004690, |
| | | | | | AC011198, L47228, X54177, AF015149, |
| | | | | | D34623, X53550, AFOl5156, AC005041, |
| | | | | | U14704, AC005792, AC004531, Z81369, |
| | | | | | AF015154, Z68881, AC000075, Z82198, |
| | | | | | AC007735, X76629, AC002077, AC001530, |
| | | | | | AL022318, AF015150, AL079295, AF015170, |
| | | | | | AC002984, AP000302, AC005911, AL050097, |
| | | | | | U14694, AF015162, AF015155, AC005775, |
| | | | | | AF064861, AC002565, Z93241, AF015157, |
| | | | | | AC004890, AC004653, U38672, AC006195, |
| | | | | | AL023494, AL021578, U12582, AP000044, |
| | | | | | AP000112, AC005037, AC005621, AF015151, |
| | | | | | AF015153, AC005081, AC006946, U14693, |
| | | | | | U14716, AC006251, AL031123, Z30960, |
| | | | | | AC006006, AC006525, AC005907, U67221, |
| | | | | | X88791, AC005664, AL031650, Z30958, |
| | | | | | AC006480, AC004876, AP000114, AP000046, |
| | | | | | AC007092, U67832, AC005682, L81648, |
| | | | | | AC004692, AC00O353, AC005168, AC000097, |
| | | | | | U12584, AC003047, U67831, AC004671, |
| | | | | | AL031432, AF140763, AC006547, AC007363, |
| | | | | | AL049647, AC005015, AC005488, U67801, |
| | | | | | AC002072, AF015167, Z84721, AL050327, |
| | | | | | S38629, AF003627, U14706, AR042836, |
| | | | | | AC003037, AL022238, AC006211, AL031668, |
| | | | | | AC005324, AF015168, AC009533, AC005175, |
| | | | | | U67231, AL021453, AC004797, AC005822, |
| | | | | | AF207550, AP000965, AL049557, U95740, |
| | | | | | AC007191, AP000345, AL031662, AC002470, |
| | | | | | AB020859, AC003086, Z99754, Z85999, |
| | | | | | AL117693, AC002347, AC007051, AC005755, |
| | | | | | AL133246, AL031671, AP000298, AC005863, |
| | | | | | AL049636, AC002111, Z85987, AC005514, |
| | | | | | Z49816, AC007751, AL049795, U67214, |
| | | | | | AC007919, AC002429, AC004193, AP000517, |
| | | | | | AC005330, AC006065, AJ006996, AC003043, |
| | | | | | AC004750, AC002430, AC005839, AC006144, |
| | | | | | AC006333, AC007390, AC005288, AC004217, |
| | | | | | AC003664, S43650, AF015158, AC004647, |
| | | | | | U67208, AP000557, and AC006537. |
| HFEAO67 | 86 | 954402 | 1-332 | 15-346 | AA339975, and D79987. |
| HFEAQ11 | 87 | 530368 | 1-228 | 15-242 | L05187. |
| HFEAS89 | 88 | 960624 | 1-297 | 15-311 | |
| HFEBB19 | 89 | 974533 | 1-315 | 15-329 | |
| HFEBB35 | 90 | 974535 | 1-344 | 15-358 | AC004832. |
| HFEBD62 | 91 | 789763 | 1-384 | 15-398 | R83124, and AA196223. |
| HFEBF21 | 92 | 974270 | 1-677 | 15-691 | |
| HFEBG06 | 93 | 935683 | 1-400 | 15-414 | |
| HFEBL88 | 94 | 766085 | 1-347 | 15-361 | |
| HFJAA51 | 95 | 725626 | 1-38 | 15-52 | |
| HFJAA62 | 96 | 855107 | 1-317 | 15-331 | |
| HKAAU11 | 97 | 966953 | 1-500 | 15-514 | |
| HKABE64 | 98 | 879492 | 1-498 | 15-512 | AW376201, and AA627838. |
| HKABR48 | 99 | 702372 | 1-809 | 15-823 | AA425985, AW207504, and AI814319. |
| HKACB30 | 100 | 466848 | 1-457 | 15-471 | AI458016, R21817, AI868552, and R31545. |
| HKACG80 | 101 | 750256 | 1-260 | 15-274 | AW090350. |
| HKACL95 | 102 | 973360 | 1-438 | 15-452 | AL050402. |
| HKACM63 | 103 | 952653 | 1-340 | 15-354 | |
| HKACU93 | 104 | 908022 | 1-680 | 15-694 | AI638185, AI671593, R71971, T50004, |
| | | | | | AL046617, AI914383, AW138307, AI674324, |
| | | | | | AI949564, AI142072, AA570066, AI742499, |
| | | | | | AI479463, T50068, AI122805, AI761880, |
| | | | | | AA830700, AI568996, R41893, Z39599, |
| | | | | | AW082505, AA813488, AI093737, AI084809, |
| | | | | | AA399698, AA524373, AW007182, AA679760, |
| | | | | | AI884960, AW074068, F09966, AI251901, |
| | | | | | AI817048, AI252796, AI188121, AI198822, |
| | | | | | AI214746, AI669938, AA693373, AW026971, |
| | | | | | AI186439, AI205542, H73575, N34395, |
| | | | | | H73578, AA532630, AI298055, AI160287, |
| | | | | | AI149480, AA868175, AI184899, AI743109, |
| | | | | | AI803350, AA983983, and AL137593. |
| HKACY54 | 105 | 862787 | 1-344 | 15-358 | AI292099, H18280, AA485264, W38023, |
| | | | | | AA007261, AW136965, AW269962, W78976, |
| | | | | | AI904882, W80358, and AA514672. |
| HKADC82 | 106 | 944994 | 1-517 | 15-531 | AA256009, and Z73417. |
| HKADP74 | 107 | 765535 | 1-582 | 15-596 | W94875, AL041446, AW246310, AF063308, |
| | | | | | and AC005726. |
| HKAEC04 | 108 | 857355 | 1-342 | 15-356 | AI125876. |
| HKAEE60 | 109 | 812691 | 1-282 | 15-296 | AI910382, AI219334, AI219219, AI760454, |
| | | | | | AI738963, AA339789, C00167, and AL031848. |
| HKAEP23 | 110 | 672808 | 1-452 | 15-466 | AW247811, AW250381, and AA380312. |
| HKAEV94 | 111 | 973353 | 1-338 | 15-352 | AC008039. |
| HKAFI36 | 112 | 930711 | 1-377 | 15-391 | AI128862, AI436219, AI762629, AI140124, |
| | | | | | AI083708, AI560407, N99923, AI081307, |
| | | | | | AI079414, AW075617, AI818253, AI337194, |
| | | | | | AI051901, AA977275, AW172809, AA844432, |
| | | | | | AI028509, N90737, AI129280, AI305175, |
| | | | | | AI093068, AA917896, AI371771, N33210, |
| | | | | | AI969645, AW274900, AA767460, AI968452, |
| | | | | | N62347, AI220982, AI366857, AI339129, |
| | | | | | AI767826, N22977, AI468435, AA808772, |
| | | | | | AW339504, H98061, AI382792, AA844288, |
| | | | | | W72121, R71572, T59679, AI246615, W00679, |
| | | | | | R26150, H09357, AW205368, R79310, |
| | | | | | AI470782, AI298271, AI669872, AA456488, |
| | | | | | T83949, AI090659, N69012, AI186457, N55580, |
| | | | | | AI591349, T52657, AI572199, T50395, |
| | | | | | AA009877, AI191207, AI382962, AA708919, |
| | | | | | W32002, AA670114, AI381783, AI719049, |
| | | | | | AI917594, AA724702, AA533788, AA131531, |
| | | | | | AA678747, AI678470, Z38204, AA625429, |
| | | | | | AA009529, R45949, C01143, AW137248, |
| | | | | | U48336, AA738250, and AI446034. |
| HKAFO42 | 113 | 713722 | 1-542 | 15-556 | R94601, AA342675, AW131267, F02125, |
| | | | | | AA236551, R81911, AI678532, H15432, |
| | | | | | AA599318, AA620448, AA535635, AI394475, |
| | | | | | R38735, T67404, T68558, R73365, T68316, |
| | | | | | T85192, AL043229, R70120, U96629, |
| | | | | | AC004765, AL049553, AP000348, AF088219, |
| | | | | | AC007685, AL031291, AL049830, AC004491, |
| | | | | | AC005231, AC005531, D87675, AF126403, |
| | | | | | AC005753, AC005399, AC005015, AC006285, |
| | | | | | Z95113, AC007055, AL096701, AC005529, |
| | | | | | AC005527, AL109963, AC006141, AC004675, |
| | | | | | AC005519, Z98941, AC004750, AC004854, |
| | | | | | AC004477, AC006449, AL034417, AC004596, |
| | | | | | AF024533, AC000353, AL109952, Z85987, |
| | | | | | AC005233, AC006512, AC005666, AC007541, |
| | | | | | AL049832, AC002472, AC007227, AC004647, |
| | | | | | AC002483, AC006487, M89651, AC004079, |
| | | | | | AC005088, AC004583, AL079295, AC003029, |
| | | | | | AC005755, Z93341, AC005225, AL121852, |
| | | | | | AC005004, AP000143, AL031393, AC006537, |
| | | | | | AL031735, AP000090, AC002302, AL050318, |
| | | | | | AC003982, AL022320, AL109839, AC004033, |
| | | | | | AL022165, Z95115, U95742, AL021977, |
| | | | | | AC007731, AL135744, AL034429, AC005696, |
| | | | | | AC005500, AP000949, AC005288, AL121603, |
| | | | | | and Z84469. |
| HKAFZ12 | 114 | 970570 | 1-463 | 15-477 | |
| HKAHF84 | 115 | 887386 | 1-320 | 15-334 | AF095719. |
| HKAHI83 | 116 | 780669 | 1-504 | 15-518 | AC005598. |
| HKAHT29 | 117 | 958404 | 1-45 | 15-59 | |
| HKAIF25 | 118 | 974416 | 1-213 | 15-227 | |
| HKAIL12 | 119 | 893937 | 1-287 | 15-301 | AL035588. |
| HKAIU82 | 120 | 779322 | 1-502 | 15-516 | |
| HKAJG02 | 121 | 857330 | 1-660 | 15-674 | AI609622, AI668709, AA747150, and N93967. |
| HKAJR01 | 122 | 915313 | 1-267 | 15-281 | |
| HKAJW52 | 123 | 836587 | 1-158 | 15-172 | AF154107, and AJ245539. |
| HKAKI80 | 124 | 973231 | 1-560 | 15-574 | AC004991. |
| HKAKL94 | 125 | 782287 | 1-106 | 15-120 | AI239832, and N36064. |
| HKAKP85 | 126 | 927032 | 1-361 | 15-375 | |
| HKAOE10 | 127 | 963543 | 1-512 | 15-526 | AI969269, R39098, AA811689, AA302657, |
| | | | | | W27874, AA308708, R94832, AA767864, |
| | | | | | R84431, AI374601, Z96210, Z96209, |
| | | | | | AC009225, AC005015, AL109782, AC002472, |
| | | | | | AC002070, AC002470, AL022476, AL078583, |
| | | | | | AB004907, AC006930, AC004686, AL009172, |
| | | | | | AC004462, AC004461, L77570, AC005514, |
| | | | | | AL078621, AC005874, AF134471, AC005815, |
| | | | | | AC002395, AC005920, AC005187, AL121658, |
| | | | | | AP000047, AP000115, AL121653, Z97352, |
| | | | | | AC000025, AC005527, AC008119, AL133163, |
| | | | | | AC005529, AC002425, AC006509, AC003003, |
| | | | | | AC004685, Z49235, AC003963, AP000251, and |
| | | | | | AP000030. |
| HKAOM71 | 128 | 761303 | 1-479 | 15-493 | |
| HKAON82 | 129 | 779247 | 1-583 | 15-597 | AA284297, W46190, AI301143, W46354, |
| | | | | | AA258492, AW183753, AI864177, AF086184, |
| | | | | | and AF093239. |
| HKAOU93 | 130 | 791779 | 1-742 | 15-756 | AW451488, AI338940, R62633, W72910, |
| | | | | | AI739528, AI016891, AI147482, R78135, |
| | | | | | H87957, and R63510. |
| HKAPN78 | 131 | 973220 | 1-809 | 15-823 | AW083934, AA809546, AA128511, AA601376, |
| | | | | | AL119483, AA640305, H73230, AI053911, |
| | | | | | AA826079, AA730530, AA572715, AI040051, |
| | | | | | H58354, AI242994, AW419389, AA302973, |
| | | | | | T50694, AA470933, AA862243, AA832077, |
| | | | | | AI682665, AI753488, C14614, AA574442, |
| | | | | | AI620014, AI567676, AI619933, AA603530, |
| | | | | | AA483599, AA483912, AI570067, H61079, |
| | | | | | AA380695, AL109627, AC004460, AL023553, |
| | | | | | AC004760, AF165926, AL121603, AC003109, |
| | | | | | AL049830, AC004167, AC000004, AC004491, |
| | | | | | AL031230, AP000555, AL049776, AC005520, |
| | | | | | AL022313, AL049793, AC003030, AF001549, |
| | | | | | AL031846, AC004253, Z97056, AC006312, |
| | | | | | AC004975, AC004150, AF196779, AL022721, |
| | | | | | AC005786, Z84486, AP000692, AC005253, |
| | | | | | AC005777, AC005393, AC008044, AC004125, |
| | | | | | AL021408, AP000245, AC007565, AC006211, |
| | | | | | AC005300, AL031683, AP000348, AC012099, |
| | | | | | AC000025, AL035072, AL109798, AC005884, |
| | | | | | Z97632, AC005803, AL049759, AC008015, |
| | | | | | AC006111, AC002996, AC005754, AF111168, |
| | | | | | AC004190, AC006530, AL021578, AC005274, |
| | | | | | AC005585, Z83844, AC004797, AC004895, |
| | | | | | AL031311, AC004970, AC007371, AC000115, |
| | | | | | AP000558, Z82188, AC003070, Z73979, |
| | | | | | AC016831, AJ246003, AF126531, Z82208, |
| | | | | | AL022336, AP000153, AL031284, AL031255, |
| | | | | | AL020997, AC004552, AC004476, AL022165, |
| | | | | | AP000516, Z93017, AP000563, AC004703, |
| | | | | | AL132712, D00591, AL121658, AC007226, |
| | | | | | AC006166, AJ251973, Z98051, AL031680, |
| | | | | | AL133448, AL049713, AC005332, AP000128, |
| | | | | | AP000206, AP000510, AP000211, AP000133, |
| | | | | | Z84497, AL109628, AC007308, AC000035, |
| | | | | | AC005015, U47924, AC002468, AC004106, |
| | | | | | AC005971, AC007237, AL035420, AC005725, |
| | | | | | AL031447, AL031282, AL049795, AC004000, |
| | | | | | AB023051, AC004686, AL096701, AC007324, |
| | | | | | AP000556, AP000557, AC008101, AL033521, |
| | | | | | AC006064, AC016027, AC005089, AC005839, |
| | | | | | AC004020, AC004263, Z69719, AL031774, |
| | | | | | AC002350, AC008079, L78833, AL031258, |
| | | | | | AL031662, AC005529, AL035445, AC005527, |
| | | | | | AC006509, AC007899, AL049829, AC003007, |
| | | | | | AL022315, AC005778, AC004254, AC007637, |
| | | | | | AL023882, AC004893, AL049694, Z98749, |
| | | | | | AC005722, AL049540, AC006116, AC007314, |
| | | | | | AC003108, AC005829, AC005207, AC006511, |
| | | | | | AC005046, AC004454, AP000512, AC005017, |
| | | | | | AL009179, AC005519, AC002420, AC004814, |
| | | | | | AL020995, U37450, AC005632, AC006039, |
| | | | | | AC004859, AC007040, AC007160, AC002316, |
| | | | | | Z99716, AL022318, and AC000393. |
| HOUAT14 | 132 | 527920 | 1-319 | 15-333 | |
| HOUBL71 | 133 | 527805 | 1-287 | 15-301 | AI193579, AC005726, AC002101, and |
| | | | | | AC001227. |
| HOUCL76 | 134 | 531425 | 1-162 | 15-176 | |
| HOUCR21 | 135 | 936034 | 1-391 | 15-405 | AI937060, AI199773, AB033039, A91749, |
| | | | | | A91755, A91747, A91750, and A91751. |
| HOUCR26 | 136 | 573977 | 1-421 | 15-435 | AI525267, and AI525263. |
| HOUCS27 | 137 | 682162 | 1-339 | 15-353 | AB018275. |
| HOUCS91 | 138 | 526717 | 1-339 | 15-353 | AI473849, AI192631, AI521679, AA493680, |
| | | | | | AA715004, N89015, AL134077, AA368745, |
| | | | | | AA694169, AA715606, AI471374, AI352612, |
| | | | | | AL121385, F25867, AW118338, R22239, |
| | | | | | AA827978, AA559182, AA573068, AA377404, |
| | | | | | AL120976, AA601270, AL037285, AA626637, |
| | | | | | AA682189, AA488746, U91321, AC008928, |
| | | | | | AC007934, U47924, AC005616, AC006989, |
| | | | | | AF053356, AC007695, AP000008, AP000704, |
| | | | | | AJ006997, AC008124, AC004814, AL021937, |
| | | | | | AC011604, AC006539, U91324, AL031846, |
| | | | | | AC007774, AP000961, AC005747, AC005041, |
| | | | | | AC005542, AF024533, AC005086, Z82194, |
| | | | | | AC000353, AC006241, Y07755, AC006974, |
| | | | | | AC004002, AC000026, AL049557, AC002059, |
| | | | | | AC002525, AC004963, AC004612, Z84477, |
| | | | | | AL008731, AC002543, AL008634, AF069291, |
| | | | | | AC003101, AF049895, AC000066, Z83826, |
| | | | | | AJ010770, AC004382, AC004811, AC004675, |
| | | | | | AC004921, AC006441, AP000553, AC007263, |
| | | | | | AC009516, AF088219, AC006211, AC006255, |
| | | | | | AC003959, AC002301, AL021878, AC004859, |
| | | | | | U85195, AE000658, AL121825, AC005071, |
| | | | | | AC006561, AC002565, AC009263, AL049830, |
| | | | | | AC002470, AL008708, L48038, AF176815, |
| | | | | | AL096767, AC012599, Z99497, AC004150, |
| | | | | | AC003683, AF165138, AC005589, AC004477, |
| | | | | | AC006455, Z99570, and Z98946. |
| HOUDC46 | 139 | 719181 | 1-413 | 15-427 | |
| HOUDJ40 | 140 | 573873 | 1-393 | 15-407 | |
| HOUDN50 | 141 | 724607 | 1-59 | 15-73 | |
| HOUDX25 | 142 | 524248 | 1-308 | 15-322 | AI547239, and AR040737. |
| HOUEN50 | 143 | 573874 | 1-271 | 15-285 | AC010517, and M20439. |
| HOUFB87 | 144 | 837251 | 1-1273 | 15-1287 | T07874, AA410788, AA228778, AW069227, |
| | | | | | AA721645, AA284247, AA176604, AI056177, |
| | | | | | AA862183, R16221, AA984263, AW403644, |
| | | | | | AI457313, AI446336, AI634187, R81017, |
| | | | | | AA176978, AA916430, AI282479, AI251429, |
| | | | | | AI678867, W02749, AW084445, AA757426, |
| | | | | | AI571161, AA527209, AA713705, AI791185, |
| | | | | | AA668455, AI049504, AW192373, AI744905, |
| | | | | | AI362442, AI890324, AI821076, AA371519, |
| | | | | | Z82190, AL031255, AL022326, AC016830, |
| | | | | | Y14768, AP000505, AC005049, AC002316, |
| | | | | | AC008115, AL049760, AC016027, AP000350, |
| | | | | | AC006430, AL008729, AC002310, AC003663, |
| | | | | | AC006146, AC005231, U95742, AC005225, |
| | | | | | AL096791, AC006449, AC005736, Z94056, |
| | | | | | AC006088, AC007216, AC007308, AL139054, |
| | | | | | AC006121, AC004985, AC005538, AC004967, |
| | | | | | AC006285, AC005081, AF001548, AC006141, |
| | | | | | AC009247, Z98742, AC005821, AL031120, |
| | | | | | AL034417, AC005940, Z83838, AC005921, |
| | | | | | AL035249, Z95114, AC004813, Z82215, |
| | | | | | AC008012, AC003982, AF196972, AC007938, |
| | | | | | AC008101, AC005015, AC005317,AC002115, |
| | | | | | AC004033, AC005666, AL049830, AP000553, |
| | | | | | AC006312, AC004966, AL031311, AL049636, |
| | | | | | D28126, AC005082, AC005412, AC007421, |
| | | | | | AL133485, AL022315, AL096701, AC004841, |
| | | | | | AC005280, AC004854, Z84469, AL031985, |
| | | | | | AC005722, AC002350, AC004491, U91323, |
| | | | | | AF196969, AC005255, AP000215, AC005088, |
| | | | | | AC006511, AP000556, AC006120, AL035071, |
| | | | | | AC007151, AC005399, AC005484, AC005952, |
| | | | | | Z84474, U82828, Z49236, AC005089, L44140, |
| | | | | | AC005924, AC006205, AF134726, Z83840, |
| | | | | | U52112, AL121825, AF196779, AC004983, |
| | | | | | AL035460, AC012384, AL096703, AL031584, |
| | | | | | AL034549, AC009516, AC005086, AP000503, |
| | | | | | AF001549, AL035683, AC007462, AC004890, |
| | | | | | AC007283, Z83844, AC004858, AC006538, |
| | | | | | AC005694, AC005102, Z98941, AP000692, |
| | | | | | Z85996, Z97181, AC002549, AC004821, |
| | | | | | AC007842, AC005288, AC004084, AC005409, |
| | | | | | AC004079, AC004883, AC005383, AC005046, |
| | | | | | AL049776, Z83847, Z93930, AL022316, |
| | | | | | AC004106, AC002456, AC002477, AC004253, |
| | | | | | AC006450, AC007327, AC003077, AC005730, |
| | | | | | AC006077, AC005011, AC005527, AC005839, |
| | | | | | AC005529, AB023051, AL031588, AL031733, |
| | | | | | AC006126, AL133246, AL022723, AC012627, |
| | | | | | AC005971, AP000353, AC006115, AC006441, |
| | | | | | AC007207, AC002565, Y18000, L78833, |
| | | | | | AL031670, AB016897, AC000134, AC007386, |
| | | | | | AC004834, AL031848, AL031597, AC006023, |
| | | | | | AP000114, AP000046, AC007666, AC020663, |
| | | | | | AP000116, AC004181, AC004673, AC005216, |
| | | | | | AC006011, AC002563, AF039907, AC006480, |
| | | | | | AL021391, AC005291, AL031657, AL121653, |
| | | | | | AC004560, AF111169, Z97054, AC004953, |
| | | | | | AL049829, AC006487, Z68276, AC007242, |
| | | | | | AL049653, AC005632, AC005562, AC007227, |
| | | | | | AL049758, AC010582, AC006530, AC004973, |
| | | | | | AC006071, AL022320, AC005740, AL021397, |
| | | | | | AL049569, AC002072, AC004447, AL031295, |
| | | | | | AC006965, AL078477, AL049699, AP000694, |
| | | | | | AC005034, AL034420, AC005245, AC004027, |
| | | | | | AL031291, AC007388, AD001527, AC002301, |
| | | | | | AL132777, AC000353, AC007934, U95739, |
| | | | | | AC004859, AC004895, AC004019, and |
| | | | | | AC008975. |
| HOUFQ33 | 145 | 701762 | 1-233 | 15-247 | AC007566. |
| HOUFT79 | 146 | 774089 | 1-247 | 15-261 | |
| HOUFV24 | 147 | 676834 | 1-465 | 15-479 | |
| HOUFV31 | 148 | 697592 | 1-507 | 15-521 | |
| HOUFV52 | 149 | 840297 | 1-416 | 15-430 | |
| HOUFW07 | 150 | 952632 | 1-276 | 15-290 | |
| HOUFZ64 | 151 | 750784 | 1-238 | 15-252 | AA626610, AA337446, AA043392, AA331241, |
| | | | | | and R73312. |
| HOUGD02 | 152 | 915761 | 1-163 | 15-177 | AJ010597, and AL034449. |
| HOUGD13 | 153 | 656607 | 1-299 | 15-313 | |
| HOUHU87 | 154 | 791044 | 1-222 | 15-236 | AC003692. |
| HSTAE16 | 155 | 827112 | 1-332 | 15-346 | AA379213, AA379240, and AA379239. |
| HSTAE32 | 156 | 508961 | 1-250 | 15-264 | AA379241, AA379245, AA604601, AC004783, |
| | | | | | AL133243, AC000353, AC005280, AC005863, |
| | | | | | AC009225, K01254, AL049743, AC007406, |
| | | | | | AF064860, AC005803, AC002433, AL034451, |
| | | | | | U80017, AL035106, AC003106, AL031311, |
| | | | | | AL031284, AL050307, U33956, AP000696, |
| | | | | | AC005037, AF001551, and AC005031. |
| HSTAE39 | 157 | 584942 | 1-262 | 15-276 | AA379480, AA379243, N94284, AA210963, |
| | | | | | AA398818, AA984128, R19246, AA873870, |
| | | | | | AA701972, AA055424, AI452734, AA253196, |
| | | | | | R67150, AA709403, R99793, AA195569, |
| | | | | | W07346, AW406496, AA771870, AA354699, |
| | | | | | AA877379, N41911, AA682271, AA325041, |
| | | | | | W78722, N23537, H70834, AA488125, |
| | | | | | AA370219, H63178, H00372, H94913, H29143, |
| | | | | | AA296514, H82678, H59535, AA320994, |
| | | | | | C00575, H72562, N73052, AA211153, H17757, |
| | | | | | W26930, AI568505, T60220, R35222, W28281, |
| | | | | | AI808089, AI624799, and AA187655. |
| HSTAH26 | 158 | 861435 | 1-476 | 15-490 | AA641939, AW236412, AA501373, AA665577, |
| | | | | | AA379351, AA379782, AI039224, AI202036, |
| | | | | | R21530, AJ050010, W74071, AW250933, |
| | | | | | AA633084, AA580812, AI805593, AI859865, |
| | | | | | AA148885, AA470717, AA701342, AA211366, |
| | | | | | AA888717, AI356701, AI637600, AW026749, |
| | | | | | AI916938, AI990735, R99175, W79382, |
| | | | | | AI825218, AA353207, AW059665, AA493318, |
| | | | | | AI065092, AI538247, AA148884, AI050947, |
| | | | | | AW025168, AI636827, and AI700158. |
| HSTAL08 | 159 | 960473 | 1-345 | 15-359 | AA379434, AA379435, AA380002, and |
| | | | | | AA380033. |
| HSTAL23 | 160 | 508812 | 1-295 | 15-309 | AL134728, AA379440, AA379975, and |
| | | | | | AC008064. |
| HSTAL64 | 161 | 508813 | 1-322 | 15-336 | AA379527, AI758948, AA379948, and |
| | | | | | AA379262. |
| HSTAL92 | 162 | 508820 | 1-288 | 15-302 | AA379412, AA379324, and AL023694. |
| HSTAO16 | 163 | 508808 | 1-346 | 15-360 | AA379691, AA379508, and AA199864. |
| HSTAP23 | 164 | 508802 | 1-334 | 15-348 | AA379825, and AA379564. |
| HSTAP31 | 165 | 508803 | 1-277 | 15-291 | AA379769, AA379768, and AA379568. |
| HSTAP89 | 166 | 508805 | 1-310 | 15-324 | AA379549, AA379695, and AA379479. |
| HSTAQ54 | 167 | 968671 | 1-280 | 15-294 | AA379987, AA379631, AA379302, and |
| | | | | | AA379303. |
| HSTAQ67 | 168 | 508800 | 1-401 | 15-415 | AA379713, AA379585, and AI909060. |
| HSTAX16 | 169 | 508960 | 1-98 | 15-112 | AA379755, and AA379612. |
| HSTAX68 | 170 | 508797 | 1-122 | 15-136 | AA379715, and AA379716. |
| HSTAZ54 | 171 | 508368 | 1-323 | 15-337 | AA379890, AA379972, AB011162, and |
| | | | | | AL133297. |
| HSTBC04 | 172 | 506961 | 1-276 | 15-290 | T35873, T35870, AA379980, R09424, M79174, |
| | | | | | R16269, AA286926, AW387005, AA115072, |
| | | | | | AW387011, AA480967, AW386994, |
| | | | | | AA160074, AA419194, AA573369, AL050149, |
| | | | | | Y08698, Y08697, AC004602, and Y08699. |
| HSTBJ41 | 173 | 526608 | 1-197 | 15-211 | AA380153, AA380233, and Z83851. |
| HWDAC04 | 174 | 927471 | 1-388 | 15-402 | W95816. |
| HWDAC71 | 175 | 752776 | 1-122 | 15-136 | |
| HWDAG13 | 176 | 746132 | 1-354 | 15-368 | |
| HWDAN69 | 177 | 676671 | 1-574 | 15-588 | |
| HWDAO04 | 178 | 927231 | 1-316 | 15-330 | AI298104. |
| HWDAO26 | 179 | 679520 | 1-436 | 15-450 | AP000127, AP000205, AP000244, and U03686. |
| HWDAP03 | 180 | 923319 | 1-360 | 15-374 | AI524995, AL078621, and Z96200. |
| HWDAS34 | 181 | 703610 | 1-413 | 15-427 | AI734130, AI732734, AI741241, AA433997, |
| | | | | | AW043563, AI732741, AA437369, AA425820, |
| | | | | | AA426284, AL133619, AC004033, and |
| | | | | | AC007050 |
| HWDAS64 | 182 | 729159 | 1-480 | 15-494 | |
| HWDAS93 | 183 | 707809 | 1-202 | 15-216 | |
| HWEAD11 | 184 | 965030 | 1-419 | 15-433 | AA316239, and AA015579. |
| HWHGB20 | 185 | 669455 | 1-695 | 15-709 | AW062329, W70164, AA706790, AA328482, |
| | | | | | AA328483, AI818367, AI858617, AA007658, |
| | | | | | AI697948, AI571759, AI096775, W07379, |
| | | | | | AA007657, AA733044, AI363365, AI123638, |
| | | | | | AI126856, AW015811, AA946988, AI571898, |
| | | | | | AI962208, AI365427, AI651148, AI970105, |
| | | | | | N80253, AI079735, AI983461, AW136943, |
| | | | | | AA040945, AW339376, W70106, AA983291, |
| | | | | | and AF037222. |
| HWHGB21 | 186 | 954002 | 1-514 | 15-528 | |
| HWHGB32 | 187 | 698891 | 1-402 | 15-416 | AA465324, AI541453, H93411, AA837473, |
| | | | | | D56451, AW008969, AI797289, D56220, |
| | | | | | AI394269, N30347, Z36872, H63216, |
| | | | | | AA248589, and AW009897. |
| HWHGB44 | 188 | 716369 | 1-401 | 15-415 | |
| HWHGL42 | 189 | 908227 | 1-432 | 15-446 | N57568, and T16687. |
| HWHGW34 | 190 | 670622 | 1-422 | 15-436 | |
| HWHHA18 | 191 | 665788 | 1-466 | 15-480 | |
| HWHID04 | 192 | 926251 | 1-487 | 15-501 | A429236, and AA436572 |
| HWHJA12 | 193 | 969044 | 1-580 | 15-594 | AW449534, AI421055, and AA463364. |
| HWHPF38 | 194 | 709502 | 1-390 | 15-404 | W86770, AA248713, and AC005042. |
| HWHPF60 | 195 | 675703 | 1-843 | 15-857 | W79014, T56655, H73294, R08414, N77361, |
| | | | | | W80406, AW364174, AI078359, AI051883, |
| | | | | | AA783039, AA476762, N74662, AF086122, |
| | | | | | and U91318. |
| HWHPJ63 | 196 | 744720 | 1-364 | 15-378 | |
| HWHPT41 | 197 | 658138 | 1-457 | 15 471 | |
| HWHQA86 | 198 | 785281 | 1-421 | 15-435 | AC005034. |
| HWHQI82 | 199 | 739230 | 1-203 | 15-217 | AA625249, AA402169, AC007059, and |
| | | | | | AC006128. |
| HWHQO07 | 200 | 952660 | 1-297 | 15-311 | R33091, AC004884, AC007938, AC003982, |
| | | | | | AF111168, AC006376, and AC005046. |
| HWHQO33 | 201 | 670190 | 1-323 | 15-337 | AA463659, AC007455, and D86424. |
| HWHQP22 | 202 | 674151 | 1-331 | 15-345 | AI688658, AI341299, AI208033, AI807003, |
| | | | | | AI653327, AA812828, and AW451464. |
| HWHQV08 | 203 | 958709 | 1-424 | 15-438 | |
| HWHQV13 | 204 | 656647 | 1-413 | 15-427 | AA430137, AW179305, AW179306, |
| | | | | | AA828637, AW168383, T62539, AA483126, |
| | | | | | AL049832, AL008582, AC007790, AC000134, |
| | | | | | AC004452, AC005553, AC007773, AL121653, |
| | | | | | AL121658, AB028964, AL049694, AC004644, |
| | | | | | AP000355, AC002051, U73629, AC002054, |
| | | | | | AC010168, AP000550, AC009275, AC007664, |
| | | | | | AF165926, AC008018, AC005013, AC004228, |
| | | | | | AC004594, AC000028, AL109984, AL035587, |
| | | | | | Z99716, AC002457, AL035604, AC007955, |
| | | | | | AF064861, AC004776, AC005231, and |
| | | | | | AC006111. |
| HWHQV57 | 205 | 734455 | 1-552 | 15-566 | AC005005. |
| HWHQX34 | 206 | 703785 | 1-377 | 15-391 | |
| HWHQX77 | 207 | 771865 | 1-375 | 15-389 | AA053463, AI431513, AA633799, H68343, |
| | | | | | H53546, AA302978, AI445373, T52366, |
| | | | | | AI003988, AA678932, AW440568, AA679625, |
| | | | | | AI798521, AA568971, AW238341, AI915081, |
| | | | | | AA744094, AA599080, T49451, AI445338, |
| | | | | | AA846923, AI302350, AW270258, AA573062, |
| | | | | | AA587826, AL042667, AL042670, AI049504, |
| | | | | | AA768179, T03576, AI433952, AI590404, |
| | | | | | T41134, AI049701, AA484298, AW081610, |
| | | | | | AW407974, AA526643, AA482323, AI619994, |
| | | | | | AA551548, N72678, AA632556, N73540, |
| | | | | | AI066646, AI357628, D58782, AI955029, |
| | | | | | AI300818, AA714140, T47739, AA584360, |
| | | | | | AA574286, AA373861, AA654038, AI499941, |
| | | | | | AI889579, AW238016, AL137946, AA633875, |
| | | | | | AL119563, AA515168, AA194858, AA323085, |
| | | | | | AI307563, AW152439, AI216981, AA018923, |
| | | | | | AI524022, R93882, AI738863, AA744048, |
| | | | | | AI224619, AI039257, AI310992, AA515351, |
| | | | | | AA514450, AI978712, AA507637, AW173443, |
| | | | | | AA533660, AI446574, AA513884, AL036665, |
| | | | | | AI869797, AA657374, AA478602, AL049776, |
| | | | | | AC006088, AC002470, AC006160, AP000965, |
| | | | | | AF134726, AE000661, AF107885, AC005358, |
| | | | | | AC005666, AC004983, AL031387, AC008009, |
| | | | | | AL035249, AL110502, AC009263, AC004638, |
| | | | | | Z99716, AC009516, AF196971, AC007358, |
| | | | | | AC005280, AL020997, AC002368, AC005874, |
| | | | | | AF134471, AC005988, AP000011, AC002367, |
| | | | | | AP000687, AL109839, AC004491, AC003026, |
| | | | | | AL096701, U91321, AC007066, AC004841, |
| | | | | | AC006441, AC006332, AC00O353, AC002430, |
| | | | | | AJ003147, AF001548, Z83848, U47924, |
| | | | | | AC005668, AC007384, AC005839, AC005736, |
| | | | | | AC005535, AP000688, AC007688, Z98051, |
| | | | | | AC002429, U80017, AC005538, AC004132, |
| | | | | | AL031678, AL117352, AL035534, AC006211, |
| | | | | | AC003009, AC007225, AL031651, AC004150, |
| | | | | | Z97054, AC006014, AP000008, AF064866, |
| | | | | | AL021397, AC006449, Z93930, Z84572, |
| | | | | | AL021069, AL008729, AC002558, AC005844, |
| | | | | | AP000493, AC004531, AC006487, AC005274, |
| | | | | | AC005031, AL109628, AC003663, AC003081, |
| | | | | | AL009181, AC004383, M26434, AP000251, |
| | | | | | AC006065, AL122021, AC005081, AB016897, |
| | | | | | AC004099, AL109623, AF205588, AC004033, |
| | | | | | AC000134, AC004542, AC005006, AL031776, |
| | | | | | AC005598, AC004458, AC005189, AP000692, |
| | | | | | AL049874, AC007919, AL022396, AL133245, |
| | | | | | AC006146, AE000660, AL121578, AP000030, |
| | | | | | AC005599, AC005670, AP000704, AC007285, |
| | | | | | AL049843, AC005696, AC004814, AC006965, |
| | | | | | AC004834, AC002544, AP000066, AC005233, |
| | | | | | AL109758, AC006430, AP000948, AC006511, |
| | | | | | AC003109, AP000466, AL023694, Z93020, |
| | | | | | AF055066, AL031311, AC005920, AF165926, |
| | | | | | Z85994, AL022323, AC006263, AL049611, |
| | | | | | AC004585, AC005017, AF152365, AP000472, |
| | | | | | AC005279, AC002038, AP000096, AC005913, |
| | | | | | AL049569, AC006254, AC007687, AL031286, |
| | | | | | AL121593, AC002543, AL009051, AC005036, |
| | | | | | AC007263, AC006241, AL117340, AL022097, |
| | | | | | AL049873, AC007277, AC009248, AL034451, |
| | | | | | AL049835, AC005884, AL021707, AL049780, |
| | | | | | AC003031, D84394, Z93942, AL049589, |
| | | | | | AC005488, Z82178, AL008719, AC005209, |
| | | | | | AL078472, AC005089, AC005618, AL031577, |
| | | | | | AL031228, AL031665, AC004813, AL034419, |
| | | | | | AL031587, AL049631, AC005632, U96629, |
| | | | | | AL049765, AC004520, AC005088, AL021367, |
| | | | | | Z82190, Z81364, AC003684, AL023876, |
| | | | | | AL022326, AC006075, AC000379, AC004149, |
| | | | | | AF053356, AC006I11, AC002553, AC006130, |
| | | | | | AJ011930, Y10196, AC004594, AC008124, |
| | | | | | AC007880, AL049709, AC005072, AC005180, |
| | | | | | AL121603, AC005837, AL049757, AP000240, |
| | | | | | Z99127, Z98742, AL121652, AC007314, |
| | | | | | AC006120, AP000116, Z94801, AC004382, |
| | | | | | AC006548, AF111168, AC004686, AC002425, |
| | | | | | U95090, AC006960, AC006006, AL031120, |
| | | | | | AL109759, AC005969, AC006544, AL121754, |
| | | | | | AP000023, AL078639, AC016027, Z98200, |
| | | | | | AC002492, AL008721, AC007539, AC005553, |
| | | | | | AL109853, and AL133445. |
| HWHQY11 | 208 | 966498 | 1-546 | 15-560 | |
| HWHQY18 | 209 | 628987 | 1-540 | 15-554 | AI961281, W25575, W73855, AA025948, |
| | | | | | W69100, W95776, W92535, W69380, |
| | | | | | AA359882, W68286, AA846828, AA022503, |
| | | | | | AI131566, AA706316, AA777022, AA480817, |
| | | | | | W95987, C00662, W95733, AI161236, |
| | | | | | AI141167, AW001367, W58747, AI148339, |
| | | | | | AA854719, AW009909, W94659, AI092860, |
| | | | | | AI150077, AI144221, AW009219, AD001502, |
| | | | | | and AF086315. |
| HWHQY36 | 210 | 708384 | 1-398 | 15-412 | AA046311, AI083557, AI206370, and C00645. |
| HWHRA44 | 211 | 716334 | 1-297 | 15-311 | AI168274, AI284425, AI950359, AI801031, |
| | | | | | AA461430, AW191939, AA573663, W80696, |
| | | | | | M77904, AA618172, AA468952, AA632469, |
| | | | | | AA534221, AA632695, AA774006, AI249128, |
| | | | | | T68597, AA210711, AA174138, AI251576, |
| | | | | | AI306232, AW274191, AA985662, AI583466, |
| | | | | | AA468491, AI734154, AI473995, AI732760, |
| | | | | | AI073373, T49184, W24698, AI283022, |
| | | | | | AA385740, AA318347, AI891038, AI092694, |
| | | | | | AA491864, AA579437, AI285486, AA501781, |
| | | | | | H73306, N53352, H27102, N21111, AI754286, |
| | | | | | W45073, AI204350, AI114828, H05449, |
| | | | | | AA705418, AA665248, AA481408, AI678676, |
| | | | | | F31203, AI002969, AA906657, AA632493, |
| | | | | | AA632484, AI274006, AA736485, AA805014, |
| | | | | | AI382205, AI567831, W38349, AA480216, |
| | | | | | AA501976, AA366601, AI445768, AW419389, |
| | | | | | AA586553, T96546, AA525963, AA568314, |
| | | | | | AI889648, AI613487, AA653009, H58891, |
| | | | | | AI336206, AA326245, AA742775, AI298166, |
| | | | | | AB017567, AE000658, AL031055, AL034555, |
| | | | | | AC007262, AC005007, AC005206, AC005191, |
| | | | | | AC005667, AC005696, AC008064, AC005049, |
| | | | | | AF111167, AC005033, AC006543, Z95116, |
| | | | | | AC007676, AL121653, AC006544, AP000952, |
| | | | | | AC006449, AL023807, AC016027, AC009509, |
| | | | | | AF196970, AL033521, AL117258, AC004583, |
| | | | | | AC008115, AF111168, AC016830, AL109938, |
| | | | | | AC007057, AL049872, AC004884, U91323, |
| | | | | | AC004216, Z84484, AL031280, AC005666, |
| | | | | | AC004861, AC005225, AL139054, AC007450, |
| | | | | | AL133245, AL109758, U91327, AB023051, |
| | | | | | D84394, AC007382, AL135744, AL132985, |
| | | | | | AC004876, AC015853, AL008582, AP000512, |
| | | | | | AC006101, AC006120, AP000346, AL079340, |
| | | | | | AC007226, AL109628, AC006059, AC005274, |
| | | | | | AB023048, AC004694, AC002349, AL022097, |
| | | | | | AL021397, AC002352, AC007655, AC005500, |
| | | | | | AL021579, AC005730, AC005351, U85195, |
| | | | | | AL034400, AB020863, AJ246003, AC006128, |
| | | | | | AC005785, AC005082, AC005037, AL022163, |
| | | | | | AC005537, AC005480, AC002395, AC005969, |
| | | | | | AC006026, U91321, AC005229, AC002300, |
| | | | | | AL049781, AL033518, AC007488, AL133243, |
| | | | | | AC002350, AC005242, AC018633, AC004534, |
| | | | | | AC002375, AL133353, AL117354, AL049766, |
| | | | | | AC007458, AL079305, AL031056, AL121658, |
| | | | | | AL031005, AC007546, Z97054, AL009183, |
| | | | | | AC007055, AC002470, AC005332, AL132777, |
| | | | | | AC003065, AC007304, AL008723, AL034420, |
| | | | | | AL049780, AC007425, AC007842, AC002326, |
| | | | | | AC006946, AC007738, AC004983, Z82203, |
| | | | | | AC004854, Z83820, AC005041, AL023799, |
| | | | | | AC006249, AC007687, AC002365, AL008718, |
| | | | | | AC004813, Y12377, Z98036, AF049895, |
| | | | | | AL033403, AC004382, AC004659, AC000353, |
| | | | | | AL079295, AC000134, AL079342, Z97632, |
| | | | | | AC008282, AC003950, AL078475, AC004905, |
| | | | | | AC005158, AC005023, AP000350, AC012384, |
| | | | | | AC006241, AC006014, AC004605, AC007551, |
| | | | | | AC007198, AC005670, AC005520, AC007114, |
| | | | | | AL133371, AC004987, AC006600, Y18000, |
| | | | | | AC004466, AC005587, AC005377, AL009031, |
| | | | | | AP000493, AC002477, AC007388, AC007964, |
| | | | | | AL031296, AC002996, AC002541, AC004104, |
| | | | | | AC005722, AL049830, AC007277, AB023049, |
| | | | | | AC005620, AC005209, AC004212, AC006270, |
| | | | | | AL022395, AF111169, AL035079, AC002551, |
| | | | | | AC008018, AC006430, AC007363, L78810, |
| | | | | | AL035086, AC004000, AC007690, AL117339, |
| | | | | | AC002553, AL121577, Z84572, AC003043, |
| | | | | | AL031681, AC005015, AC006285, AC005066, |
| | | | | | AL121694, AL035090, AL049829, AL031589, |
| | | | | | Z99129, AF109718, and AC005529. |
| HWHRA91 | 212 | 789529 | 1-360 | 15-374 | AA209277, L44490, AC002504, and D49678. |
| HWJAC59 | 213 | 761620 | 1-95 | 15-109 | AW168031, AW105429, AI669639, AA508657, |
| | | | | | AW074702, AI677797, AI524179, AI631398, |
| | | | | | AI886206, AI089970, AW085786, AI824648, |
| | | | | | AW189802, AL040011, AW151034, AI745713, |
| | | | | | AA514684, AI567827, AI597918, AI887163, |
| | | | | | AW265004, AW089508, AI357599, AI860697, |
| | | | | | AW078729, AI433157, AI702073, AI744243, |
| | | | | | AW088560, AI673278, AI918554, AI886055, |
| | | | | | AI348914, AI285431, AW089932, AI433611, |
| | | | | | AI812015, AI613017, AW084447, AW148408, |
| | | | | | AW168849, AW302988, AI950865, AI934147, |
| | | | | | AW129269, AI749373, AA835966, AI612920, |
| | | | | | AI050666, AI929108, AW085639, AW089275, |
| | | | | | AW087534, AW117903, AI590575, AI242246, |
| | | | | | AL110306, AI953765, AA908294, AI560023, |
| | | | | | AI872810, AI648458, AI690946, AI241819, |
| | | | | | AI636719, AI679916, AI677646, AI783792, |
| | | | | | AA911767, AW130134, AW082532, |
| | | | | | AW262042, AI312542, AI309306, AI633125, |
| | | | | | AW129916, AI418128, AI921464, AW152182, |
| | | | | | AW084425, AW263796, AW029457, |
| | | | | | AW059568, AI095119, AI457369, AI670009, |
| | | | | | AI432030, AW263979, AWO81528, AI280637, |
| | | | | | AW025279, AI480118, AI365256, AI690410, |
| | | | | | AI812107, AI570774, AW081034, AI581139, |
| | | | | | AI954422, AI917963, AI539153, AI368816, |
| | | | | | AW054939, AI469157, AI453248, AW166865, |
| | | | | | AI697324, AI819326, AI886181, AI886594, |
| | | | | | AI564719, AI161279, AI679550, AI679214, |
| | | | | | AW083573, AL120853, AW131282, AI718161, |
| | | | | | AI923837, AI950729, AI537989, AI610671, |
| | | | | | AI637584, AI699056, AI915291, AI619716, |
| | | | | | AI559524, AI798544, AI952761, AI859644, |
| | | | | | AI286256, AI473536, AI590035, AI493543, |
| | | | | | AI559863, AI539578, AI921746, AW004886, |
| | | | | | AI539071, AI537617, AI915295, AW088899, |
| | | | | | AWl51652, AI818683, AW104724, AI925281, |
| | | | | | AI471548, AI610690, AI640370, AI690813, |
| | | | | | AI445025, AA829657, AA425380, AA830821, |
| | | | | | AI610086, AW089405, AW054972, AI521080, |
| | | | | | AI254727, AW080090, AI309769, AW168451, |
| | | | | | AI564426, AI630877, AI554186, AI537643, |
| | | | | | AW162189, AW162194, AI174591, AI280661, |
| | | | | | AI433206, AW087385, AI554544, AI624304, |
| | | | | | AI540382, AI874151, AI446405, AI265772, |
| | | | | | AL138386, AI589428, AI499263, AW081343, |
| | | | | | AI537303, AI040725, AI537991, AI582483, |
| | | | | | AI560806, AI360830, AW055252, AI432237, |
| | | | | | AW088793, AI249877, AW078710, AI579901, |
| | | | | | AI887151, AI333638, AI273791, AW082623, |
| | | | | | AI559596, AI922076, AI799313, AI220941, |
| | | | | | AI287862, AW150511, AI927233, AW080290, |
| | | | | | AW131952, AI698391, AI472566, AI811422, |
| | | | | | AI634707, AL120921, AWl51847, AI079736, |
| | | | | | AI573032, AI687362, AW168200, AI799244, |
| | | | | | AI889213, AI783861, AI673267, AI494201, |
| | | | | | AI672384, AA521431, AW131112, AI627714, |
| | | | | | AI889189, AW076124, AA808175, AI073952, |
| | | | | | AW173633, AW026121, AW188693, AI636788, |
| | | | | | AW073926, AW006302, AI373622, AI537074, |
| | | | | | AI889306, AI521476, AI566479, AW189549, |
| | | | | | AI677796, AI582240, AI653979, AW194014, |
| | | | | | AI266719, AI866801, AL050146, I30339, |
| | | | | | I30334, AB016226, AF118094, X53587, |
| | | | | | AL133080, AL133568, X65873, A86558, |
| | | | | | E01812, AF118090, AL133640, AL137459, |
| | | | | | S78214, I48978, M92439, AF109906, |
| | | | | | AF067420, AI8777, AL133010, I89947, |
| | | | | | AJ238278, AC006371, E03348, AF090934, |
| | | | | | E03349, E04233, AF038847, AF065135, |
| | | | | | AF140224, AL137530, AL137523, AL117626, |
| | | | | | A08913, AL034417, AF076464, AF215669, |
| | | | | | AF047716, A08912, AL080127, AL137660, |
| | | | | | AL137658, S79832, A08910, AF022363, |
| | | | | | AF081197, AF081195, A08911, U88966, |
| | | | | | A08909, AL133093, U75370, E15569, |
| | | | | | AR050959, A08907, A08908, AL050149, |
| | | | | | AC006039, S76508, AL117435, AF102578, |
| | | | | | E12747, U00686, AL110158, AF040751, |
| | | | | | AF042090, AF126247, X66862, S77771, I89931, |
| | | | | | AL110196, X52128, AF040723, I49625, |
| | | | | | Z72491, AL137281, AL133049, AR038854, |
| | | | | | AR029490, AB025103, AL035587, AF179633, |
| | | | | | I89934, AR013797, A57389, L40363, |
| | | | | | AF069506, U90884, AL137271, AL122106, |
| | | | | | AL122100, U96683, U91329, AF104032, |
| | | | | | AL022723, S61953, AL110171, AF078844, |
| | | | | | AC005992, A08916, AL049382, S82852, |
| | | | | | AL117585, Z37987, A21625, U66274, |
| | | | | | AL122118, AL117629, Z97214, AF182215, |
| | | | | | A58524, A58523, AL117463, X06146, X99257, |
| | | | | | AL080074, AF151109, AF090886, AL110225, |
| | | | | | AL117432, AL049465, AF113690, AR019470, |
| | | | | | A77033, A77035, AL133645, A76335, I42402, |
| | | | | | AF120268, AL080158, I32738, AR034821, |
| | | | | | AC002382, I22272, AL137463, AP111112, |
| | | | | | AC004822, AL137627, AB026995, AL080159, |
| | | | | | AR000496, AF113699, U39656, AL137538, |
| | | | | | AL137256, A27171, S53987, AI2297, |
| | | | | | AL133072, U77594, AL080060, L13297, |
| | | | | | AL137556, X82434, X79812, A65341, A76337, |
| | | | | | Y10936, I48979, M86826, AFO61795, |
| | | | | | AF151685, AF125949, AF199027, AL050138, |
| | | | | | AL137539, AL117648, AF067790, AF119337, |
| | | | | | AF114170, E05822, U92068, AF162782, |
| | | | | | AF143957, X63162, I46765, AR059958, |
| | | | | | AL122098, U68233, I92592, AL137529, |
| | | | | | AF108357, AJ003118, AF081571, Y08769, |
| | | | | | I89944, AR053103, A92311, Y16258, Y16257, |
| | | | | | E02756, Y16256, Y11254, U95114, Z82022, |
| | | | | | AL117416, X55446, AL133557, AL110228, |
| | | | | | AL137294, AL050393, AL137300, AL050170, |
| | | | | | AF141289, E12806, AF153205, AL117460, |
| | | | | | A07647, AL137558, AF180525, X72387, |
| | | | | | AL137479, AC004686, I00734, AL137429, |
| | | | | | AJ001838, AJ131955, AL049339, AF036941, |
| | | | | | E02253, AJ000937, U76419, AL049460, |
| | | | | | X80340, AR038969, I52013, AF094480, |
| | | | | | AL080234, J05032, U42031, and AL110221. |
| HWJAC71 | 214 | 760084 | 1-305 | 15-319 | |
| HWJAD16 | 215 | 661520 | 1-341 | 15-355 | R93869, AI682502, AA211116, C14990, |
| | | | | | AI217197, C15248, AA633619, and AA405558. |
| HWHQW24 | 216 | 907997 | 1-666 | 15-680 | R85195, AA443410, AA401263, AA037299, |
| | | | | | H43770, R87693, H51243, N42852, N29204, |
| | | | | | R88559, H30680, N34077, U47344, R87576, |
| | | | | | R85344, H51528, H96192, N92708, H83798, |
| | | | | | W30807, AA029049, H44852, W20325, |
| | | | | | N94533, AI084236, AI820028, AI652097, |
| | | | | | AI077357, AI830453, AW082884, and |
| | | | | | AI568432. |
| HWHQS58 | 217 | 869780 | 1-830 | 15-844 | AA129755, AI264327, AI924548, AW373421, |
| | | | | | AW044471, AW373417, AI591124, AA521147, |
| | | | | | AI431599, AA521164, AI275624, AI245547, |
| | | | | | AI684030, AI916377, AI493958, AI685167, |
| | | | | | AI160092, AA133232, D25665, AI423062, |
| | | | | | AA449480, AI040218, AA232960, N94960, |
| | | | | | AA062910, AA748581, N78938, AA255901, |
| | | | | | AA814767, AA521125, AA243720, AI358080, |
| | | | | | AA838769, AI973219, T86115, AA834077, |
| | | | | | AA861136, AI025566, AI202152, N91600, |
| | | | | | AI093292, AW014070, AI417825, AW087763, |
| | | | | | AA884806, AA468604, AA128760, AA135673, |
| | | | | | T36186, AA426039, AL044788, AA707773, |
| | | | | | AA991552, AI382484, AW381891, AA436115, |
| | | | | | R16132, AB002389, AR069019, and |
| | | | | | AR069018. |
| HWHQQ73 | 218 | 761719 | 1-670 | 15-684 | T99288, R09823, T78999, and N74755. |
| HWHQO89 | 219 | 786155 | 1-481 | 15-495 | W49670, R68198, R37555, and AL122007. |
| HWHQL42 | 220 | 805897 | 1-440 | 15-454 | AI961430, AA568549, N53238, AI924984, |
| | | | | | AI149157, AA811355, AW073372, AI610339, |
| | | | | | AI758882, AI819475, AW338889, AA764930, |
| | | | | | AW189496, AI342866, AI244150, AA425635, |
| | | | | | AA976965, AI924962, AA703348, AA442907, |
| | | | | | AA469084, AW410367, AA303216, |
| | | | | | AW410368, H47257, AA084522, N64595, |
| | | | | | AI538834, T69821, AI911629, AA025493, |
| | | | | | AA251254, AI928259, AI126346, AA156646, |
| | | | | | AA148517, AA782207, AW028879, AA412688, |
| | | | | | N71276, AW316922, H22067, W93232, |
| | | | | | AA262971, H40884, H40875, AI890457, |
| | | | | | AA043999, AI217067, AI969620, AW189184, |
| | | | | | AA449756, AA748153, N54348, W04774, |
| | | | | | AA047716, AA705608, AA057765, H45659, |
| | | | | | AA043880, N75323, AA405060, W93424, |
| | | | | | AI887493, H12379, AA279591, and Z77249. |
| HWHQL26 | 221 | 694021 | 1-588 | 15-602 | AA136968, and AI380268. |
| HWHQJ31 | 222 | 697599 | 1-777 | 15-791 | R56163, H04894, H11894, AI298239, and |
| | | | | | AI457203. |
| HWHQI16 | 223 | 661553 | 1-388 | 15-402 | R28114, N83626, and AF157623. |
| HWHQH35 | 224 | 707826 | 1-433 | 15-447 | W89066, T95526, AI356054, and AC004918. |
| HWHQB79 | 225 | 774685 | 1-592 | 15-606 | H95485, H51648, AI424831, AI688141, |
| | | | | | AW341521, AI377709, AA971261, AW117535, |
| | | | | | and AC004381. |
| HWHPY78 | 226 | 781689 | 1-692 | 15-706 | T79721, T80919, T81157, W44656, AI431747, |
| | | | | | H27541, and AI668612. |
| HWHPR89 | 227 | 598535 | 1-334 | 15-348 | W35214, W23624, AI591033, AA436232, and |
| | | | | | AA436233. |
| HWHPO68 | 228 | 752782 | 1-710 | 15-724 | AA429919, AA430055, AA160879, AI675394, |
| | | | | | AW368947, AW379520, AB026833, AF043977, |
| | | | | | and AF127980. |
| HWHPM27 | 229 | 682719 | 1-384 | 15-398 | AA649069, H47757, N77332, and N76749. |
| HWHPL01 | 230 | 915610 | 1-506 | 15-520 | AA010677, AA010884, AA243840, AA243576, |
| | | | | | and AC006070. |
| HWHPK76 | 231 | 769791 | 1-151 | 15-165 | AA044915. |
| HWHPK51 | 232 | 725456 | 1-404 | 15-418 | R82128, AB003151, and AP000688. |
| HWHPJ26 | 233 | 681217 | 1-307 | 15-321 | N29484, and N42313. |
| HWHPF78 | 234 | 773407 | 1-649 | 15-663 | AA761327, T08371, R16012, R16112, |
| | | | | | AA761312, and AB032976. |
| HWHPD16 | 235 | 661660 | 1-725 | 15-739 | N25530, H98835, AI693538, AI220466, |
| | | | | | AI263186, and AI910983. |
| HWHPC04 | 236 | 614960 | 1-562 | 15-576 | AA034067, AA703147, AA693566, AA112403, |
| | | | | | AA694480, and Z99716. |
| HWHPA61 | 237 | 741642 | 1-496 | 15-510 | N40407, AF006752, and AC005072. |
| HWHKJ11 | 238 | 965201 | 1-404 | 15-418 | AA630904. |
| HWHKG03 | 239 | 971735 | 1-1009 | 15-1023 | AI573144, AI289200, AI244184, AA806849, |
| | | | | | AI193797, F08271, AA587758, AW068762, |
| | | | | | AA125767, AW379978, M63005, M63544, and |
| | | | | | M63480. |
| HWHJM08 | 240 | 955683 | 1-884 | 15-898 | AA021558, R79554, W31198, R79555, |
| | | | | | AA972575, H41096, AA724112, F12234, |
| | | | | | R73753, R65612, AA878715, H15618, M78502, |
| | | | | | R66995, and T66395. |
| HWHJJ11 | 241 | 965189 | 1-371 | 15-385 | AA448728, AA442797, AW090790, AP000339, |
| | | | | | and AP000217. |
| HWHHW50 | 242 | 724078 | 1-158 | 15-172 | AA255452. |
| HWHHU57 | 243 | 734458 | 1-746 | 15-760 | AA478923, AA195103, N77780, and |
| | | | | | AA478803. |
| HWHHQ10 | 244 | 963959 | 1-424 | 15-438 | AA837647. |
| HWHHO76 | 245 | 769848 | 1-984 | 15-998 | N76171, AI291047, and N64762. |
| HWHHL02 | 246 | 919202 | 1-704 | 15-718 | AA478607. |
| HWHGZ86 | 247 | 970662 | 1-919 | 15-933 | AA775083, W28290, AW206265, and |
| | | | | | AA504965. |
| HWHGY82 | 248 | 779020 | 1-439 | 15-453 | R01825. |
| HWHGY56 | 249 | 733124 | 1-396 | 15-410 | H11686, H11889, M79139, AA340707, |
| | | | | | AL080149, Z98885, and AF005067. |
| HWHGW72 | 250 | 945692 | 1-927 | 15-941 | AL119324, U46341, AF190825, AF190823, |
| | | | | | AF190822, AF109387, AF109388, AF190826, |
| | | | | | AF190824, AF053328, AF053327, AF053329, |
| | | | | | U14414, Y10473, AF064549, AF020756, and |
| | | | | | AB026436. |
| HWHGS51 | 251 | 725446 | 1-646 | 15-660 | H06904, and AA251730. |
| HWHGP95 | 252 | 795148 | 1-722 | 15-736 | AW295449, R00307, AI247760, T99960, |
| | | | | | R00555, R00661, and AC004841. |
| HWHGF95 | 253 | 947019 | 1-910 | 15-924 | AF135026. |
| HWHGE01 | 254 | 915933 | 1-642 | 15-656 | W63622, T84232, and ALl22023. |
| HWHGC93 | 255 | 915311 | 1-569 | 15-583 | H42716, AW275818, AA627916, W68815, |
| | | | | | W68529, AW275825, AI969511, H25944, |
| | | | | | H25979, AI800001, and AL035408. |
| HWHGC57 | 256 | 942388 | 1-698 | 15-712 | AW392670, U46350, U46347, AL119319, |
| | | | | | AL042542, AL119457, AW363220, AW384394, |
| | | | | | U46351, AL119324, AL119399, AL119522, |
| | | | | | AL119484, AL119391, AL119496, AL119443, |
| | | | | | AW372827, AL042544, U46349, Z99396, |
| | | | | | AL119418, AL119439, AL119363, AL119444, |
| | | | | | AL119497, AL119355, AL119483, AL119401, |
| | | | | | AL134527, AL119396, U46346, U46341, |
| | | | | | AL119341, AL119335, AL042551, AB026436, |
| | | | | | AR054110, AR066494, AR060234, and |
| | | | | | A81671. |
| HWHGB85 | 257 | 889955 | 1-605 | 15-619 | AA494374, AA992165, AA628613, AA291410, |
| | | | | | AW161252, D61624, AA340594, AA293684, |
| | | | | | AW405954, D80282, AI816346, D59735, |
| | | | | | D60593, AA420752, AW368326, N42417, |
| | | | | | R81395, AI147058, AA456178, H18287, |
| | | | | | H23632, AI29998, AA809547, H44100, R77573, |
| | | | | | H67414, H23659, W47069, H46320, H12866, |
| | | | | | H13882, R64445, AA331347, AA371892, |
| | | | | | R78316, D60103, W03602, W17228, |
| | | | | | AW163180, D60363, D60290, R99803, H48623, |
| | | | | | H19967, R50440, W52517, R81865, AA364254, |
| | | | | | H57089, H23762, H45788, AA410766, N40719, |
| | | | | | H41693, R74300, AA133805, AI718386, |
| | | | | | R26009, AA327845, AA649589, AA027908, |
| | | | | | T95369, H45215, AW327451, D59621, |
| | | | | | AA125747, W17154, H77882, R75718, |
| | | | | | AA502212, AA284908, H78760, AA385413, |
| | | | | | AA353927, H42239, W57661, AW404470, |
| | | | | | W95081, R37556, N79295, AA339069, |
| | | | | | W39461, H39154, AA430258, H91878, |
| | | | | | AI735405, AA292390, AA311377, AA513199, |
| | | | | | U69183, AA843531, AI307606, AI590512, |
| | | | | | AI613400, AI609980, AI590484, AW274302, |
| | | | | | AI345748, AI318239, AI371905, AI348873, |
| | | | | | AW301989, AI126863, AI910285, AW269107, |
| | | | | | AI590270, AI344792, R68326, AI318178, |
| | | | | | H39521, AI591248, R68498, AA503698, |
| | | | | | R67780, W07462, AA481338, AW406174, |
| | | | | | AA336125, AI052056, AW406580, AA422172, |
| | | | | | AI223622, AI054051, W31004, AA503694, |
| | | | | | AA405258, AI718062, N39850, H45608, |
| | | | | | AA855061, AA480933, D80478, AA628401, |
| | | | | | AL048793, AW361743, R24688, AA873298, |
| | | | | | AI367447, AA320447, H04077, AI189610, |
| | | | | | AL048792, AI075650, W04742, N41856, |
| | | | | | AA294845, AA074113, AI015413, AI802679, |
| | | | | | AA621266, H62961, W17203, AA143361, |
| | | | | | D60836, AI683458, AI209173, AI307997, |
| | | | | | H95884, AA437188, AA595074, N28681, |
| | | | | | N27782, N43805, AW157204, C15024, |
| | | | | | AA916451, AA083589, AA704364, R77387, |
| | | | | | N23016, AI816266, W20170, AW361695, |
| | | | | | AA074324, AI991346, AA296535, AW275943, |
| | | | | | AA083470, N30613, R62218, AW089923, |
| | | | | | AI565809, AA373405, H70954, AA863071, |
| | | | | | AI277103, AI908613, AW008734, AI204680, |
| | | | | | AI192422, AI986384, AA420794, AA470448, |
| | | | | | AA740787, AA480875, AI131065, AA398454, |
| | | | | | AI204004, AA702074, AA436394, W93666, |
| | | | | | AI299769, AA643156, AA291421, AI475800, |
| | | | | | AA291666, AA878465, AA705294, AI075656, |
| | | | | | AA884781, AW129273, AI204063, AI027454, |
| | | | | | AA349154, AA812464, AA837361, AA443113, |
| | | | | | AA757880, AA761600, AA422082, AA976319, |
| | | | | | AA875865, H47912, AI053491, AI289191, |
| | | | | | H63835, AA657869, AA121143, AI752468, |
| | | | | | AI752469, W93636, AA715310, AA037164, |
| | | | | | F22564, N27953, F30295, T95290, AF161511, |
| | | | | | AF073839, and AF111848. |
| HWHGB13 | 258 | 656712 | 1-532 | 15-546 | AC007126. |
| HWFBH55 | 259 | 732549 | 1-457 | 15-471 | AA237022, and AA302431. |
| HWFBG80 | 260 | 561208 | 1-432 | 15-446 | AA302696, Y12853, and Z98941. |
| HWFBD96 | 261 | 796070 | 1-387 | 15-401 | AA302745, AW341057, AA302744, T94439, |
| | | | | | AF134726, and AP000503. |
| HWFBB09 | 262 | 575533 | 1-306 | 15-320 | AA302794, 1193962, AA302795, AA404526, |
| | | | | | AA837450, R44042, AA504562, F04351, |
| | | | | | N71884, AA984114, AI919116, AL008726, |
| | | | | | AC004491, U62293, U63721, AC005102, |
| | | | | | AC005632, AC007193, AC002477, AC004967, |
| | | | | | AC005057, AP000704, AL031668, AL096791, |
| | | | | | AL049745, AF001552, AL022323, AC005755, |
| | | | | | AC005015, AC004832, AC004216, AC002994, |
| | | | | | AF053356, AC004882, AL049589, AL031005, |
| | | | | | AC002350, AC002470, AC002395, AC005736, |
| | | | | | AC002287, AC006450, AC006101, Z97832, |
| | | | | | AC000073, AC005480, AF196779, AC007637, |
| | | | | | AC002310, AC004841, AC005409, AC006480, |
| | | | | | AP000952, AP000692, AC002565, AC005225, |
| | | | | | AC002300, AL139054, U47924, U52112, |
| | | | | | AP000211, AL096701, AL049830, AL035413, |
| | | | | | AC005399, AC004963, AC004962, AL035249, |
| | | | | | AL022328, AC004966, AL031589, Z73417, |
| | | | | | Z97054, AL023284, AC005562, AC008119, |
| | | | | | AC002492, AC002483, AL049759, AC005089, |
| | | | | | AC012384, AP000337, AC004152, Z85986, |
| | | | | | AC002480, AC004383, AC000085, AC002558, |
| | | | | | AC003663, AP000245, Z83826, AC007242, |
| | | | | | AC007386, AC005581, AC006344, U91323, |
| | | | | | AC002996, AL049795, AC004854, AP000008, |
| | | | | | Z83840, AC005484, AC005531, AC005081, |
| | | | | | and L44140. |
| HWFAD94 | 263 | 504477 | 1-503 | 15-517 | AA302757, and AA302810. |
| HWFAD84 | 264 | 504489 | 1-629 | 15-643 | AA302767, AA302766, AP000049, AP000116, |
| | | | | | and AP000311. |
| HWFAD65 | 265 | 753943 | 1-391 | 15-405 | AI095489, AI185693, AA947166, AA302673, |
| | | | | | and AA429776. |
| HWEAE94 | 266 | 794026 | 1-413 | 15-427 | AA160846, and AF041004. |
| HWEAD10 | 267 | 927208 | 1-314 | 15-328 | AI310965, AI161301, AA662057, AI362584, |
| | | | | | AI287497, AI358460, AI253259, AI767640, |
| | | | | | AI276135, AA206625, AI088803, AW150301, |
| | | | | | AI805044, AW088682, AI459338, AI360735, |
| | | | | | AI139259, AW271545, AI140303, AI627186, |
| | | | | | AI868008, AI356036, AI632014, T16033, |
| | | | | | T33318, AI700386, AI671718, AA603054, |
| | | | | | AW003777, AI865463, AI955034, W93511, |
| | | | | | AI703155, AI471245, AW026798, R36872, |
| | | | | | AA552905, AA649777, AA976729, AA613313, |
| | | | | | F31652, AI703185, AW298187, AW244163, |
| | | | | | C15626, W93510, AW089275, AI002285, |
| | | | | | AI633125, AA502794, AW152182, AI886415, |
| | | | | | AI815232, AI696626, AI590423, AI537837, |
| | | | | | AW103878, AI886055, AI610671, AI564723, |
| | | | | | AI582932, AI872423, AW051088, AI698391, |
| | | | | | AI915291, AI799183, AI889189, AI473208, |
| | | | | | AI868204, W74529, AA848053, AI521560, |
| | | | | | AI553645, AW238688, AI624304, AI633061, |
| | | | | | AI621209, AI205869, AI583578, AI889376, |
| | | | | | AW029186, N33175, AI589261, AI819545, |
| | | | | | AI702073, AI383804, AI690946, AI927233, |
| | | | | | AI916419, AI623941, AI433157, AI824576, |
| | | | | | AI866461, AI925164, AI491842, AI360195, |
| | | | | | AI919534, AI865906, AW150511, AI742728, |
| | | | | | AI889882, AW084447, AW104724, AI886206, |
| | | | | | AI690472, AI440294, AI537809, AI370623, |
| | | | | | AI683979, AL045500, AW083175, AW089932, |
| | | | | | AI469573, AW148536, AA833760, AI613038, |
| | | | | | AI932794, AA767679, AI677796, AI277008, |
| | | | | | AW089293, AI688847, AI250646, AW149925, |
| | | | | | AW083111, AI868740, AI095003, AI890214, |
| | | | | | AW020419, AI433616, AW024374, AI625464, |
| | | | | | AI439762, AI432030, AI961589, AI379711, |
| | | | | | AW148408, AI254727, AI619502, AW104827, |
| | | | | | AW024889, AW085786, AI696612, AW409914, |
| | | | | | AW303089, AI287233, AI096534, AI687166, |
| | | | | | AI859127, AI564719, AW082532, AI349957, |
| | | | | | AI590575, AI345005, AI287793, AI539687, |
| | | | | | AI564500, AL041772, AI470477, AW104836, |
| | | | | | AI559782, AI445829, AI925502, AI973152, |
| | | | | | AI608936, AI268320, AA749425, AI860897, |
| | | | | | AI673267, AI569945, AI952542, AW051212, |
| | | | | | AI679916, AI357940, AI241763, AI340511, |
| | | | | | AW105087, AI285448, AI587056, AA514684, |
| | | | | | AA809897, AI934295, AI286256, AI620003, |
| | | | | | AW196722, AI307494, AI366796, AW192652, |
| | | | | | AI433647, AI609331, AI860694, AW020693, |
| | | | | | AI469532, AI348777, AI635067, AI963458, |
| | | | | | AI683173, AI697191, AI335426, AI636585, |
| | | | | | AI570884, AI624293, AI366900, AI590227, |
| | | | | | AI828574, AI690687, AW085709, AA748697, |
| | | | | | AA748698, AW410259, AI613017, AI963193, |
| | | | | | AA479803, AW085734, W38553, AI539560, |
| | | | | | AI679179, AW173225, AI679550, AW104129, |
| | | | | | AA883351, AA420722, AI597731, AI471909, |
| | | | | | AA493109, AI289608, AI611686, AL048644, |
| | | | | | AW194441, AW044386, AI591387, AI699865, |
| | | | | | AI636372, AI862142, AL046463, AL120819, |
| | | | | | AA579232, AW268743, AI684300, AI499890, |
| | | | | | AL121328, AW167385, AI635942, AL133080, |
| | | | | | X92070, AF113690, I48978, AL117435, |
| | | | | | L40363, AL137488, AL035587, AB016226, |
| | | | | | AF111851, AL137548, AL050155, X70685, |
| | | | | | X72624, AJ238278, AF213396, S78214, |
| | | | | | D00174, AL117583, AF176651, AL137459, |
| | | | | | I30339, I30334, X06146, E01614, E13364, |
| | | | | | A08910, A08909, AR068751, Z72491, |
| | | | | | AL137495, A08908, AL137550, X89102, |
| | | | | | AF081366, S69385, AL080234, AF067225, |
| | | | | | AL117394, A03736, AF067224, AL137627, |
| | | | | | AF113699, AF079763, AF058921, AF067223, |
| | | | | | AL137658, AF019298, AL035458, S77771, |
| | | | | | AF078844, X67813, AL133010, L13297, |
| | | | | | A23630, I00734, A08913, S61953, M19658, |
| | | | | | AR038854, Y11254, AL050277, U67328, |
| | | | | | AL133557, E00617, E00717, E00778, |
| | | | | | AL110222, A08912, AB019565, AR020905, |
| | | | | | AL137526, AF030635, AL133081, AL110221, |
| | | | | | AC004062, I89931, AFI51109, AL080129, |
| | | | | | AL133565, D83032, AR054987, AR068466, |
| | | | | | I48979, I89934, AF113677, AI2297, AL137294, |
| | | | | | I49625, Z37987, AL080140, AL050146, |
| | | | | | AL050108, S75997, AF031147, AF022813, |
| | | | | | AL050024, A18777, AL122093, Y07905, |
| | | | | | AL133031, AL133104, X72889, AF065135, |
| | | | | | Z49258, AB007812, S69510, AL122045, |
| | | | | | E05822, E12580, X60786, AF036941, |
| | | | | | AF061795, Y10080, AF151685, AL031346, |
| | | | | | AF177767, AF079765, AF113694, S36676, |
| | | | | | AP000130, AP000208, X80340, AR029490, |
| | | | | | AF054599, AF076633, AF114818, Z98036, |
| | | | | | M27260, AL137275, AF137367, E06743, |
| | | | | | A08916, AF113013, AP000247, AF117959, |
| | | | | | AF076464, Y16258, A57389, AL137283, |
| | | | | | I89944, A08911, Y16257, E02756, Y16256, |
| | | | | | Y18680, AL137560, AL049314, I46765, I17767, |
| | | | | | AF106697, AF109155, AF185614, AL137529, |
| | | | | | AJ010277, AL110228, AL050092, X65873, |
| | | | | | AL137480, AF057300, AF057299, AL080239, |
| | | | | | AL117644, AJ242859, A08907, AL133016, |
| | | | | | AF180525, AL049466, AF038440, X59414, |
| | | | | | X76228, AL133560, S76508, U42031, |
| | | | | | AL080156, AF126247, AL137640, AF111849, |
| | | | | | U68233, I92592, A07647, S68736, AL096728, |
| | | | | | U00763, AL137521, AF061573, AL122121, |
| | | | | | AF008439, AF091084, AF100781, AF097996, |
| | | | | | AL133093, X62580, AF141289, X52128, |
| | | | | | AF153205, AF159148, AF044221, 117544, |
| | | | | | AL137533, AL117440, AF090896, AL137527, |
| | | | | | U42766, AL137665, AF032666, AL080074, |
| | | | | | A58524, A58523, I89947, A77033, A77035, |
| | | | | | AL137276, U68387, AF113019, X82434, |
| | | | | | AL049339, AL133558, AL133113, AL050393, |
| | | | | | AL133072, AC003032, AL137300, AF090901, |
| | | | | | AL117416, U75932, AL049465, AF003737, |
| | | | | | AF031903, AL137478, AJ000937, AL049382, |
| | | | | | AF142672, AF017152, AF090886, and Y09972. |
| HWDAY07 | 268 | 952441 | 1-1271 | 15-1285 | AA749085, AA005363, AW301099, |
| | | | | | AW247831, N31905, AA007384, AI769551, |
| | | | | | AI523940, AI640599, AI741192, AI955056, |
| | | | | | AI913091, AW247222, AA828078, AI091190, |
| | | | | | AI220578, AI273495, AA029271, AA463351, |
| | | | | | AI188197, AA463756, AI026912, AW044444, |
| | | | | | AA463859, AA506009, AA282252, AI198530, |
| | | | | | AW363732, C05936, AI744431, AI962397, |
| | | | | | AA774583, AA629247, AA282724, AA463680, |
| | | | | | AA234414, AA620870, AA531602, AA029864, |
| | | | | | H64105, AI682416, AA993136, AW273224, |
| | | | | | AI985483, AI468107, AA582696, H83060, |
| | | | | | AI250892, AA193661, AI244770, AA345560, |
| | | | | | AA721467, AA234364, T88868, AA830658, |
| | | | | | H51348, R97065, AW404799, AI370139, |
| | | | | | AI123612, AA995736, AA033909, H82839, |
| | | | | | N42688, H64153, AI133711, AA316216, |
| | | | | | F18473, AI612837, AI984605, AA962793, |
| | | | | | AA034029, AA954609, AI674254, AA089812, |
| | | | | | AF174605, AC000386, and Z97181. |
| HWDAS21 | 269 | 670233 | 1-504 | 15-518 | W30898. |
| HWDAP89 | 270 | 795713 | 1-376 | 15-390 | AI474053, W56513, AI432332, W56794, |
| | | | | | Z39374, AI147106, AI446000, AA953896, |
| | | | | | AA938917, AA431701, and AB023226. |
| HWDAO90 | 271 | 788546 | 1-405 | 15-419 | N62679. |
| HWDAO63 | 272 | 744591 | 1-367 | 15-381 | R09053, AA554481, AA203281, AI623801, |
| | | | | | AI799476, AI832581, AA911363, AI673515, |
| | | | | | AI016523, AA838021, AI247258, and |
| | | | | | AA682711. |
| HWDAL32 | 273 | 698628 | 1-556 | 15-570 | H28004, AI022925, AI091318, AW275201, |
| | | | | | R50740, AI217623, AA992501, and H27302. |
| HWDAK75 | 274 | 973099 | 1-508 | 15-522 | AW392670, AL119439, AL119484, AL134530, |
| | | | | | AL134519, U46347, AL119391, AL134528, |
| | | | | | AL042544, AL119522, AW372827, AL134525, |
| | | | | | AL119444, AL119401, AI142137, AL134524, |
| | | | | | AL119363, AL134518, AI142132, AL037205, |
| | | | | | AL042614, AL043019, AL119396, U46346, |
| | | | | | AR066494, and AR060234. |
| HWDAD72 | 275 | 766077 | 1-645 | 15-659 | AA009796. |
| HWDAD54 | 276 | 729262 | 1-418 | 15-432 | N68637. |
| HWDAD40 | 277 | 881233 | 1-433 | 15-447 | AA652394, AA843652, C75018, AA669261, |
| | | | | | W87450, W87549, AA777348, AI193964, |
| | | | | | AI376931, AI955233, AA975047, AI183977, |
| | | | | | AI963358, AA970316, AI203652, AI803310, |
| | | | | | AI283867, AA587214, AW418911, AI123535, |
| | | | | | AI818338, AI370130, AA767720, F09040, |
| | | | | | AI079190, AI826448, AA102631, W42602, |
| | | | | | AW300767, W42575, AW451886, AI432609, |
| | | | | | N63983, AI686051, N79598, AI049811, |
| | | | | | AI074845, AI420650, AAL21360, AA748200, |
| | | | | | AA633869, AA625311, AI817306, AI128886, |
| | | | | | R77612, W72190, AI801873, AA813658, |
| | | | | | AI216889, AI480050, H79301, AI937759, |
| | | | | | AI290367, AI351991, T55328, AI123507, |
| | | | | | Z41647, AW452908, AA918249, AI270005, |
| | | | | | W77826, AA349329, AW163174, W19065, |
| | | | | | AA357509, and AA331284. |
| HWDAC55 | 278 | 731414 | 1-647 | 15-661 | R13600. |
| HSTAO59 | 279 | 908993 | 1-430 | 15-444 | AA447205, AI829089, AI863429, AI922955, |
| | | | | | AW166933, AA226755, AI493118, AW139935, |
| | | | | | AI288648, AI379442, AA379460, |
| | | | | | AI472968, AI204221, AW363135, AA781855, |
| | | | | | AA455072, AI637856, AW058023, AW139348, |
| | | | | | AI085392, AI393154, AI568689, AA134758, |
| | | | | | and AL109984. |
| HSTAH84 | 280 | 783227 | 1-759 | 15-773 | AA379147, and AI362444. |
| HSTAG60 | 281 | 578487 | 1-314 | 15-328 | AA379328, AC003025, AF139813, and |
| | | | | | AC004228. |
| HOUIF71 | 282 | 759929 | 1-395 | 15-409 | T96856, and T85931. |
| HOUGC71 | 283 | 760110 | 1-396 | 15-410 | T98003, and AA777394. |
| HOUFM73 | 284 | 764173 | 1-611 | 15-625 | AA053845. |
| HOUFM67 | 285 | 751325 | 1-120 | 15-134 | |
| HOUFM50 | 286 | 724038 | 1-298 | 15-312 | N86502. |
| HOUFM32 | 287 | 698816 | 1-329 | 15-343 | |
| HOUFD93 | 288 | 791584 | 1-649 | 15-663 | AA180087, and AA169293. |
| HOUFD09 | 289 | 625245 | 1-497 | 15-511 | AI674479, AI376362, AI628358, AW207400, |
| | | | | | AW170497, AI089668, AI570878, AA777998, |
| | | | | | AI471795, AI830803, AI869793, W42429, |
| | | | | | AW237793, AW015529, AA836860, AI474249, |
| | | | | | AI203312, and AI955073. |
| HOUFC52 | 290 | 726438 | 1-273 | 15-287 | N45644, and AF156857. |
| HOUET93 | 291 | 792495 | 1-353 | 15-367 | H93543, AA001725, and AL022069. |
| HOUES18 | 292 | 577112 | 1-394 | 15-408 | AI399883, AI038052, R01245, AA703404, |
| | | | | | AA865857, AI078069, R06676, and ACO11331. |
| HOUER77 | 293 | 772417 | 1-556 | 15-570 | AA082667. |
| HOUEM24 | 294 | 677416 | 1-440 | 15-454 | AA210722, and AI872356. |
| HOUEK01 | 295 | 965449 | 1-552 | 15-566 | T78627, AI074759, N72587, AA040182, |
| | | | | | AA987525, AI880532, AI601259, T67791, |
| | | | | | N34190, AA393320, AI089984, AA180860, |
| | | | | | N46781, AW157052, AA374237, R99057, |
| | | | | | AA180963, N25803, AA658952, AA398674, |
| | | | | | AI031642, AA180806, AI815801, AI141506, |
| | | | | | AA633493, AA604887, AA864714, AA278906, |
| | | | | | AA640281, AA863377, H139613, AI022529, |
| | | | | | AA887716, AA757604, N99739, AA402724, |
| | | | | | AI126545, AA846171, AI200534, AI032115, |
| | | | | | AW043945, AA132547, AA426386, AA045427, |
| | | | | | N40925, AI362125, AI041768, AI082174, |
| | | | | | AW080847, AA437198, AA148895, AA446448, |
| | | | | | W00346, AI741371, T67715, AA927545, |
| | | | | | AA446575, AA040183, AI925487, AI887556, |
| | | | | | AI927388, AA171748, AA558126, AA975799, |
| | | | | | AA512888, AI222894, H55598, AA468658, |
| | | | | | AA622064, AA862986, AI309035, AI351169, |
| | | | | | AA302232, AA481746, N33487, AA045339, |
| | | | | | AA235713, AW130836, AA740144, H66800, |
| | | | | | AW163018, N43878, T17238, N25591, |
| | | | | | AA481747, and AA729279. |
| HOUEH51 | 296 | 725820 | 1-657 | 15-671 | AI377999, H97074, N46131, and AW027236. |
| HOUEG85 | 297 | 883933 | 1-374 | 15-388 | AA256607, AA256608, AI804218, AI924547, |
| | | | | | and AI452529. |
| HOUDR29 | 298 | 576473 | 1-163 | 15-177 | AA316905, AA365694, AA641175, AA523242, |
| | | | | | AI278997, AA856969, AA649722, AA503600, |
| | | | | | AA908422, AA661921, T34775, AI732378, |
| | | | | | T06828, AA688036, AA714453, AI243584, |
| | | | | | T40417, D52587, F16274, AW088984, D25870, |
| | | | | | AA135842, F34498, AA480772, R93145, |
| | | | | | AA580808, AA501821, H50727, AA525824, |
| | | | | | AA649484, W79504, AA654771, AA828749, |
| | | | | | AI364809, AA649542, AI087042, AW080134, |
| | | | | | F23335, N92703, AI540161, N27763, F19012, |
| | | | | | H86305, AI446464, AA302648, AA729721, |
| | | | | | C17734, AI273185, F25867, AI246119, |
| | | | | | AL044940, AI291124, R97934, AA513972, |
| | | | | | F18485, AA908468, AA513293, AW265385, |
| | | | | | AA678436, AI610159, AA362349, AI291268, |
| | | | | | AI357288, F04987, AA535406, AA603156, |
| | | | | | AA934680, F15732, AA670468, AA350859, |
| | | | | | F16017, AA773902, AA056439, AI537955, |
| | | | | | AI270117, AI284640, AW270382, T05101, |
| | | | | | AA649642, AF150152, AA358410, T40077, |
| | | | | | AA669251, AI251002, AA338892, AI653905, |
| | | | | | AI434695, AA347368, AA346458, AA493206, |
| | | | | | AA658362, T07451, AA491814, R40056, |
| | | | | | AA568616, AA719080, F28737, AI298710, |
| | | | | | AA523838, AA181773, AA381858, AA225149, |
| | | | | | AI754955, F17891, AA468131, AI281697, |
| | | | | | AA534010, N94233, AA558015, AW274349, |
| | | | | | AA501578, AI372413, AA516226, AL036037, |
| | | | | | AA548058, AA634889, AA296997, D51681, |
| | | | | | AW103981, AA074130, F33795, AA551503, |
| | | | | | AA837084, AI688846, AI358571, AA352803, |
| | | | | | AI364020, AA281461, AA771811, AA331965, |
| | | | | | AA578481, AA649705, AI798489, AW089322, |
| | | | | | AA548689, AW438643, R77905, AA593247, |
| | | | | | AA634146, F17802, AA515905, AI678316, |
| | | | | | AA810370, F18320, AA369597, N87420, |
| | | | | | AI364026, AA568778, AA317190, AA478339, |
| | | | | | AI281881, AA364429, AI679045, AA826671, |
| | | | | | AA773318, AI291588, AI871722, AW276435, |
| | | | | | AW071196, N25296, AW023389, AI471481, |
| | | | | | AA129446, T40452, AA644207, AA502720, |
| | | | | | AA826303, AI583594, AA630030, AI868054, |
| | | | | | AW008952, AI379719, AA847069, AW276827, |
| | | | | | AI583283, AA713891, AI824787, AI537030, |
| | | | | | AA834667, AL046409, AA938105, AA160954, |
| | | | | | AI801600, F10924, AA663928, AA632837, |
| | | | | | AI868384, AA641199, AW028400, AI064864, |
| | | | | | AW303196, F24039, AA364224, AW301350, |
| | | | | | AW196064, AA493471, AA824655, |
| | | | | | AW021583, AA553465, AA875994, AP000306, |
| | | | | | AP000047, AP000115, X55928, U14719, |
| | | | | | U14718, AC004526, U14712, AC004222, |
| | | | | | AC006315, U14714, U14711, AC006043, |
| | | | | | AP001042, AC006373, AC007459, M37551, |
| | | | | | U14713, U67827, AC002119, X75335, |
| | | | | | AC004466, AL035072, AP000252, AL031391, |
| | | | | | U14706, U14716, Z84490, AL008718, |
| | | | | | AC006336, AP000134, AP000212, AF017257, |
| | | | | | Z82975, AL031664, AC007191, AC004918, |
| | | | | | AC004907, AC006006, AP000031, AC006305, |
| | | | | | U14715, AP001043, AC000058, AL035460, |
| | | | | | AC003030, U14685, U14686, U14689, |
| | | | | | AC005003, AL121767, AC005324, Z93784, |
| | | | | | Z84474, AL031311, AC006064, AC005994, |
| | | | | | AL035416, AC002482, AC003971, AC002310, |
| | | | | | AC002307, AL079340, AL109807, AC003954, |
| | | | | | AC004895, Z74739, AL121653, AC001164, |
| | | | | | AC000024, AC006374, AP001053, D87011, |
| | | | | | AL049835, AL078476, AC005330, Z93242, |
| | | | | | Z69705, AC004754, AL035407, AP000402, |
| | | | | | AP000349, U67829, AF161343, U67825, |
| | | | | | D90054, S75337, U14695, U14705, U14694, |
| | | | | | AC005154, AC003015, U14684, U14687, |
| | | | | | U14688, U14691, AF177233, AF177235, |
| | | | | | AL031228, U02054, M19045, J03801, E01888, |
| | | | | | E02193, U14697, AF024543, AC006255, |
| | | | | | AF061153, E02192, X14008, AC006057, |
| | | | | | AF094481, AP000297, X60459, AF015723, |
| | | | | | AC004151, AC005331, AC005362, AC005793, |
| | | | | | AC000027, D87014, AC004644, AC004651, |
| | | | | | AC000080, AC005688, AL008709, AC004650, |
| | | | | | AC005694, Z80771, AL133399, U82668, |
| | | | | | AF121781, AC005250, AP000230, AC004975, |
| | | | | | AP000144, AP000044, AP000112, AC000085, |
| | | | | | AC005663, AC007043, Z94044, AC004987, |
| | | | | | AL117667, AC004815, AL050307, AL031177, |
| | | | | | AL109967, AC005153, Z82205, Y18000, |
| | | | | | AC004675, U80017, AC001231, AC003083, |
| | | | | | AL133245, AC004967, AC007285, AC002536, |
| | | | | | AC004931, AC007488, AC005527, AL023280, |
| | | | | | Z84488, AC006213, AL133371, AL049647, |
| | | | | | AC009044, AL096701, AL035089, AF088219, |
| | | | | | AC005815, AC006111, AF060568, U47924, |
| | | | | | D83989, U66059, AC005529, AJ229042, |
| | | | | | AC006378, D87009, AC004186, AF130247, |
| | | | | | AP000517, AF165138, AC007628, AP000556, |
| | | | | | AP000557, AC004057, AP000552, AB023054, |
| | | | | | AC009516, AC002349, AF077058, AL049830, |
| | | | | | M87919, AC006063, AC002483, AL034553, |
| | | | | | U95743, AC007073, U14698, AC005902, |
| | | | | | AP000513, AC006130, AC005346, AC005565, |
| | | | | | AC006275, AC000159, AL096710, AL132712, |
| | | | | | AC022517, Z97200, AC005358, AC004025, |
| | | | | | AC005291, AC003101, AC005844, U18399, |
| | | | | | U18391, X55927, U18392, U18398, U57006, |
| | | | | | U18394, U18395, X55925, U18393, U57005, |
| | | | | | X55930, X54179, I51997, AC004998, U18390, |
| | | | | | X55932, X55929, AL049760, AF041427, |
| | | | | | X55933, M87916, U14700, S77605, U14690, |
| | | | | | U14692, U14699, U14707, AP000472, and |
| | | | | | U02063. |
| HOUDL40 | 299 | 710868 | 1-590 | 15-604 | |
| HOUCZ30 | 300 | 573930 | 1-295 | 15-309 | |
| HOUCR25 | 301 | 559993 | 1-432 | 15-446 | AI744546, AA860302, R12381, AA569600, |
| | | | | | AC005828, AC004967, AC010206, Z98950, |
| | | | | | AP000493, and AC005013. |
| HOUBO69 | 302 | 757808 | 1-348 | 15-362 | AA889574, AA127237, AA912157, and |
| | | | | | AL035702. |
| HOUBD18 | 303 | 858911 | 1-374 | 15-388 | AA776185, and AC002112. |
| HOUBB11 | 304 | 965041 | 1-415 | 15-429 | AA745602, AA490944, and AA814239. |
| HOUAV68 | 305 | 753628 | 1-150 | 15-164 | N76301. |
| HOUAF65 | 306 | 526540 | 1-176 | 15-190 | AL038971, H47145, R11751, AA582463, |
| | | | | | AI564496, AA442105, AA812141, AA324585, |
| | | | | | AA737309, H82316, AL048925, T07044, |
| | | | | | AA455483, AI002720, AA259247, H09071, |
| | | | | | W67839, Z78390, AA402129, AL041444, |
| | | | | | R64559, AL109981, AL023281, AC007878, |
| | | | | | AC007371, AP000470, AP000689, AC009946, |
| | | | | | AC006077, AC005778, AC005002, AL031985, |
| | | | | | AC010170, AC005924, AB023049, AL121578, |
| | | | | | AP000966, AC005019, AC005280, AC007875, |
| | | | | | Z95115, AL035450, AF152365, AC006505, |
| | | | | | Z84487, AC007652, AC004388, AC007731, |
| | | | | | AC001228, AC005500, AC000086, AC006011, |
| | | | | | AC000105, AL031591, AC004032, AL133245, |
| | | | | | AB003151, AP000075, AL049823, AC004991, |
| | | | | | Z82201, AC007546, AC002299, AL109801, |
| | | | | | AC007536, AC004106, U93163, AC005185, |
| | | | | | AC004477, AC002565, AC006130, AC004895, |
| | | | | | AF130343, AC005193, Z97054, AJ003147, |
| | | | | | AL049830, AC005874, AF134471, AL096763, |
| | | | | | AC006958, AL034554, AC004647, AC006042, |
| | | | | | AC006211, AL031393, AC005251, AL080243, |
| | | | | | AC004811, AC004645, AC004859, AC005599, |
| | | | | | AC005180, AC005094, AC005914, AC004051, |
| | | | | | AC004673, AC004950, AL050307, Z81364, |
| | | | | | AC005102, AL049759, U63963, AC006071, |
| | | | | | AC007100, AL022476, AC005509, AC007676, |
| | | | | | AC006111, AC007708, X15377, AC005588, |
| | | | | | AC006006, AC004687, AL117352, AP000346, |
| | | | | | AL021918, AC007161, Z83851, AC004998, |
| | | | | | AC016027, AC006115, AC007051, AC009288, |
| | | | | | Z95152, AF001550, AC007308, AP000967, |
| | | | | | AC005027, AP000552, AC006212, AC008079, |
| | | | | | AC004409, AL096862, AL035604, AC002470, |
| | | | | | AC007707, AC006449, Z85987, AC005512, |
| | | | | | AC004686, AP000432, AC005164, AL049757 , |
| | | | | | AC004813, AC004967, AC002051, AL022325, |
| | | | | | AC002054, AC008103, AL035400, AL031588, |
| | | | | | U91325, AP000550, AC007664, AC008018, |
| | | | | | AC002310, AL022164, AC002395, and |
| | | | | | AC006560. |
| HLSAC73 | 307 | 761684 | 1-212 | 15-226 | |
| HLSAC61 | 308 | 689697 | 1-203 | 15-217 | |
| HLSAB43 | 309 | 715242 | 1-349 | 15-363 | |
| HLSAB31 | 310 | 422131 | 1-356 | 15-370 | |
| HLIBE40 | 311 | 887417 | 1-534 | 15-548 | AA005293, and AA098865. |
| HKAOQ73 | 312 | 761763 | 1-365 | 15-379 | R88969, H30247, AL020995, and Z65427. |
| IIKAOO9O | 313 | 934020 | 1-617 | 15-631 | N73164, AA284448, W89194, AA446792, |
| | | | | | AA810520, AW195917, AI675774, R29088, |
| | | | | | AW172479, R26007, and AA913564. |
| HKAOF21 | 314 | 857310 | 1-501 | 15-515 | F11238, and AC005067. |
| HKAKY03 | 315 | 923047 | 1-334 | 15-348 | N94511. |
| HKAKF79 | 316 | 909810 | 1-391 | 15-405 | R19231, R18719, and H15287. |
| HKAIK82 | 317 | 779306 | 1-697 | 15-711 | AI580045, AW081071, R09608, R09503, |
| | | | | | R98757, AL121657, AC010205, AC005409, |
| | | | | | AC007151, AC005585, AC004216, AC005102, |
| | | | | | AC002117, U91321, AC004893, AC003678, |
| | | | | | AC002302, AL049569, AC002299, AL035555, |
| | | | | | AL024507, AF124730, AC005041, AC008372, |
| | | | | | AC005726, AF001548, and AC004997. |
| HKAHP85 | 318 | 783955 | 1-438 | 15-452 | W86443. |
| HKAHI69 | 319 | 916528 | 1-623 | 15-637 | W73222, R83480, N28346, W23455, W68574, |
| | | | | | AI913731, AA680399, AW387743, and |
| | | | | | AF083110. |
| HKAHE93 | 320 | 791860 | 1-352 | 15-366 | R44840, AI024922, and R40800. |
| HKAHAI0 | 321 | 857339 | 1-324 | 15-338 | AA080986, and AB018263. |
| HKAGC23 | 322 | 912677 | 1-485 | 15-499 | H53304, H44988, R61405, AA308493, |
| | | | | | AA339315, AA334068, W56452, F06262, |
| | | | | | AA470955, AW408162, AA216667, AI925255, |
| | | | | | H38002, AI952095, AI310237, AA428952, |
| | | | | | M79308, L04966, and X80333. |
| HKAFR01 | 323 | 916400 | 1-386 | 15-400 | AA907150, AA907120, AW102570, AA737188, |
| | | | | | AI24889, and AL137567. |
| HKAFQ61 | 324 | 741786 | 1-628 | 15-642 | R12352, and H93907 |
| HKAFN96 | 325 | 796361 | 1-408 | 15-422 | AW135161, AI659980, T12381, AI830387, |
| | | | | | R86060, AI814646, AI244395, AI439551, |
| | | | | | AI831637, and AW136645. |
| HKAFD03 | 326 | 924048 | 1-525 | 15-539 | AA767865, AW448919, AA502991, AI358089, |
| | | | | | AA485482, N23504, AW243793, AA302754, |
| | | | | | AI623764, AA516233, AA483973, AI612142, |
| | | | | | AA487475, AA122183, AC007993, AC000085, |
| | | | | | AC005562, AC006312, AF064861, AC006011, |
| | | | | | M87914, Z82244, AL121655, AC006344, |
| | | | | | AL109952, AC003006, AC007842, AC006241, |
| | | | | | AL049872, AC007226, AL035495, AC005273, |
| | | | | | AC005837, AC004656, AF053356, S42653, |
| | | | | | AP000251, AL031282, AC004686, AL031432, |
| | | | | | AC005399, AC004655, AC004895, AC005409, |
| | | | | | AL034418, AP000030, AP000047, AP000403, |
| | | | | | U85195, AC005899, AL078593, AC004491, |
| | | | | | Z83826, AL049543, AC007371, AP000689, |
| | | | | | AC005004, AC005280, AC003037, AL050321, |
| | | | | | AE000658, U95742, AC005722, AC004596, |
| | | | | | AB003151, AP000688, AC006468, AC000025, |
| | | | | | AC004638, AC005527, AC005632, AC007216, |
| | | | | | AP000509, AB023049, AC006146, AP000115, |
| | | | | | AC004253, AL035400, AF001549, AL023803, |
| | | | | | AL035467, AC004805, AL035422, AF207550, |
| | | | | | AP000356, AC004859, AL022313, AL049540, |
| | | | | | AL009181, AC005057, AC004181, AC005874, |
| | | | | | AF134471, AC005225, AL049869, AL035587, |
| | | | | | AC005529, AC004913, AL031584, AL031255, |
| | | | | | AC004814, AC005484, AC002538, AC000379, |
| | | | | | AC006511, AL020997, AC004854, AL096701, |
| | | | | | AC004552, AC005829, AP000350, AC010170, |
| | | | | | AF196779, AC007128, AC002429, AC004815, |
| | | | | | AL121603, AC009247, AL031279, AC004383, |
| | | | | | U91323, AL049757, U89335, AC006353, |
| | | | | | U47924, AL096791, AL031295, AL122023, |
| | | | | | AC004797, AC009802, AP000246, AC005211, |
| | | | | | AC007055, AC002430, AL022326, AC005755, |
| | | | | | AL035696, AJ246003, AP000501, AP000031, |
| | | | | | AC006088, AC005664, AC004531, AL022322, |
| | | | | | AC002347, AC005081, AL008582, Y14768, |
| | | | | | AL078581, AL022721, AL133246, AC005209, |
| | | | | | AC008372, AL031311, AC005229, AC002312, |
| | | | | | AC005392, Z97181, AC007384, AC004033, |
| | | | | | AC004622, AC005255, AC004167, Z93017, |
| | | | | | Z95331, AL049539, AC006430, AL021154, |
| | | | | | AC002365, AL109758, U91326, AC007011, |
| | | | | | AP000502, AC002996, AC007182, AC006001, |
| | | | | | AC003007, AC005781, AC005808, U91322, |
| | | | | | AC004841, AC007541, AC005060, AL008726, |
| | | | | | AC004024, U29874, Z11900, AC002470, |
| | | | | | M63544, AC005231, AC002544, AC006101, |
| | | | | | AC004890, AP000212, AP000134, AC004703, |
| | | | | | AC008273, AC004223, AC003688, AL121658, |
| | | | | | AC006581, AP000354, Z82976, AL034549, |
| | | | | | AC005914, AC005387, AC007686, AC004883, |
| | | | | | AL035072, AC005482, AL133500, AC005261, |
| | | | | | AC006047, AC007106, AC006130, AC005620, |
| | | | | | AC005839, AL035458, AC006317, Z85987, and |
| | | | | | AP000505. |
| HKAEJ79 | 327 | 917408 | 1-164 | 15-178 | T65484, and Z98258. |
| HKAEG61 | 328 | 925951 | 1-435 | 15-449 | AA587766, AA534542, AI271683, AA565889, |
| | | | | | AA143726, AW138648, AA079779, AA595313, |
| | | | | | AI373637, AI912050, AI912061, AW381284, |
| | | | | | W40369, AA436795, AW371409, AW371414, |
| | | | | | T35070, AI024888, AA581215, AW371416, |
| | | | | | AA902858, and AW177721. |
| HKADR84 | 329 | 800106 | 1-316 | 15-330 | AA294984, and AL137694. |
| HKADP50 | 330 | 971356 | 1-1135 | 15-1149 | AL119396, AW392670, AL119324, AL119497, |
| | | | | | AW384394, AW363220, AL119443, Z99396, |
| | | | | | AW372827, AL119335, AL119319, U46347, |
| | | | | | U46341, AL119457, AL119496, AL119484, |
| | | | | | AL119363, AL119341, AL119391, AL119355, |
| | | | | | U46350, U46351, U46349, AL119399, |
| | | | | | AL119444, AL119483, U46346, AL119439, |
| | | | | | AL119522, AL134533, AL134528, AL037205, |
| | | | | | U46345, AL042450, AL042614, AL134527, |
| | | | | | AL134538, AL119418, AL134529, AL042965, |
| | | | | | AL042975, AL042542, AL119511, AL042544, |
| | | | | | AL042970, AL039912, AL043019, AL042984, |
| | | | | | AL043029, AL043003, AL042551, AL119488, |
| | | | | | AL119464, AB026436, AR069079, AR054110, |
| | | | | | A81671, AR060234, and AR066494. |
| HKADP11 | 331 | 966941 | 1-525 | 15-539 | AW297245, AI498295, AI474786, AI002508, |
| | | | | | U73646, and U73642. |
| HKAD084 | 332 | 911567 | 1-402 | 15-416 | AA112539. |
| HKADG12 | 333 | 638194 | 1-327 | 15-341 | AI927288, AI651332, AI581184, and |
| | | | | | AA766507. |
| HKACX88 | 334 | 970793 | 1-289 | 15-303 | AI688729, AL042551, AL039390, AI249936, |
| | | | | | U46348, AL046681, AL047188, AL046137, |
| | | | | | AI446483, AI672187, AL045166, AI049726, |
| | | | | | AA598862, AI920975, and AW392669. |
| HKACX62 | 335 | 744273 | 1-659 | 15-673 | R88868. |
| HKACX25 | 336 | 678045 | 1-569 | 15-583 | AA011530. |
| HKACU02 | 337 | 919850 | 1-643 | 15-657 | H65902, AW237443, AI523672, W56193, and |
| | | | | | AL031259. |
| HKACP26 | 338 | 422255 | 1-522 | 15-536 | AA146675. |
| HKACP23 | 339 | 881718 | 1-429 | 15-443 | |
| HKACO69 | 340 | 614156 | 1-367 | 15-381 | AI817581, AI982574, AL041419, AF037261, |
| | | | | | and AF064807. |
| HKACO22 | 341 | 674494 | 1-675 | 15-689 | T96147. |
| HKACL83 | 342 | 881711 | 1-559 | 15-573 | AI337437, and H29102. |
| HKACK91 | 343 | 789430 | 1-331 | 15-345 | AA878387, AI951674, D53304, AA598614, |
| | | | | | T17249, AW080441, AW167496, R88441 |
| | | | | | D81193, AI702964, and AC004150. |
| HKACI41 | 344 | 924045 | 1-377 | 15-391 | AA160816, and AAl47I47. |
| HKABY40 | 345 | 650852 | 1-449 | 15-463 | T73993, AA443150, R54539, F12438, R11740, |
| | | | | | Z44720, N89128, and AC005520 |
| HKABW75 | 346 | 973331 | 1-133 | 15-147 | |
| HKABU90 | 347 | 788888 | 1-569 | 15-583 | AI470174, AW085533, AI167938, H97813, |
| | | | | | AA844268, AI354912, AA834551, AW150903. |
| | | | | | AA905325, AA948466, AI191066, AA199949 |
| | | | | | and AW296378 |
| HKABR92 | 348 | 879400 | 1-299 | 15-313 | W84513, AI701108, W84525, and AC005237. |
| HKABQ76 | 349 | 857381 | 1-748 | 15-762 | AI804230, N69876, N98849, AI719104, and |
| | | | | | AC003966. |
| HKABM34 | 350 | 703452 | 1-480 | 15-494 | AA169857, Z81369, AL079295, and AF153482. |
| HKABE53 | 351 | 892078 | 1-560 | 15-574 | AI290663, AA292575, AA451993, AA464348, |
| | | | | | AW405405, AA297985, R18801, T77313, |
| | | | | | AA297912, AA057265, R78273, AW405591, |
| | | | | | F13348, AA310646, N76224, N44152, |
| | | | | | AW402676, AI907739, and N44162. |
| HKAAD24 | 352 | 787545 | 1-503 | 15-517 | R17399, H80368, AA400530, AA480020, |
| | | | | | AL036571, AA309105, H79194, AW407394, |
| | | | | | AA316507, AA336787, AA336687, AA069355, |
| | | | | | AB018307, Z58264, and Z64941. |
| HFEBY03 | 353 | 973292 | 1-686 | 15-700 | |
| HFEBQ59 | 354 | 739355 | 1-391 | 15-405 | AA428048. |
| HFEBP01 | 355 | 916728 | 1-488 | 15-502 | F11460, and AA09l955. |
| HFEBJ61 | 356 | 576092 | 1-341 | 15-355 | AC006205. |
| HFEBH07 | 357 | 953523 | 1-452 | 15-466 | T92504, and T92501. |
| HFEBD01 | 358 | 916725 | 1-324 | 15-338 | AA493702. |
| HFEBA06 | 359 | 935685 | 1-399 | 15-413 | AA078523, AI911149, AI935709, AI888883, |
| | | | | | and AC004889. |
| HFEAU06 | 360 | 960609 | 1-433 | 15-447 | AI188719, R70967, and AW083352. |
| HFEAN03 | 361 | 925408 | 1-233 | 15-247 | AA984600. |
| HFEAJ78 | 362 | 855319 | 1-631 | 15-645 | AA340115, AA303007, AA298969, AL135357, |
| | | | | | AW303096, AW268291, AA595499, AI216990, |
| | | | | | AI254913, AA912287, AW168420, AI054333, |
| | | | | | AI932599, AI460009, AA188664, H23653, |
| | | | | | AA640410, AA640430, AW020599, AI254779, |
| | | | | | AA972809, AA284247, AA757775, AL046519, |
| | | | | | AW271904, AA679532, AW021154, AI345157, |
| | | | | | AA225956, AW069227, AW270258, |
| | | | | | AA468131, AW103509, AA507824, F12561, |
| | | | | | AA610373, AI820920, T59612, AA533762, |
| | | | | | H18354, AA631507, AA011026, R44116, |
| | | | | | AA551552, AI560085, AI002941, AA846952, |
| | | | | | AL039145, AW069769, AA507822, AA747070, |
| | | | | | AA507912, AL119691, AI818737, AA767412, |
| | | | | | AW410354, AC005913, AC005940, Z68277, |
| | | | | | Z98884, U82668, AC005224, AC004752, |
| | | | | | AC002468, AC002426, AL021397, AJ229041, |
| | | | | | AC005051, AC004745, AF015720, AP000495, |
| | | | | | AL050332, AC007406, AL050318, AL078603, |
| | | | | | AF129108, AP000288, AC005363, AC005212, |
| | | | | | AL133163, AL035423, AL031650, L35676, |
| | | | | | AC005086, AC007011, AC005612, X55922, |
| | | | | | AC006597, AL109827, Z99127, AC004796, |
| | | | | | AL135744, AC007685, Z82215, AC002369, |
| | | | | | AC005668, AP000109, AP000041, AC004686, |
| | | | | | AL008718, AC006001, AL022097, AC004477, |
| | | | | | AL049709, AC005288, AC005245, AC016025, |
| | | | | | AC006536, AC012099, AF001552, AC004189, |
| | | | | | AJ229042, X55929, AF111168, AC004884, |
| | | | | | U95742, AC004966, AL022238, AL078584, |
| | | | | | AF006501, AL049631, AL022396, Z98742, |
| | | | | | AC005070, AC002316, AC002544, L44140, |
| | | | | | AC004990, AC004030, AC007199, AC002299, |
| | | | | | AC005833, AC005971, AC002400, AP001050, |
| | | | | | AC005041, AC006077, AC005184, X54179, |
| | | | | | AC005822, AC003101, AF031078, AC002476, |
| | | | | | AC005015, AL079333, AC020663, AC006285, |
| | | | | | AL079295, AP000359, AP000555, AF030876, |
| | | | | | AC016830, AC008154, AC005391, AC006538, |
| | | | | | U81830, AC003075, AC004634, AC008101, |
| | | | | | AC005821, AL031280, Z84488, AP000240, |
| | | | | | AC007225, U67831, AC007226, AP000365, |
| | | | | | AC005037, AC005370, AL079339, AC005082, |
| | | | | | AC006971, AC005379, AP000690, AC003685, |
| | | | | | X77738, Z98752, AC007324, Z86090, L47228, |
| | | | | | AL031295, AL023803, AC004098, AL031575, |
| | | | | | AP000011, AC005730, AC006275, AF030453, |
| | | | | | AC002115, AL049550, AL031055, AC006468, |
| | | | | | AL035691, AL008635, AC005484, AC008079, |
| | | | | | AC007565, AC007057, AC004231, AC007450, |
| | | | | | Z97876, AC005488, AC007292, AC005088, |
| | | | | | AL031651, AC005722, AC005703, AL031587, |
| | | | | | AL031276, AC005527, AL024508, AL049779, |
| | | | | | U79746, AB003151, AC005796, AC004150, |
| | | | | | AC002310, AL024506, U07000, AL139054, |
| | | | | | AC005378, AC007546, AC006050, AF207550, |
| | | | | | AL031985, AL021154, AC003662, Z97832, |
| | | | | | AF190465, AC004148, Z69363, AC005089, |
| | | | | | AC002492, AC006160, AC005962, AC003071, |
| | | | | | AB023049, AC007283, AC005565, AF165926, |
| | | | | | AL034423, AL021806, Z98750, Z84469, |
| | | | | | AC004780, AL023575, AC007344, AC005022, |
| | | | | | AC000039, X78673, Z93244, AC006388, |
| | | | | | AC003009, AF053356, AC005902, AC007363, |
| | | | | | AC009247, AC002460, AL031123, AC004623, |
| | | | | | AC005920, AC005529, AC006088, AC005495, |
| | | | | | AL021546, AP000553, AC004232, AC004755, |
| | | | | | AC006241, AL050321, AC007444, AC003663, |
| | | | | | AL121654, AP000512, AL035072, AC004605, |
| | | | | | Z82901, AC002036, Z98747, AC005553, |
| | | | | | AP000044, AP000112, AC005837, AC004087, |
| | | | | | AC005520, AC004851, Z98044, and AL022476. |
| HFEAI72 | 363 | 700631 | 1-435 | 15-449 | H19656, AI871221, N53491, AA340081, |
| | | | | | AI476773, R02223, AA019169, AA044939, |
| | | | | | AA021017, H37973, W96236, R74403, R74224, |
| | | | | | AA016157, AI762534, AI201941, AA017120, |
| | | | | | AA015837, H42352, AW000821, T63666, |
| | | | | | AA476232, AA873589, AI095887, AI357647, |
| | | | | | AI445981, AI261809, AA279231, U73637, |
| | | | | | AF015416, AL137276, and AF083108. |
| HFEAI49 | 364 | 722129 | 1-485 | 15-499 | AA284260, W48785, AI131081, W49755, |
| | | | | | AW069789, AI023062, AA340065, AW206500, |
| | | | | | AF086202, Y16790, and AC003958. |
| HFEAH01 | 365 | 916068 | 1-496 | 15-510 | AA704235. |
| HFEAG41 | 366 | 504596 | 1-426 | 15-440 | AI190071, AA009967, AI274239, AI288530, |
| | | | | | AI160067, AA009968, W02653, AI264920, |
| | | | | | AA456003, AA339939, and AA455358. |
| HESAC55 | 367 | 518730 | 1-55 | 15-69 | |
| HESAC45 | 368 | 537453 | 1-210 | 15-224 | Z97200. |
| HERAS77 | 369 | 772471 | 1-306 | 15-320 | AI557808, AI557426, AI557602, AI541027, |
| | | | | | AI541075, AI541048, AI557543, and AI535994. |
| HERAS69 | 370 | 974532 | 1-495 | 15-509 | |
| HERAN59 | 371 | 739562 | 1-325 | 15-339 | T82116, AI829904, AA631175, R00898, |
| | | | | | AA833920, T85082, and AF187320. |
| HERAN52 | 372 | 855536 | 1-362 | 15-376 | H55872, and H54532. |
| HERAN24 | 373 | 855537 | 1-363 | 15-377 | T87555, and AL021391. |
| HERAN16 | 374 | 973714 | 1-161 | 15-175 | |
| HERAN06 | 375 | 954671 | 1-542 | 15-556 | AA601241. |
| HERAL72 | 376 | 529196 | 1-300. | 15-314 | AP000280, AP000039, and AP000107. |
| HERAK96 | 377 | 796591 | 1-208 | 15-222 | AA601268, N23705, AC007567, AF172277, |
| | | | | | Z49918, AL035079, AC007156, AC004506 |
| | | | | | AL0035604, AP000968, AP000952, AL049839, |
| | | | | | AL109759, AL080277, AC007126, AC007179, |
| | | | | | AC004055, and AC004147. |
| HERAK20 | 378 | 855546 | 1-378 | 15-392 | AA903174, AA699307, AA233864, AA809473, |
| | | | | | AA649328, AL035416, and AL132776. |
| HERAK01 | 379 | 921634 | 1-465 | 15-479 | AA482969. |
| HERAH85 | 380 | 928415 | 1-489 | 15-503 | AW378532, AW169038, AA641651, |
| | | | | | AA847499, AA570740, AA483606, AA568204, |
| | | | | | AW069227, AW303098, AA721645, AL042667, |
| | | | | | AL042670, H07953, AI278972, AA757426, |
| | | | | | AI755214, AI733856, AA773463, AI687343, |
| | | | | | AI369580, AA453558, AI754567, AA613761, |
| | | | | | AL120282, H73550, AI627614, AW301736, |
| | | | | | AA828153, AA410788, AA749235, AI859438, |
| | | | | | AW270385, AI754105, AA704393, T74524, |
| | | | | | AA630854, AA828637, AI056177, AA491767, |
| | | | | | AA315361, AI634187, AI431513, AA634991, |
| | | | | | AA527877, AA113272, AI310464, AA502991, |
| | | | | | AI457313, AA056248, AA515939, AI620992, |
| | | | | | AA630923, AI565084, AA579205, H69765, |
| | | | | | AA176604, T47138, AI580652, AA228778, |
| | | | | | AI077941, AI038304, AI249688, AA426277, |
| | | | | | AI754336, T50676, AA084609, AI433104, |
| | | | | | AI143840, AW188427, AL120141, W23546, |
| | | | | | R94326, AI277783, AA744094, AI569100, |
| | | | | | AI679002, AI860020, AA744048, AA613630, |
| | | | | | AA535216, AI564201, AA558366, AA598605, |
| | | | | | AA904211, AA713765, AI268019, AW338021, |
| | | | | | R99532, AI380617, H60912, AA640710, |
| | | | | | AI050076, AA551268, AA524616, AA053662, |
| | | | | | AA297195, AA586667, AA501867, AI342183, |
| | | | | | AI792575, AA053463, AL042373, AA584195, |
| | | | | | AA689351, AA302812, AC004662, AC005913, |
| | | | | | AL050307, AC002395, AL079342, AC002350, |
| | | | | | AC007298, AC005778, AC006211, AC004686, |
| | | | | | AC003665, AC006208, AL034379, AC002477, |
| | | | | | AC007868, U95742, AC007216, Z83838, |
| | | | | | AL117694, AL133289, AC005899, AL031291, |
| | | | | | AC004887, AC004890, AL078593, Z93244, |
| | | | | | AL049757, AC002553, AC008044, Z98941, |
| | | | | | Z93930, AC005500, U70984, AL109628, |
| | | | | | AL035249, AC002369, AC003950, AL133448, |
| | | | | | AC004797, U85195, AC005280, AL023575, |
| | | | | | AC006480, AC005821, AC002045, AP000555, |
| | | | | | AE000658, AL034423, AC005057, AC005081, |
| | | | | | AC004098, AC004973, AL031295, AP000501, |
| | | | | | AC004638, AC006019, AC006205, AL049776, |
| | | | | | AP000550, AL109758, AL080241, AL049694, |
| | | | | | AC007041, AC004491, AL035405, AC002301, |
| | | | | | AC006538, Z99716, AL049760, U52112, |
| | | | | | AC008018, AC005412, AL021154, AC004525, |
| | | | | | AC006544, AC005527, AL022323, AL133163, |
| | | | | | AC007283, AC000025, AC005399, AC004019, |
| | | | | | AC004050, AC004874, AC005863, AC002476, |
| | | | | | AC009501, AC004099, AL034376, AC006509, |
| | | | | | AL121825, AC005874, AF134471, AL024507, |
| | | | | | AL109798, AC005520, AC005037, AC004996, |
| | | | | | AC005235, AL031584, AC007225, AL109865, |
| | | | | | AC000159, AC005696, AC007242, Z83844, |
| | | | | | Z82201, AC003025, AL020993, AC003035, |
| | | | | | AL034417, AC003071, AC007731, AC002984, |
| | | | | | Z82173, AL021578, AC005529, AC007227, |
| | | | | | AL031230, AF053356, AP000248, AC003009, |
| | | | | | AC005512, AC007536, Z=69890, Z95118, |
| | | | | | AC006530, AC006441, AF139813, AC007238, |
| | | | | | AP000694, AC004084, AC004222, AC006037, |
| | | | | | AB023049, AL109952, AC006254, AL049780, |
| | | | | | Z84476, AC003108, AL031668, AC005069, |
| | | | | | AC004583, AC005789, AC004067, AL049872, |
| | | | | | AL031587, AF045555, AJ251973, AC005808, |
| | | | | | AC006160, AL022326, AC005907, AC002316, |
| | | | | | AC010582, AC007308, AL121748, Z68870, |
| | | | | | AC004752, AC005837, AC004526, AC005225, |
| | | | | | AL049569, AC005015, AP000049, AP000116, |
| | | | | | AC005751, AB001523, AC005921, AC007055, |
| | | | | | AL139054, AC005366, AC003690, AL034400, |
| | | | | | AC006468, AF196972, AP000356, AC005488, |
| | | | | | AC004522, AL121653, AL031589, AC005562, |
| | | | | | Z97054, D34614, Z84480, AL031311, |
| | | | | | AC007792, AP000311, U91319, AF205588, |
| | | | | | AC003043, AC005919, AC005261, AC006166, |
| | | | | | Z98742, Z85987, AL049869, AC005702, |
| | | | | | AC005763, Y18000, Z98036, AC005972, |
| | | | | | AC006126, AP000695, AC002126, AL136295, |
| | | | | | AL034451, AL050341, AC004230, AC005233, |
| | | | | | AC007676, AF107257, AL121603, AL035495, |
| | | | | | AC006111, AL022396, AC005516, AL096701, |
| | | | | | AC005618, AL008718, AC007993, Z93017, |
| | | | | | AL031728, AP000236, AL035587, Z94161, |
| | | | | | AC005304, AL008721, AL050317, AC005736, |
| | | | | | AF196779, Z98304, AC006088, AC004854, |
| | | | | | AC004228, AP000696, AC005058, AL050318, |
| | | | | | AP000034, AC005089, AL020997, AC003046, |
| | | | | | AJ006997, AL078638, Z97056, AC007774, |
| | | | | | AL021155, AC004966, and AC004655. |
| HERAH37 | 381 | 707573 | 1-770 | 15-784 | H19029. |
| HERAH16 | 382 | 880475 | 1-551 | 15-565 | AI633346. |
| HERAH06 | 383 | 954672 | 1-1054 | 15-1068 | AW296421, AA827698, AA485215, AI684418, |
| | | | | | AA484940, AA907560, AI434764, AA808137, |
| | | | | | AA725527, AA931349, AI473248, AA479094, |
| | | | | | T06094, and AA827660. |
| HERAG53 | 384 | 728441 | 1-319 | 15-333 | AA923410, H90248, and AC004985. |
| HERAE59 | 385 | 739569 | 1-405 | 15-419 | AA021495. |
| HERAE24 | 386 | 678518 | 1-541 | 15-555 | T54292. |
| HERAD94 | 387 | 793020 | 1-382 | 15-396 | H87576. |
| HERAD26 | 388 | 520370 | 1-486 | 15-500 | AA533241, AI824558, AW082490, AA745348, |
| | | | | | AI241976, AP001053, Z93017, AF001548, |
| | | | | | AC003043, AF053356, AC004491, AL031670, |
| | | | | | AC002551, AC005086, AP000553, AL049869, |
| | | | | | AL034417, AC016025, AC003010, AF047825, |
| | | | | | AC004890, AC005697, AP000355, AC007546, |
| | | | | | AC007845, AC005562, AL034423, AC009516, |
| | | | | | AC004966, AL080243, AL034420, AC005210, |
| | | | | | AC004383, AC005529, AF196970, AC004851, |
| | | | | | AJ003147, AL121603, AL031681, AP000501, |
| | | | | | AC002300, Z95152, AC005015, AC004805, |
| | | | | | AC006441, AC002094, AC008124, Z83822, |
| | | | | | AC005488, AC005261, AC005722, AC005406, |
| | | | | | U82828, AC002126, AC005051, AP000011, |
| | | | | | AC003982, AC002492, AL050318, AL096701, |
| | | | | | AC004882, U91321, Z98304, AC004253, |
| | | | | | Z85996, AL035045, AC006213, AC002544, |
| | | | | | AL031662, AC004217, AC004196, AC005102, |
| | | | | | AC004967, AL035089, AC002350, AC004073, |
| | | | | | AC005823, AC006501, AC007066, U91326, |
| | | | | | AC004685, AC004770, AF117829, AL049872, |
| | | | | | AC005871, AC007993, AP000152, AC007014, |
| | | | | | AC003104, AC007041, AC006449, AF107885, |
| | | | | | AC005484, AC002045, AC005049, AL109984, |
| | | | | | AC004963, AC004999, AL008582, AC005914, |
| | | | | | M89651, AF207550, AL109628, AL031286, |
| | | | | | AL023096, AC002511, AL008719, AC000026, |
| | | | | | AF073485, AF001549, and AC006275. |
| HERAC89 | 389 | 787123 | 1-412 | 15-426 | H60777, AI285970, AA654046, and AC002040. |
| HERAB53 | 390 | 727373 | 1-413 | 15-427 | R48728. |
| HBIPD10 | 391 | 961972 | 1-144 | 15-158 | T78780, AL118680, and Z83843. |
| HBIPB07 | 392 | 951981 | 1-330 | 15-344 | N92182. |
| HBI0Z10 | 393 | 973131 | 1-490 | 15-504 | |
| HBIOW11 | 394 | 965551 | 1-563 | 15-577 | AA031463, and AA027921. |
| HBIOT01 | 395 | 914657 | 1-728 | 15-742 | AA573622, R08736, and AA573669. |
| HBJOM94 | 396 | 973137 | 1-1128 | 15-1142 | AW369756, AW062278, AA452837, |
| | | | | | AA452978, AI767361, AI005282, AI263850, |
| | | | | | AW016065, N62955, AA514551, AI674818, |
| | | | | | and AA885328. |
| HBIOJ47 | 397 | 973132 | 1-506 | 15-520 | |
| HBIOJ05 | 398 | 930754 | 1-533 | 15-547 | AW295399, AW170383, AA600968, |
| | | | | | AA778832, AW300641, AW070290, |
| | | | | | AW207772, AW392670, AL119355, AL119483, |
| | | | | | U46349, AL119319, AL119457, AW372827, |
| | | | | | AW363220, U46350, U46347, AW384394, |
| | | | | | U46351, AL119324, U46341, AL119497, |
| | | | | | AL119443, Z99396, AL119484, AL119363, |
| | | | | | AL119391, AL119444, AL134538, AL119439, |
| | | | | | U46346, AL119341, AL119335, AL134920, |
| | | | | | AL119522, AL037205, AL042973, AL119399, |
| | | | | | AL079683, AL134531, AL134533, AL119418, |
| | | | | | U46345, AL119396, AL119496, AL042551, |
| | | | | | AB026436, AR060234, AR054110, A81671, |
| | | | | | AR066494, and AR069079. |
| HBIOF05 | 399 | 930771 | 1-792 | 15-806 | AI023133, AA745668, T87533, T72340, |
| | | | | | T87532, T61876, and AC004832. |
| HBIMT11 | 400 | 965089 | 1-662 | 15-676 | AA404261, L44574, AI526093, AF083391, and |
| | | | | | Z68164. |
| HBIMR08 | 401 | 957996 | 1-452 | 15-466 | AI082567, AI803534, AI479326, AA005385, |
| | | | | | and AA002250. |
| HBFBA23 | 402 | 504560 | 1-193 | 15-207 | AA321091, AA321090, and AW194192. |
| HAWCB26 | 403 | 685045 | 1-603 | 15-617 | AA037375, AI494120, AA004786, and |
| | | | | | AA320986 |
| HAWAZ32 | 404 | 702976 | 1-450 | 15-464 | AA081658, AI823374, and AA320822. |
| HAWAY15 | 405 | 829255 | 1-507 | 15-521 | AA320756, N76958, AI337184, N76959, |
| | | | | | T30637, H83591, AI279487, T24591. R36246, |
| | | | | | R33788, AA349213, AI223852, AW135460, |
| | | | | | R58021, T31602, AA211453, Z17873, R57086, |
| | | | | | and AF094583. |
| HAWAW12 | 406 | 971497 | 1-482 | 15-496 | AA320662, AA115655, and AA613188. |
| HAWAS28 | 407 | 416137 | 1-516 | 15-530 | AW444450, AW452191, AW297700, N95486, |
| | | | | | AA320488, AA706097, R81942, AW029388, |
| | | | | | and AJ001189. |
| HAWAQ06 | 408 | 960762 | 1-667 | 15-681 | T97076, AA593256, and AA320405. |
| HAWAA53 | 409 | 864417 | 1-414 | 15-428 | AI904861, N50472, and AA319938. |
| HAVAF22 | 410 | 675054 | 1-315 | 15-329 | T68116. |
| HAVACO3 | 411 | 925291 | 1-529 | 15-543 | AA700867, AA780053, AA701583, W92785, |
| | | | | | AA693772, AW191053, AI696700, AI678951, |
| | | | | | AI918899, AI972441, and AC005221. |
| HARNO54 | 412 | 729117 | 1-419 | 15-433 | H23546. |
| HARNI55 | 413 | 731232 | 1-461 | 15-475 | R98614, and T62742. |
| HARND69 | 414 | 754675 | 1-600 | 15-614 | AI186548, AA436545, AA425059, AA025411, |
| | | | | | AI167560, AA918182, AI184458, AA897280, |
| | | | | | and AI168373. |
| HARNB30 | 415 | 731614 | 1-409 | 15-423 | AA193632, and R00325. |
| HARMV85 | 416 | 864612 | 1-442 | 15-456 | AA601359, and AC007388. |
| HARMP93 | 417 | 791948 | 1-517 | 15-531 | R85588. |
| HARMM53 | 418 | 854369 | 1-505 | 15-519 | H17278, R54233, AA343867, AA127371, |
| | | | | | AW402213, W31401, N57391, W69274, |
| | | | | | AA121905, N45642, AA308042, AA346816, |
| | | | | | AA173466, AW378674, AA102012, T32519, |
| | | | | | N53800, T19064, AB018285, and X59993. |
| HARMA51 | 419 | 725137 | 1-338 | 15-352 | H65776, H65775, R00579, and D29222. |
| HADXB70 | 420 | 757287 | 1-442 | 15-456 | T82184. |
| HADGI45 | 421 | 717755 | 1-536 | 15-550 | AI799976, AI640342, AI813303, AI493125, |
| | | | | | AW074863, AI808051, AA151242, AI520688, |
| | | | | | AA151243, AW138657, AA677631, H63202, |
| | | | | | AI270648, AI052606, H63116, AI061381, |
| | | | | | AI885928, and AI659159. |
| HADGG22 | 422 | 674421 | 1-866 | 15-880 | AI810674, AW297801, AA678903, R62179, |
| | | | | | AA631103, T83658, AW090118, AA528329, |
| | | | | | T98059, R92773, R64568, and T97982. |
| HADGC96 | 423 | 865247 | 1-369 | 15-383 | H75641. |
| HADGB52 | 424 | 647367 | 1-540 | 15-554 | AI097624, AI431774, AI741173, AI478836, |
| | | | | | AI858030, AW294999, AI400430, AI087828, |
| | | | | | AI923929, AI452787, AI634314, AI393799, |
| | | | | | AI356618, W81710, AA045278, AW296617, |
| | | | | | AI754038, AA641454, AI569987, AA665686, |
| | | | | | AW271172, AI307651, AI308106, D79255, |
| | | | | | Z84488, and AF098066. |
| HADGB01 | 425 | 916374 | 1-508 | 15-522 | T88730, AA825224, and W90089. |
| HADFZ81 | 426 | 420937 | 1-391 | 15-405 | AA085117, AA878759, and H84305. |
| HADFZ14 | 427 | 848980 | 1-662 | 15-676 | W86243, AW074332, AW006527, AA347495, |
| | | | | | AA776663, AA573067, AL036949, AW275640, |
| | | | | | AA578326, AA688303, AI668951, AA601084, |
| | | | | | AL044758, AI174703, AI364984, AI270280, |
| | | | | | AA594742, AA584738, AW452106, AA180056, |
| | | | | | AL047685, AA916556, AA557508, AA657808, |
| | | | | | AA427747, AA640305, AA715848, AA492496, |
| | | | | | T57562, AI143244, AA846944, AW169183, |
| | | | | | AI741059, AW162314, AW162332, AA598741, |
| | | | | | T49381, AA578711, AA584241, AA587550, |
| | | | | | AI114851, AI918550, AI797998, AW268052, |
| | | | | | T95537, AW301438, AA669225, AA687565, |
| | | | | | AA568303, R07491, AA568311, AW020682, |
| | | | | | AI133656, H05742, AL138119, AA857823, |
| | | | | | AA731859, AA493464, AW247955, AA425283, |
| | | | | | H16231, R12765, W60535, AW409621, |
| | | | | | AA780818, AA209188, H60489, AA088900, |
| | | | | | AI310670, AA112864, AI955861, AA493477, |
| | | | | | AW273177, AA480561, AI275631, AA525807, |
| | | | | | AW361157, AI745666, AW273235, AA569565, |
| | | | | | AA528507, AI869094, AW069273, AI952885, |
| | | | | | N73337, AI051775, AL044438, AA525071, |
| | | | | | AW080062, AA810158, AA984656, AI348780, |
| | | | | | AI925588, AA872474, W91898, AA742322, |
| | | | | | N53840, AA504998, AI335242, AA983182, |
| | | | | | AI051670, C06056, AW403177, AA243128, |
| | | | | | AA631434, H93897, AA255832, AI357842, |
| | | | | | R47231, AA946641, AA344811, AA650288, |
| | | | | | AW021674, N33381, AA349493, W60354, |
| | | | | | AW339887, AA729350, AI690852, AA443610, |
| | | | | | AA427421, AI038547, AW082558, AA102054, |
| | | | | | AI374988, AI608754, AA548142, AI014721, |
| | | | | | AA661583, AA666048, AI869986, AA502660, |
| | | | | | AA404619, AA551580, AA502509, N63618, |
| | | | | | AA143418, AA167178, AA493245, AA812182, |
| | | | | | AI760835, AA632621, R23873, AW172737, |
| | | | | | AI610814, AL043285, AL046110, AW172923, |
| | | | | | AI300608, AI887468, AI445793, AI978902, |
| | | | | | AI708424, AI613459, AA547956, AI097085, |
| | | | | | AC006450, Z82190, AF023268, AL031587, |
| | | | | | AC004000, AB004907, AF001551, Z84488, |
| | | | | | AC006312, AF112441, Z70288, Z78021, |
| | | | | | AC006261, Z95327, AL109839, AL035457, |
| | | | | | AC005160, AC007161, AC005933, AC006236, |
| | | | | | AL049844, AC006013, AC008079, AC000007, |
| | | | | | AL096678, AL079342, Z97196, AL022395, |
| | | | | | AL034548, AC020663, AC007021, AL132718, |
| | | | | | AC004623, Z83838, U91322, AF038458, |
| | | | | | AF044083, AP000067, AC006502, AL049793, |
| | | | | | U62293, AL031287, Y14768, AC005694, |
| | | | | | AB020873, Y18000, AL035455, AF129756, |
| | | | | | AL139054, AC008282, AL031075, AL022343, |
| | | | | | AF019664, U85196, AP000553, AC005800, |
| | | | | | AC006511, D87008, AC005779, D87012, |
| | | | | | Z93241, AC005484, AC004231, I08101, I08711, |
| | | | | | M24461, Z48051, AL023879, AL031257, |
| | | | | | AP001068, AC007227, AC008123, AF207550, |
| | | | | | D88268, AC007421, Z68617, Z99714, |
| | | | | | AC002425, AL034420, AC010436, AC005104, |
| | | | | | AC002563, AFO01548, AC002350, AC007637, |
| | | | | | AC009405, AC002480, AL035697, AC004987, |
| | | | | | AL021920, Z49155, U78027, AC002539, |
| | | | | | AC004776, AC002538, AC005060, AC005909, |
| | | | | | U91326, AC007387, AL117338, AC004827, |
| | | | | | AC002394, AP000014, AL121603, L78833, |
| | | | | | AF008195, AC006071, AL078612, AC005301, |
| | | | | | AL050343, Z79488, AC007036, AC004075, |
| | | | | | D28126, AP000702, AP000703, AP000238, |
| | | | | | AP000094, AC005377, AC001226, AC000403, |
| | | | | | AC005913, AL132642, L29074, AC005971, |
| | | | | | AF048727, U73479, Z82179, AL121892, |
| | | | | | AC005755, AC008585, AC004938, AP000694, |
| | | | | | AC003007, AL035422, AL031985, AC004738, |
| | | | | | AL021578, AL021877, AL031427, AC007676, |
| | | | | | AC006222, AL136295, U85195, AC005632, |
| | | | | | AC006371, AR036572, U91328, AE000658, |
| | | | | | AC004655, AL049795, AC002496, AC004825, |
| | | | | | Z93928, AC005338, AC005790, AF006501, |
| | | | | | AC004447, AL031680, Z98742, AC005516, |
| | | | | | AC007546, AL050308, AC00O119, AP000049, |
| | | | | | AL050321, APOOO31I, U91327, AC005999, |
| | | | | | AC006479, AL021307, AC002994, AC007917, |
| | | | | | AL022163, AC006162, AC007160, AC007455, |
| | | | | | AC004878, AL022099, AL049648, AP000689, |
| | | | | | AL008720, AC005725, AC004656, AP000252, |
| | | | | | AC008033, AL009051, Z69042, Z82171, |
| | | | | | U73644, AP000691, AC006165, AC004760, |
| | | | | | AC005195, Z98051, AC002036, AB023051, |
| | | | | | AP000096, AC012627, AP000692, AL034423, |
| | | | | | AC002551, AL109984, AL049694, AJ243213, |
| | | | | | AL035552, AC004921, AF047825, AC006556, |
| | | | | | AC004882, AL022165, AC006111, AP000512, |
| | | | | | AC004104, AL109865, AC007279, AC005972, |
| | | | | | AC005399, AL049709, AL022316, and |
| | | | | | AP000309. |
| HADFW15 | 428 | 848983 | 1-665 | 15-679 | AA077785. |
| HADFW06 | 429 | 935340 | 1-451 | 15-465 | AA192731, AA192764, AA985199, R95840, |
| | | | | | N72170, N26201, F00564, AL048275, |
| | | | | | AA470567, AA992908, H60249, AA297670, |
| | | | | | H53217, AW162442, AA559241, AA654778, |
| | | | | | H66577, AW188742, AI635440, AI912401, |
| | | | | | AI054030, AW419389, AL044340, AA533054, |
| | | | | | AI307565, AI344948, AA856851, AI418661, |
| | | | | | AA182731, AW083678, AI499954, H73550, |
| | | | | | AI669421, AI491725, AA579188, AA618140, |
| | | | | | AC004150, AC004797, AL031005, AC006254, |
| | | | | | AC007225, AF196779, AL133246, AL020993, |
| | | | | | AL031315, AL031311, AF001550, AC005488, |
| | | | | | AC007263, AC004686, AC006544, AC006449, |
| | | | | | AC005284, AC006505, Z83826, AC007685, |
| | | | | | AC005899, AC005225, AL031662, Z83840, |
| | | | | | AC002546, AC007262, AC007686, AL031291, |
| | | | | | AL031589, AC005519, AL078602, AC005015, |
| | | | | | Z49235, AL133448, Z97056, AC009721, |
| | | | | | AL031680, AC007955, AL132985, AC006021, |
| | | | | | AL049832, AP000113, AC002128, Z95152, |
| | | | | | AC005089, M87889, AL133245, AC005291, |
| | | | | | AL035413, Z95114, AL022336, AC004796, |
| | | | | | AL049650, AL050317, AL034423, AC005368, |
| | | | | | AC006044, AC006071, AC005207, AC006530, |
| | | | | | AL049869, D84401, AC007546, APOOO300, |
| | | | | | AC005399, AC002984, L78810, Z98742, |
| | | | | | AC006480, AL035249, AP000193, AC007688, |
| | | | | | AC004883, AF053356, AL035684, AL031846, |
| | | | | | AP000117, AC004067, AC006139, AL137100, |
| | | | | | AC006372, AC005660, AL049569, AL035400, |
| | | | | | AC004895, U47924, AP000045, AL031651, |
| | | | | | AF178030, AP000558, AC004099, AC005907, |
| | | | | | AL031668, AC004876, AC005500, AC004236, |
| | | | | | Z93096, AL022316, AC007227, AC005670, |
| | | | | | Z75887, AC005969, AC006271, AL034429, |
| | | | | | AC005049, AL031279, AC005081, AC001234, |
| | | | | | AB003151, AL049830, AL031683, AC007207, |
| | | | | | Z98051, AP00050I, AL133289, AP000514, |
| | | | | | AC007308, Z97053, AC004865, AC006084, |
| | | | | | AL031588, AF060568, AC005372, AC006965, |
| | | | | | AC005567, AC004560, AC002465, AC004000, |
| | | | | | Z83844, AC005695, AL022326, Z99495, |
| | | | | | AC006064, AC004525, AC005730, AC006312, |
| | | | | | AC005696, AL008726, U73628, AL096701, |
| | | | | | Z82180, Z93017, AC002375, AB015355, |
| | | | | | AL035455, U91326, AJ229041, AC004656, |
| | | | | | AC002544, AC005480, AC005874, AF134471, |
| | | | | | AL049766, AF129756, AC004890, AL121748, |
| | | | | | AL109623, AC005037, AC009516, AL022324, |
| | | | | | AC000004, AC005920, AC005740, AC009247, |
| | | | | | AP000511, AC005901, AL031186, AC005183, |
| | | | | | AP001053, AL031432, AL118497, AC004966, |
| | | | | | AC005755, AC004973, AD000684, AC006011, |
| | | | | | Z85995, AL022318, AC004814, AC006014, |
| | | | | | AF205588, AC006441, AC004859, AC00501l, |
| | | | | | AP000688, AF196969, APOO0555, AC007435, |
| | | | | | AL049757, AL022476, AC003071, AP000098, |
| | | | | | AC006450, AC004149, AC002492, AC006543, |
| | | | | | AC005837, AF207550, AL022165, Z98946, |
| | | | | | AC004975, AL079342, AC005261, AL049576, |
| | | | | | AF030453, AL008723, AL109809, AF146191, |
| | | | | | and AC008072. |
| HADFV03 | 430 | 972437 | 1-424 | 15-438 | |
| HADFT70 | 431 | 757158 | 1-336 | 15-350 | R28490. |
| HADFJ08 | 432 | 959297 | 1-523 | 15-537 | AA721097, Z43838, and AC004850. |
| HADFG9O | 433 | 788865 | 1-441 | 15-455 | T87517, T87516, T78515, and T79855. |
| HADFD69 | 434 | 754277 | 1-457 | 15-471 | AA164604, F07672, AF155115, and AC004890. |
| HADFC15 | 435 | 659541 | 1-387 | 15-401 | N98316, AW000995, and AI748897. |
| HADFB60 | 436 | 740318 | 1-437 | 15-451 | AI690274, AI492203, AA401279, AA404246, |
| | | | | | N48627, AI276004, AI024988, AW007396, |
| | | | | | AW074066, AI032465, AA773647, AA630603, |
| | | | | | AW169623, AI659076, AW016276, AI810405, |
| | | | | | and AI701343. |
| HADFB55 | 437 | 731686 | 1-504 | 15-518 | R74442, and AC006991. |
| HADFB08 | 438 | 959273 | 1-348 | 15-362 | AC007385. |
| HADEY09 | 439 | 625505 | 1-266 | 15-280 | AA054766. |
| HADEU65 | 440 | 747880 | 1-593 | 15-607 | AI986400, and H81086. |
| HADEU32 | 441 | 699194 | 1-503 | 15-517 | AI701480, AA101386, and C0l275. |
| HADET68 | 442 | 906389 | 1-755 | 15-769 | AA190865, W69970, AI382438, N25872, |
| | | | | | AI873741, W99370, AI187156, AW088488, |
| | | | | | AI969940, AI088449, AI631818, AI311717, |
| | | | | | AW205456, AA398256, AA830014, AA811798, |
| | | | | | AI796467, AI452434, AI159823, AA158516, |
| | | | | | AA225625, W92243, N30762, R59937, |
| | | | | | AW137104, AA761003, AA634216, AA146624, |
| | | | | | AI278434, AA535733, AI494095, AI052585, |
| | | | | | AI859053, AI479960, AW024960, AI066392, |
| | | | | | AI718153, AA564062, AA034276, AI245054, |
| | | | | | N35034, AI906964, AW338143, W92242, and |
| | | | | | AI708811. |
| HADDS75 | 443 | 660816 | 1-449 | 15-463 | AI372645, AI133330, AI301214, N31372, |
| | | | | | AI290759, H48745, H73512, AW021317, |
| | | | | | AI114633, W68505, W02524, AA039465, |
| | | | | | T83388, W16941, H60571, N21416, T56163, |
| | | | | | R01722, T99408, H50816, N38741, W31528, |
| | | | | | AA148484, AW439245, N80913, W86241, |
| | | | | | AI186806, AI740935, R86061, AA493422, |
| | | | | | AW003391, AI743264, AA564635, AA779666, |
| | | | | | AA843877, AI022120, AI188150, AA452018, |
| | | | | | AI184622, AA877163, AA627862, AI057547, |
| | | | | | AL120253, AI150812, AI469111, AI222801, |
| | | | | | AA367284, W16907, AI589760, AW380519, |
| | | | | | AI491889, N66738, AA854842, AI872089, |
| | | | | | AA365891, X85693, AW276304, AW410492, |
| | | | | | AI150758, N57546, AI366719, AA574215, |
| | | | | | AA039466, H46102, N54433, AA985543, |
| | | | | | AI761929, AA857999, AW020329, AI372643, |
| | | | | | AA772720, H97217, AW088561, AI214246, |
| | | | | | R01723, AW152676, AW080689, AA922923, |
| | | | | | AW151969, AI091989, AA745835, AI554586, |
| | | | | | AI049535, N74577, AW241766, AA468792, |
| | | | | | AW130558, AI763158, AA593595, AW152108, |
| | | | | | N89601, AI335534, AA534853, AA584284, |
| | | | | | AA148485, T33423, C00160, AA631113, |
| | | | | | AI092058, AA522573, T33424, AI553722, |
| | | | | | W68389, R29284, N91248, AI092199, |
| | | | | | AA723442, AA643576, AW391637, N44988, |
| | | | | | N21285, AI873858, AI765325, R10504, |
| | | | | | AA486981, AW020882, W69191, AA453986, |
| | | | | | N66548, AA557496, N98788, AA876644, |
| | | | | | T56125, C01254, AF113690, and AF097514. |
| HADDS21 | 444 | 670802 | 1-214 | 15-228 | AI142134, AL038838, AL037436, AL038983, |
| | | | | | AL038822, AL037727, AL038532, AL037295, |
| | | | | | AL040617, AL044186, AL041238, AL047012, |
| | | | | | AL037435, AL044125, AL044037, AL045817, |
| | | | | | AL047170, AL040463, AL040576, AL037343, |
| | | | | | AL045753, AL041752, AL045684, AL040625, |
| | | | | | AL047219, AL041635, AL044162, AL041602, |
| | | | | | AL043492, AL040839, AL043677, AL040193, |
| | | | | | AL043467, AL040510, AL037335, AL043923, |
| | | | | | AL043814, AL040621, AL043538, AL047183, |
| | | | | | AL043496, AL040464, AL037323, AL040294, |
| | | | | | AL043845, AL046442, AL044074, AL037443, |
| | | | | | AL041133, AL044064, AL041324, AL041459, |
| | | | | | AL041577, AL040075, AL041347, AL040322, |
| | | | | | AL040149, AL041098, AL040052, AL041730, |
| | | | | | AL041523, AL043627, AL040472, AL046850, |
| | | | | | AL040768, AL041374, AL040119, AL041955, |
| | | | | | AL046994, AL046914, AL043848, AL043570, |
| | | | | | AL042135, AL041096, AL040444, AL045920, |
| | | | | | AL041163, AL041168, AL047057, AL039316, |
| | | | | | AL045671, AL041159, AL046392, AL038761, |
| | | | | | AL044272, AL041292, AL041358, AL041296, |
| | | | | | AL044199, AL044258, AL040332, AL041142, |
| | | | | | AL041346, AL041086, AL134524, AL040148, |
| | | | | | AL040458, AL040529, AL044187, AL049018, |
| | | | | | AL040370, AL040745, AL046330, AL041197, |
| | | | | | AL040128, AL045990, AL041246, AL047036, |
| | | | | | AL041233, AL040342, AL040571, AL040553, |
| | | | | | AL079878, AL039338, AL044274, AL040285, |
| | | | | | AL041277, AL042096, AL040091, AL040155, |
| | | | | | AL046327, AL039360, AL041131, AL041186, |
| | | | | | AL039744, AL045989, AL039643, AL044165, |
| | | | | | AL039432, AL043941, AL040414, AL041051, |
| | | | | | AL040168, AL044201, AL037341, AL040090, |
| | | | | | AL079852, AL043775, AL040253, AL041227, |
| | | | | | AL041278, AL040238, AL041140, AL040082, |
| | | | | | AL045857, AL040255, AL040329, AL043444, |
| | | | | | AL040263, AL045725, AL039915, AL043612, |
| | | | | | AL041210, AL037279, AL042898, AL044529, |
| | | | | | AL045328, AL038745, AL049069, AA585101, |
| | | | | | T23957, AL045211, T23985, AL043537, |
| | | | | | T11028, AL046147, AI547295, AA585476, |
| | | | | | Z28355, Z30131, R28735, AI525556, AI525431, |
| | | | | | AL047037, R29177, R29445, AI541374, |
| | | | | | AL080031, D61254, AI541365, AA585439, |
| | | | | | AI547039, AI540967, AI541514, AA174170, |
| | | | | | AI541523, T23888, AI526073, AI525306, |
| | | | | | T41289, AI557262, AI541535, AI557731, |
| | | | | | AI526140, AL041344, AI546945, C16300, |
| | | | | | AI526184, C16305, AI546875, AI536138, |
| | | | | | AI535639, AI546891, R29218, AA585453, |
| | | | | | AI546855, AI525320, AI541508, AI541013, |
| | | | | | AI546828, AI557787, AI557799, AI541509, |
| | | | | | AI556967, AI546999, AI541534, AI541017, |
| | | | | | AL047163, D57491, AL134110, AI541510, |
| | | | | | AI526144, AI557807, AI557238, AI541307, |
| | | | | | D55233, C14723, AI526176, C15189, AI526187, |
| | | | | | D57186, AI525316, AI546899, AI535660, |
| | | | | | AL043440, AJ239433, AI557802, AI526194, |
| | | | | | AI541205, AL040385, AL045327, AI525321, |
| | | | | | AL036259, AI541390, AR064707, E13740, |
| | | | | | Y16359, I05558, I18895, A60212, A60209, |
| | | | | | A60210, A60211, AJ244003, AJ244004, |
| | | | | | AJ244005, I08396, E03627, A98767, I48927, |
| | | | | | A93963, A93964, AR062872, I63120, |
| | | | | | AR062871, AR017907, AR062873, A25909, |
| | | | | | AF082186, D78345, I84553, I84554, AI8050, |
| | | | | | A23334, A75888, I70384, A60111, A23633, |
| | | | | | AR007512, I15717, A91750, I15718, A81878, |
| | | | | | A90655, A02712, A77094, A77095, A95051, |
| | | | | | AI8053, A64973, AR031566, A20702, A43189, |
| | | | | | A43188, A20700, A98420, A98423, A98432, |
| | | | | | A98436, A98417, A98427, A35536, A35537, |
| | | | | | A02135, A04663, A02136, A04664, I06859, |
| | | | | | I00682, A11623, E00609, A11624, A11178, |
| | | | | | E01007, I13349, AI0361, M28262, D50010, |
| | | | | | I08395, AR043601, A85395, A85476, |
| | | | | | AR038855, A11245, X83865, A84772, A84776, |
| | | | | | A84773, A84775, A84774, AR067731, |
| | | | | | AR037157, AR054109, AR067732, A86792, |
| | | | | | A58522, I03331, A02710, E12615, AR035193, |
| | | | | | A92133, E14304, A07700, AI3392, AI3393, |
| | | | | | I62368, AR031488, I13521, I52048, A27396, |
| | | | | | AR027100, I49890, I44531, I28266, I21869, |
| | | | | | A91965, I44516, A70040, E16678, A82653, |
| | | | | | E16636, A93016, AR038762, I44681, A24783, |
| | | | | | A24782, A95117, A58524, A58523, AF149828, |
| | | | | | I01995, I25027, I26929, I44515, I26928, I26930, |
| | | | | | I26927, I08051, I60241, I60242, A20699, |
| | | | | | E00696, E00697, E03813, I66482, AR009151, |
| | | | | | I66485, I66483,166484, I66498, I66497, I66496, |
| | | | | | ARO38066, AR027099, I66487, I66486, |
| | | | | | AJ244007, AJ230935, AR051652, A22738, |
| | | | | | I08389, X07299, AR051651, D13316, Y09813, |
| | | | | | AJ230902, U94592, AR008429, AB025273, |
| | | | | | AR051957, AJ230951, AJ230867, X81969, |
| | | | | | AJ231009, AJ230972, I19525, D13509, Z32836, |
| | | | | | E12584, AR035975, AR035977, AJ231028, |
| | | | | | AJ238010, A70872, E17098, I66495, I66494, |
| | | | | | AR066494, A70869, A22734, AR022273, |
| | | | | | D17247, I18302, AJ230845, I36244, AR051864, |
| | | | | | AR051865, A06631, AR035974, AR035976, |
| | | | | | AR035978, S60422, A93923, AR063812, |
| | | | | | AJ231011, A24548, A24546, Y14219, A93916, |
| | | | | | I05845, A93931, AJ230996, A16035, I03669, |
| | | | | | I03668, I33632, E03654, AR054723, AR023813, |
| | | | | | A05993, A05991, and A22739. |
| HADDS07 | 445 | 849000 | 1-291 | 15-305 | R08444, N40963, N46826, AA640680, |
| | | | | | AA657537, AC005081, AC002091, AC005015, |
| | | | | | AL049694, AC004139, AC006388, and |
| | | | | | AB026898. |
| HADDR20 | 446 | 669609 | 1-446 | 15-460 | AA262058. |
| HADDQ56 | 447 | 733340 | 1-473 | 15-487 | N63670, and H52048. |
| HADDP12 | 448 | 970537 | 1-438 | 15-452 | |
| HADDI89 | 449 | 865278 | 1-426 | 15-440 | R08068, H90688, AA984920, AA828045, |
| | | | | | AL139054, AC005562, AC006111, AC004813, |
| | | | | | AF053356, AL033376, AC002470, AC005899, |
| | | | | | AC006960, AC002425, AC004967, AC007993, |
| | | | | | AC005015, AL022165, AC003950, AC004125, |
| | | | | | AC005531, AL049569, U07000, AB023048, |
| | | | | | AP000010, AL049779, AC004382, AC008372, |
| | | | | | AC006023, AL022320, AL096774, AC007216, |
| | | | | | U95742, AF038458, AL050307, and AC006285. |
| HADDI54 | 450 | 729760 | 1-446 | 15-460 | |
| HADDI42 | 451 | 713700 | 1-103 | 15-117 | AA968485, AC002527, AP000550, AC008149, |
| | | | | | AC008080, AL049631, AL136295, AC008018, |
| | | | | | AC012330, AC007685, AC007325, Z95325, |
| | | | | | AL133355, AC007981, AC004491, AC005821, |
| | | | | | U85195, AE000658, AC007708, AL024507, |
| | | | | | and AC006057. |
| HADDE27 | 452 | 683382 | 1-372 | 15-386 | R38342. |
| HADDE15 | 453 | 952542 | 1-776 | 15-790 | AI744486, AA903456, AW068237, AA643634, |
| | | | | | R92952, AW364719, H75941, AA039352, and |
| | | | | | AA039428. |
| HADDC94 | 454 | 794266 | 1-558 | 15-572 | H43867, AA780295, AA481208, AW337577, |
| | | | | | AA836333, AW268859, AI887751, D62679, |
| | | | | | and D79824. |
| HADDC64 | 455 | 469113 | 1-468 | 15-482 | AA778816, AI022235, and AI912111. |
| HADDC44 | 456 | 715928 | 1-452 | 15-466 | |
| HADDC42 | 457 | 713657 | 1-458 | 15-472 | |
| HADDC05 | 458 | 932066 | 1-482 | 15-496 | |
| HADDB62 | 459 | 743476 | 1-518 | 15-532 | |
| HADDB13 | 460 | 657120 | 1-442 | 15-456 | |
| HADDA04 | 461 | 925627 | 1-333 | 15-347 | |
| HADCZ08 | 462 | 959304 | 1-421 | 15-435 | AA578523, N69399, AI364568, AI272649, |
| | | | | | AW265274, T52745, AA159006, AA547979, |
| | | | | | T02827, AL047480, W81372, H68343, |
| | | | | | AI570019, AI744830, AA565911, AA664126, |
| | | | | | AA508148, M78026, F00350, AA357878, |
| | | | | | R55078, AA847710, AI054090, AI246061, |
| | | | | | AA356310, F33126, AA984585, F33494, |
| | | | | | AA150013, AA487226, AA297776, AI678812, |
| | | | | | AI689029, N27874, AI376197, AA663030, |
| | | | | | AI567941, AA453127, AI679394, AI925423, |
| | | | | | AA503018, Z99716, AC020663, AL049699, |
| | | | | | AC006581, D88270, AF126403, AC004983, |
| | | | | | Z83826, AC005316, D86992, AL049779, |
| | | | | | AC005317, AC004491, AL021397, AC004659, |
| | | | | | AC004801, AC015853, AP000031, AC006035, |
| | | | | | AC006441, AC005089, U52111, U51561, |
| | | | | | AC006313, AC006021, AL031432, AC005740, |
| | | | | | AC012384, AC005218, AC005250, AC004079, |
| | | | | | AP000555, AL035405, AL139054, AL049694, |
| | | | | | AC005088, Z95115, AF124523, AL035587, |
| | | | | | AC004223, AC005210, AC005180, AL049761, |
| | | | | | AC005081, AL096791, AL022336, U95743, |
| | | | | | AC007050, AC003101, AF109907, AL022313, |
| | | | | | AC005666, AC009731, AC005049, AC005207, |
| | | | | | AL117694, AC005225, AF207550, AC007065, |
| | | | | | AC004820, AC005191, AL031735, AC005200, |
| | | | | | AC004991, AC007435, AL121658, AC002369, |
| | | | | | AL021977, AC005015, AC005477, AL031681, |
| | | | | | AL122020, AC005332, AL031774, AC005318, |
| | | | | | AP000065, AL079342, AC004525, AC003070, |
| | | | | | AL132987, AC007450, AL121578, AP000103, |
| | | | | | AP000512, AC005409, AC004526, AC004601, |
| | | | | | AP000557, AP000356, AC003002, AC002553, |
| | | | | | AC005531, AC007868, AF111167, AL032822, |
| | | | | | Z98950, AL021394, AC007664, AC005288, |
| | | | | | AC007240, AC004686, AL033527, AC006312, |
| | | | | | AL022327, AC005231, AF015262, AC005837, |
| | | | | | AC004921, AC004901, Z84487, AC005031, |
| | | | | | AC004858, AC005919, AC005725, AC005914, |
| | | | | | AL133485, AC007919, U52112, AL049760, |
| | | | | | AP000213, AC005796, AC006487, AJ229043, |
| | | | | | AP000135, AL021155, AL031589, AP000556, |
| | | | | | AL008718, AF196779, AC004900, AC006014, |
| | | | | | AL008719, U80017, AC005291, AC005519, |
| | | | | | AC006576, Z82244, AL096763, AC006160, |
| | | | | | U91321, AP000033, AC003029, U95739, |
| | | | | | AC005005, AC004542, AL135879, AL121790, |
| | | | | | AL035423, AL022165, AL024498, AC004895, |
| | | | | | AL035683, AL009183, AC005846, AP000347, |
| | | | | | AC004985, Z97054, AL033504, AL034420, |
| | | | | | AC007052, AF001550, AL109963, AF111168, |
| | | | | | AC005082, AC007536, AC007226, AL078462, |
| | | | | | AL049843, AC005684, AC006205, AC005911, |
| | | | | | AF045555, AC006032, AL121756, AC006468, |
| | | | | | AL031280, AC005184, AC003071, AF196971, |
| | | | | | AL021707, AC0030I0, AL078604, AL021939, |
| | | | | | AC004821, AF053356, AC002045, AL031588, |
| | | | | | AC007314, Z82203, and AL096775. |
| HADCX34 | 463 | 704030 | 1-492 | 15-506 | N46092, and N49191. |
| HADCW01 | 464 | 916399 | 1-504 | 15-518 | AA293532, H53687, AW291311, T49748, and |
| | | | | | AA780313. |
| HADCP73 | 465 | 764391 | 1-448 | 15-462 | |
| HADCP50 | 466 | 723684 | 1-446 | 15-460 | AC004788. |
| HADCO30 | 467 | 914688 | 1-314 | 15-328 | W68180, AA777538, AI016897, AA505811, |
| | | | | | AI804007, AA211372, AA262276, H30038, |
| | | | | | AA573625, AI333526, T86707, AW449911, |
| | | | | | and W94803. |
| HADC003 | 468 | 924043 | 1-494 | 15-508 | AA028096, AA235869, and AC003963. |
| HADCN29 | 469 | 690600 | 1-552 | 15-566 | AA418028, and AI401479. |
| HADCH77 | 470 | 826137 | 1-657 | 15-671 | R91980, H94853, and AC002395. |
| HADCD46 | 471 | 719005 | 1-529 | 15-543 | AA054485, AA114892, AA058522, and |
| | | | | | AA114893. |
| HADAY29 | 472 | 690602 | 1-313 | 15-327 | N67971. |
| HADAS83 | 473 | 490455 | 1-465 | 15-479 | AA582073, AW277171, T08298, AL044286, |
| | | | | | N73855, AW172928, AA988601, AI275071, |
| | | | | | AA953238, AA724782, W92132, AI564454, |
| | | | | | AA668807, AA492391, AA572812, AA188670, |
| | | | | | AA362511, AW360894, AI635247, AC005071, |
| | | | | | Z93930, AC007707, AL109654, AC005212, |
| | | | | | AL008637, AC006040, AF107885, AF045555, |
| | | | | | AJ011930, AL031846, AL109985, AC004816, |
| | | | | | AL135783, AC011604, AC005229, AC006441, |
| | | | | | U91318, AP000244, AL031291, AC004253, |
| | | | | | AC005914, AC010206, AC006195, AC005081, |
| | | | | | AC007308, AC002470, AC007731, AC005500, |
| | | | | | AJ010770, AC002381, AL035400, AL096775, |
| | | | | | AL009183, AL035652, AL031120, AC006581, |
| | | | | | AP000065, AL034412, AC007688, AL050341, |
| | | | | | AL031315, AL031776, AC000066, AL024507, |
| | | | | | AC006146, and AC002465. |
| HADAR23 | 474 | 675844 | 1-908 | 15-922 | H70932, H71018, AA644669, and AL096772. |
| HADAM60 | 475 | 740326 | 1-381 | 15-395 | T63452. |
| HADAE96 | 476 | 796469 | 1-382 | 15-396 | H50907, H50917, and H50938. |
| HADAE92 | 477 | 792823 | 1-459 | 15-473 | R34471, AW021062, and AC005856. |
| HACCW79 | 478 | 774898 | 1-440 | 15-454 | N57511, AW169153, N34512, AI677832, |
| | | | | | N33099, D60324, AW247893, D81067, |
| | | | | | AI867484, H83428, AW044454, AI869047, |
| | | | | | AA426226, AI080402, AI590805, AI393129, |
| | | | | | AA159625, AA934072, AI359017, AA736535, |
| | | | | | AA782955, AA150219, AW248839, |
| | | | | | AW291088, AI824032, AA136239, AA143058, |
| | | | | | AW134681, AI937151, AI720406, AA037761, |
| | | | | | AA136326, AW242313, N44915, AF161487, |
| | | | | | and AF161527. |
| HACCT11 | 479 | 966886 | 1-335 | 15-349 | AA742786, AC004765, and AC004254. |
| HACBW76 | 480 | 849054 | 1-502 | 15-516 | AA534725, C14805, and AI824978. |
| HACBU26 | 481 | 683006 | 1-826 | 15-840 | AI923119, AI884571, AA910503, AW327469, |
| | | | | | AW148606, AI334355, AI538884, AA595725, |
| | | | | | AI310084, AA256652, AI422677, AI291710, |
| | | | | | AI356846, R99346, AA633060, N30667, |
| | | | | | AW327470, AA280603, AI610334, AI349093, |
| | | | | | AA525149, AA525148, AA525150, AA507850, |
| | | | | | AI274009, AI911897, AA551760, AI401819, |
| | | | | | AA479292, AA056438, AA644366, AI814045, |
| | | | | | AA774677, AW131804, AI292285, AA553671, |
| | | | | | AW051972, AI355604, AA633328, AA131087, |
| | | | | | AA159347, AA159149, AA159176, AA573357, |
| | | | | | AA844299, N52609, AA292080, AA768757, |
| | | | | | AA292117, AA283969, AA093875, AW179033, |
| | | | | | AA481886, AW135550, AA280623, F36263, |
| | | | | | AA548176, AW149284, W32236, W02037, |
| | | | | | AA357777, AI459476, AI373055, AA283894, |
| | | | | | AA903604, AA632105, AA664682, T91989, |
| | | | | | AW023739, Z19852, AI375183, H58939, |
| | | | | | AA886274, AA278731, AF083384, and |
| | | | | | A75145. |
| HACBO10 | 482 | 964459 | 1-703 | 15-717 | AI732190, AI821730, AI935265, AA931721, |
| | | | | | AA598488, AI821204, AA653397, AA872260, |
| | | | | | AJ006995, and AC009721. |
| HACBN71 | 483 | 872015 | 1-457 | 15-471 | N36051, N33866, H42954, AA411585, |
| | | | | | AA485512, AW407316, AA477803, D81930, |
| | | | | | N79656, AA393178, H93834, AI908551, |
| | | | | | AI908565, AA298404, AA143285, AA296690, |
| | | | | | AI910113, AA297564, AA303056, AA296812, |
| | | | | | AA296976, AA045562, W21048, AI031665, |
| | | | | | AW276772, AA082648, AW001391, AI066608, |
| | | | | | AA298311, AI290747, AA305827, R97588, |
| | | | | | AA297445, AI186832, AI147480, AI084670, |
| | | | | | AI140421, and AI720871. |
| HACBJ83 | 484 | 875263 | 1-460 | 15-474 | H30314, N33882, R50257, R50650, AA235113, |
| | | | | | AA283851, AA489709, AF126164, and |
| | | | | | AF126163. |
| HACBJ17 | 485 | 663371 | 1-481 | 15-495 | H15324, H15325, R21298, and AL0497l3. |
| HACBH42 | 486 | 933951 | 1-513 | 15-527 | AA456485, AA234642, W30931, AF124251, |
| | | | | | AF168364, and AB030442. |
| HACBB13 | 487 | 698800 | 1-418 | 15-432 | H74233, AW205784, AA157880, AI581278, |
| | | | | | AA134927, AI418897, AA385998, AW172419, |
| | | | | | AW341704, AA325637, AA158718, AA931407, |
| | | | | | AI199564, AA693922, AA807889, AA932838, |
| | | | | | AI002537, T96136, AW083925, AI830223, |
| | | | | | AI914970, AA978020, AA861149, AA744572, |
| | | | | | AI261752, AA150534, AA835679, AA804787, |
| | | | | | F16852, AA873015, AW117276, AA729420, |
| | | | | | AI611192, AA699638, AI351776, AA203423, |
| | | | | | AA317352, AA203456, AI961898, H00617, |
| | | | | | AA906614, H01783, R62542, AA324813, |
| | | | | | AA886983, AA700174, AA973939, AA247331, |
| | | | | | AA887599, AI799375, H97221, AW167067, |
| | | | | | R24697, Z45479, AI313028, AI345360, |
| | | | | | AW304568, AI312388, AI252594, AI251182, |
| | | | | | AI312285, AI583295, AA385999, AI054032, |
| | | | | | AW271901, AA970565, AA321756, AI144033, |
| | | | | | AI144109, AA703148, AW271131, AW271148, |
| | | | | | T99095, AA364223, AA384273, W01014, |
| | | | | | AA627126, W32401, and AA545762. |
| HACAB93 | 488 | 792382 | 1-496 | 15-510 | AA258113. |
| HACAA57 | 489 | 733887 | 1-498 | 15-512 | AW418522, AI922912, AA001450, D81693, |
| | | | | | D60730, H85556, D80496, C15251, D80929, |
| | | | | | and D80928. |
| HACAA03 | 490 | 924513 | 1-470 | 15-484 | AA534548, AW271647, and AA625364. |
| HABGA24 | 491 | 676827 | 1-187 | 15-201 | N47285, AI798922, AA744628, and AJ245600. |

[0100] TABLE 4

| Code | Description | Tissue | Organ | Cell Line | Disease | Vector |
|---|---|---|---|---|---|---|
| AR022 | a_Heart | a_Heart | | | | |
| AR023 | a_Liver | a_Liver | | | | |
| AR024 | a_mammary gland | a_mammary gland | | | | |
| AR025 | a_Prostate | a_Prostate | | | | |
| AR026 | a_small intestine | a_small intestine | | | | |
| AR027 | a_Stomach | a Stomach | | | | |
| AR028 | Blood B cells | Blood B cells | | | | |
| AR029 | Blood B cells activated | Blood B cells | | | | |
| | | activated | | | | |
| AR030 | Blood B cells resting | Blood B cells | | | | |
| | | resting | | | | |
| AR031 | Blood T cells activated | Blood T cells | | | | |
| | | activated | | | | |
| AR032 | Blood T cells resting | Blood T cells resting | | | | |
| AR033 | brain | brain | | | | |
| AR034 | breast | breast | | | | |
| AR035 | breast cancer | breast cancer | | | | |
| AR036 | Cell Line CAOV3 | Cell Line CAOV3 | | | | |
| AR037 | cell line PA-I | cell line PA-1 | | | | |
| AR038 | cell line transformed | cell line transformed | | | | |
| AR039 | colon | colon | | | | |
| AR040 | colon (9808co65R) | colon (9808co65R) | | | | |
| AR041 | colon (9809co15) | colon (9809co15) | | | | |
| AR042 | colon cancer | colon cancer | | | | |
| AR043 | colon cancer | colon cancer | | | | |
| | (9808co64R) | (9808co64R) | | | | |
| AR044 | colon cancer 9809co14 | colon cancer | | | | |
| | | 9809co14 | | | | |
| AR045 | corn clone 5 | corn clone 5 | | | | |
| AR046 | corn clone 6 | corn clone 6 | | | | |
| AR047 | corn clone2 | corn clone2 | | | | |
| AR048 | corn clone3 | corn clone3 | | | | |
| AR049 | Corn Clone4 | Corn Clone4 | | | | |
| AR050 | Donor II B Cells 24 hrs | Donor II B Cells | | | | |
| | | 24 hrs | | | | |
| AR051 | Donor II B Cells 72 hrs | Donor II B Cells | | | | |
| | | 72 hrs | | | | |
| AR052 | Donor II B-Cells 24 hrs. | Donor II B-Cells 24 | | | | |
| | | hrs. | | | | |
| AR053 | Donor II B-Cells 72 hrs | Donor II B-Cells | | | | |
| | | 72 hrs | | | | |
| AR054 | Donor II Resting B Cells | Donor II Resting B | | | | |
| | | Cells | | | | |
| AR055 | Heart | Heart | | | | |
| AR056 | Human Lung | Human Lung | | | | |
| | (clonetech) | (clonetech) | | | | |
| AR057 | Human Mammary | Human Mammary | | | | |
| | (clontech) | (clontech) | | | | |
| AR058 | Human Thymus | Human Thymus | | | | |
| | (clonetech) | (clonetech) | | | | |
| AR059 | Jurkat (unstimulated) | Jurkat | | | | |
| | | (unstimulated) | | | | |
| AR060 | Kidney | Kidney | | | | |
| AR061 | Liver | Liver | | | | |
| AR062 | Liver (Clontech) | Liver (Clontech) | | | | |
| AR063 | Lymphocytes chronic | Lymphocytes | | | | |
| | lymphocytic leukaemia | chronic lymphocytic | | | | |
| | | leukaemia | | | | |
| AR064 | Lymphocytes diffuse | Lymphocytes | | | | |
| | large B cell lymphoma | diffuse large B cell | | | | |
| | | lymphoma | | | | |
| AR065 | Lymphocytes follicular | Lymphocytes | | | | |
| | lymphoma | follicular lymphoma | | | | |
| AR066 | normal breast | normal breast | | | | |
| AR067 | Normal Ovarian | Normal Ovarian | | | | |
| | (4004901) | (4004901) | | | | |
| AR068 | Normal Ovary | Normal Ovary | | | | |
| | 9508G045 | 9508G045 | | | | |
| AR069 | Normal Ovary | Normal Ovary | | | | |
| | 9701G208 | 9701G208 | | | | |
| AR070 | Normal Ovary | Normal Ovary | | | | |
| | 9806G005 | 9806G005 | | | | |
| AR071 | Ovarian Cancer | Ovarian Cancer | | | | |
| AR072 | Ovarian Cancer | Ovarian Cancer | | | | |
| | (9702G001) | (9702G001) | | | | |
| AR073 | Ovarian Cancer | Ovarian Cancer | | | | |
| | (9707G029) | (9707G029) | | | | |
| AR074 | Ovarian Cancer | Ovarian Cancer | | | | |
| | (9804G011) | (9804G011) | | | | |
| AR075 | Ovarian Cancer | Ovarian Cancer | | | | |
| | (9806G019) | (9806G019) | | | | |
| AR076 | Ovarian Cancer | Ovarian Cancer | | | | |
| | (9807G017) | (9807G017) | | | | |
| AR077 | Ovarian Cancer | Ovarian Cancer | | | | |
| | (9809G001) | (9809G001) | | | | |
| AR078 | ovarian cancer 15799 | ovarian cancer | | | | |
| | | 15799 | | | | |
| AR079 | Ovarian Cancer | Ovarian Cancer | | | | |
| | 17717AID | 17717AID | | | | |
| AR080 | Ovarian Cancer | Ovarian Cancer | | | | |
| | 4004664B1 | 4004664B1 | | | | |
| AR081 | Ovarian Cancer | Ovarian Cancer | | | | |
| | 4005315A1 | 4005315A1 | | | | |
| AR082 | ovarian cancer | ovarian cancer | | | | |
| | 94127303 | 94127303 | | | | |
| AR083 | Ovarian Cancer | Ovarian Cancer | | | | |
| | 96069304 | 96069304 | | | | |
| AR084 | Ovarian Cancer | Ovarian Cancer | | | | |
| | 9707G029 | 9707G029 | | | | |
| AR085 | Ovarian Cancer | Ovarian Cancer | | | | |
| | 9807G045 | 9807G045 | | | | |
| AR086 | ovarian cancer | ovarian cancer | | | | |
| | 9809G001 | 9809G001 | | | | |
| AR087 | Ovarian Cancer | Ovarian Cancer | | | | |
| | 9905C032RC | 9905C032RC | | | | |
| AR088 | Ovarian cancer 9907 | Ovarian cancer 9907 | | | | |
| | COO 3rd | COO 3rd | | | | |
| AR089 | Prostate | Prostate | | | | |
| AR090 | Prostate (clonetech) | Prostate (clonetech) | | | | |
| AR091 | prostate cancer | prostate cancer | | | | |
| AR092 | prostate cancer #15176 | prostate cancer | | | | |
| | | #15176 | | | | |
| AR093 | prostate cancer #15509 | prostate cancer | | | | |
| | | #15509 | | | | |
| AR094 | prostate cancer #15673 | prostate cancer | | | | |
| | | #15673 | | | | |
| AR095 | Small Intestine | Small Intestine | | | | |
| | (Clontech) | (Clontech) | | | | |
| AR096 | Spleen | Spleen | | | | |
| AR097 | Thymus T cells | Thymus T cells | | | | |
| | activated | activated | | | | |
| AR098 | Thymus T cells resting | Thymus T cells | | | | |
| | | resting | | | | |
| AR099 | Tonsil | Tonsil | | | | |
| AR100 | Tonsil germinal center | Tonsil germinal | | | | |
| | centroblast | center centroblast | | | | |
| AR101 | Tonsil germinal center B | Tonsil germinal | | | | |
| | cell | center B cell | | | | |
| AR102 | Tonsil lymph node | Tonsil lymph node | | | | |
| AR103 | Tonsil memory B cell | Tonsil memory B | | | | |
| | | cell | | | | |
| AR104 | Whole Brain | Whole Brain | | | | |
| AR105 | Xenograft ES-2 | Xenograft ES-2 | | | | |
| AR106 | Xenograft SW626 | Xenograft SW626 | | | | |
| H0068 | Human Skin Tumor | Human Skin Tumor | Skin | | disease | Uni-ZAP |
| | | | | | | XR |
| H0081 | Human Fetal Epithelium | Human Fetal Skin | Skin | | | Uni-ZAP |
| | (Skin) | | | | | XR |
| H0086 | Human epithelioid | Epithelioid | Sk Muscle | | disease | Uni-ZAP |
| | sarcoma | Sarcoma, muscle | | | | XR |
| H0344 | Adipose tissue (human) | Adipose - 6825A | | | | Uni-ZAP |
| | | (human) | | | | XR |
| H0345 | SKIN | Skin - 4000868H | Skin | | | Uni-ZAP |
| | | | | | | XR |
| H0427 | Human Adipose | Human Adipose, left | | | | pSport1 |
| | | hiplipoma | | | | |
| H0443 | H. Adipose, subtracted | Human Adipose, left | | | | pSport1 |
| | | hiplipoma | | | | |
| H0494 | Keratinocyte | Keratinocyte | | | | pCMVSport |
| | | | | | | 2.0 |
| H0540 | Skin, burned | Skin, leg burned | Skin | | | pSport1 |
| H0548 | Human Skin Fibroblasts, | Human Skin | | | | pBluescript |
| | normal | Fibroblasts | | | | |
| H0586 | Healing groin wound, | healing groin | groin | | disease | pCMVSport |
| | 6.5 hours post incision | wound, 6.5 hours | | | | 3.0 |
| | | post incision - 2/ | | | | |
| H0587 | Healing groin wound; | Groin-2/19/97 | groin | | disease | pCMVSport |
| | 7.5 hours post incision | | | | | 3.0 |
| H0592 | Healing groin wound - | HGS wound healing | | | disease | pCMVSport |
| | zero hr post-incision | project; abdomen | | | | 3.0 |
| | (control) | | | | | |
| H0593 | Olfactory | Olfactory epithelium | | | | pCMVSport |
| | epithelium; nasalcavity | from roof of left | | | | 3.0 |
| | | nasal cacit | | | | |
| H0600 | Healing Abdomen | Abdomen | | | disease | pCMVSport |
| | wound; 70 & 90 min post | | | | | 3.0 |
| | incision | | | | | |
| H0601 | Healing Abdomen | Abdomen | | | disease | pCMVSport |
| | Wound; 15 days post | | | | | 3.0 |
| | incision | | | | | |
| H0602 | Healing Abdomen | Abdomen | | | disease | pCMVSport |
| | Wound; 21 & 29 days | | | | | 3.0 |
| | post incision | | | | | |
| S0040 | Adipocytes | Human Adipocytes | | | | Uni-ZAP |
| | | from Osteoclastoma | | | | XR |
| S0280 | Human Adipose Tissue, | Human Adipose | | | | Uni-ZAP |
| | re-excision | Tissue | | | | XR |
| S0342 | Adipocytes; re-excision | Human Adipocytes | | | | Uni-ZAP |
| | | from Osteoclastoma | | | | XR |
| S0348 | Cheek Carcinoma | Cheek Carcinoma | | | disease | pSport1 |
| S6022 | H. Adipose Tissue | Human Adipose | | | | Uni-ZAP |
| | | Tissue | | | | XR |
| T0001 | Human Brown Fat | Brown Fat | | | | pBluescript |
| | | | | | | SK- |
| T0004 | Human White Fat | Human White Fat | | | | pBluescript |
| | | | | | | SK- |
| T0060 | Human White Adipose | Human White Fat | | | | pBluescript |
| | | | | | | SK- |
| L0005 | Clontech human aorta | | | | | |
| | polyA+ mRNA (#6572) | | | | | |
| L0021 | Human adult (K. Okubo) | | | | | |
| L0060 | Human thymus NSTH II | | | | | |
| L0361 | Stratagene ovary | | ovary | | | Bluescript |
| | (#937217) | | | | | SK |
| L0362 | Stratagene ovarian | | | | | Bluescript |
| | cancer (#937219) | | | | | SK- |
| L0363 | NCl_CGAP_GC2 | germ cell tumor | | | | Bluescript |
| | | | | | | SK- |
| L0365 | NCl_CGAP_Phe1 | pheochromocytoma | | | | Bluescript |
| | | | | | | SK- |
| L0366 | Stratagene schizo brain | schizophrenic brain | | | | Bluescript |
| | S11 | S-11 frontal lobe | | | | SK- |
| L0369 | NCl_CGAP_AA1 | adrenal adenoma | adrenal gland | | | Bluescript |
| | | | | | | SK- |
| L0375 | NCl_CGAP_Kid6 | kidney tumor | kidney | | | Bluescript |
| | | | | | | SK- |
| L0376 | NCl_CGAP_LarI | larynx | larynx | | | Bluescript |
| | | | | | | SK- |
| L0385 | NCl_CGAP_Gas1 | gastric tumor | stomach | | | Bluescript |
| | | | | | | SK- |
| L0388 | NCl_CGAP_HN6 | normal gingiva (cell | | | | Bluescript |
| | | line from | | | | SK- |
| | | immortalized_kerati | | | | |
| L0435 | Infant brain, LLNL | | | | | lafmid BA |
| | array of Dr. M. Soares | | | | | |
| | 1NIB | | | | | |
| L0438 | normalized infant brain | total brain | brain | | | lafmid BA |
| | cDNA | | | | | |
| L0439 | Soares infant brain | | whole brain | | | Lafmid BA |
| | 1 NIB | | | | | |
| L0455 | Human retina cDNA | retina | eye | | | lambda gt10 |
| | randomly primed | | | | | |
| | sublibrary | | | | | |
| L0471 | Human fetal heart, | | | | | Lambda |
| | Lambda ZAP Express | | | | | ZAP |
| | | | | | | Express |
| L0483 | Human pancreatic islet | | | | | Lambda |
| | | | | | | ZAP |
| L0517 | NCl_CGAP_Pr1 | | | | | pAMP10 |
| L0518 | NCl_CGAP_Pr2 | | | | | pAMP10 |
| L0519 | NCl_CGAP_Pr3 | | | | | pAMP 10 |
| L0520 | NCl_CGAP_Alv1 | alveolar | | | | pAMP10 |
| | rhabdomyosarcoma | | | | | |
| L0521 | NCl_CGAP_Ew1 | Ewing's sarcoma | | | | pAMP10 |
| L0527 | NCl_CGAP_0v2 | ovary | | | | pAMP10 |
| L0532 | NCl_CGAP_Thy1 | thyroid | | | | pAMP10 |
| L0539 | Chromosome 7 | | placenta | | | pAMP10 |
| | Placental cDNA Library | | | | | |
| L0545 | NCl_CGAP_Pr4.1 | prostatic | prostate | | | pAMP10 |
| | | intraepithelial | | | | |
| | | neoplasia - high | | | | |
| | | grade | | | | |
| L0562 | Chromosome 7 HeLa | | | HeLa cell | | pAMP10 |
| | cDNA Library | | | line; | | |
| | | | | ATCC | | |
| L0581 | Stratagene liver | | liver | | | pBluescript |
| | (#937224) | | | | | SK |
| L0589 | Stratagene fetal retina | | | | | pBluescript |
| | 937202 | | | | | SK- |
| L0591 | Stratagene HeLa cell s3 | | | | | pBluescript |
| | 937216 | | | | | SK- |
| L0592 | Stratagene hNT neuron | | | | | pBluescript |
| | (#937233) | | | | | SK- |
| L0593 | Stratagene | | | | | pBluescript |
| | neuroepithelium | | | | | SK- |
| | (#937231) | | | | | |
| L0594 | Stratagene | | | | | pBluescript |
| | neuroepithelium | | | | | SK- |
| | NT2RAMI 937234 | | | | | |
| L0595 | Stratagene NT2 | neuroepithelial cells | brain | | | pBluescript |
| | neuronal precursor | | | | | SK |
| | 937230 | | | | | |
| L0596 | Stratagene colon | | colon | | | pBluescript |
| | (#937204) | | | | | SK- |
| L0598 | Morton Fetal Cochlea | cochlea | ear | | | pBluescript |
| | | | | | | SK- |
| L0599 | Stratagene lung | | lung | | | pBluescript |
| | (#937210) | | | | | SK- |
| L0600 | Weizmann Olfactory | olfactory epithelium | nose | | | pBluescript |
| | Epithelium | | | | | SK- |
| L0601 | Stratagene pancreas | | pancreas | | | pBluescript |
| | (#937208) | | | | | SK- |
| L0602 | Pancreatic Islet | pancreatic islet | pancreas | | | pBluescript |
| | | | | | | SK- |
| L0603 | Stratagene placenta | | placenta | | | pBluescript |
| | (#937225) | | | | | SK- |
| L0604 | Stratagene muscle | muscle | skeletal | | | pBluescript |
| | 937209 | | muscle | | | SK- |
| L0605 | Stratagene fetal spleen | fetal spleen | spleen | | | pBluescript |
| | (#937205) | | | | | SK- |
| L0608 | Stratagene lung | lung carcinoma | lung | NCI-H69 | | pBluescript |
| | carcinoma 937218 | | | | | SK- |
| L0616 | Chromosome 21 exon | | | | | pBluescript1 |
| | | | | | | IKS+ |
| L0637 | NCl_CGAP_Bm53 | three pooled | brain | | | pCMV- |
| | | meningiomas | | | | SPORT6 |
| L0638 | NCl_CGAP_Brn35 | tumor, 5 pooled (see | brain | | | pCMV- |
| | | description) | | | | SPORT6 |
| L0653 | NCl_CGAP_Lu28 | two pooled | lung | | | pCMV- |
| | | squamous cell | | | | SPORT6 |
| | | carcinomas | | | | |
| L0655 | NCl_CGAP_Lym12 | lymphoma, | lymph node | | | pCMV- |
| | | follicular mixed | | | | SPORT6 |
| | | small and large cell | | | | |
| L0659 | NCl_CGAP_Pan1 | adenocarcinoma | pancreas | | | pCMV- |
| | | | | | | SPORT6 |
| L0662 | NCl_CGAP_Gas4 | poorly differentiated | stomach | | | pCMV- |
| | | adenocarcinoma | | | | SPORT6 |
| | | with signet r | | | | |
| L0663 | NCl_CGAP_Ut2 | moderately- | uterus | | | pCMV |
| | | differentiated | | | | SPORT6 |
| | | endometrial | | | | |
| | | adenocarcino | | | | |
| L0664 | NCl_CGAP_Ut3 | poorly-differentiated | uterus | | | pCMV |
| | | endometrial | | | | SPORT6 |
| | | adenocarcinoma, | | | | |
| L0666 | NCl_CGAP_Ut1 | well-differentiated | uterus | | | pCMV- |
| | | endometrial | | | | SPORT6 |
| | | adenocarcinoma, 7 | | | | |
| L0667 | NCl_CGAP_CML1 | myeloid cells, 18 | whole blood | | | pCMV- |
| | | pooled CML cases, | | | | SPORT6 |
| | | BCR/ABL rearra | | | | |
| L0717 | Gessler Wilms tumor | | | | | pSPORT1 |
| L0731 | Soares_pregnant_uterus | | uterus | | | pT7T3-Pac |
| | NbHPU | | | | | |
| L0740 | Soares melanocyte | melanocyte | | | | pT7T3D |
| | 2NbHM | (Pharmacia) | | | | |
| | | | | | | with a |
| | | | | | | modified |
| | | | | | | polylinker |
| L0741 | Soares adult brain | | brain | | | pT7T3D |
| | N2b4HB55Y | | | | | (Pharmacia) |
| | | | | | | with a |
| | | | | | | modified |
| | | | | | | polylinker |
| L0742 | Soares adult brain | | brain | | | pT7T3D |
| | N2b5HBS5Y | | | | | (Pharmacia) |
| | | | | | | with a |
| | | | | | | modified |
| | | | | | | polylinker |
| L0743 | Soares breast 2NbHBst | | breast | | | pT7T3D |
| | | | | | | (Pharmacia) |
| | | | | | | with a |
| | | | | | | modified |
| | | | | | | polylinker |
| L0744 | Soares breast 3NbHBst | | breast | | | pT7T3D |
| | | | | | | (Pharmacia) |
| | | | | | | with a |
| | | | | | | modified |
| | | | | | | polylinker |
| L0745 | Soares retina N2b4HR | retina | eye | | | pT7T3D |
| | | | | | | (Pharmacia) |
| | | | | | | with a |
| | | | | | | modified |
| | | | | | | polylinker |
| L0746 | Soares retina N2b5HR | retina | eye | | | pT7T3D |
| | | | | | | (Pharmacia) |
| | | | | | | with a |
| | | | | | | modified |
| | | | | | | polylinker |
| L0747 | Soares_fetal_heart_NbH | | heart | | | pT7T3D |
| | H19W | | | | | (Pharmacia) |
| | | | | | | with a |
| | | | | | | modified |
| | | | | | | polylinker |
| L0748 | Soares fetal liver spleen | | Liver and | | | pT7T3D |
| | 1NFLS | | Spleen | | | (Pharmacia) |
| | | | | | | with a |
| | | | | | | modified |
| | | | | | | polylinker |
| L0749 | Soares_fetal_liver_splee | | Liver and | | | pT7T3D |
| | n_1NFLS_S1 | | Spleen | | | (Pharmacia) |
| | | | | | | with a |
| | | | | | | modified |
| | | | | | | polylinker |
| L0750 | Soares_fetal_lung_NbH | | lung | | | pT7T3D |
| | L19W | | | | | (Pharmacia) |
| | | | | | | with a |
| | | | | | | modified |
| | | | | | | polylinker |
| L0751 | Soares ovary tumor | ovarian tumor | ovary | | | pT7T3D |
| | NbHOT | | | | | (Pharmacia) |
| | | | | | | with a |
| | | | | | | modified |
| | | | | | | polylinker |
| L0752 | Soares_parathyroid_tum | parathyroid tumor | parathyroid | | | pT7T3D |
| | or_NbHPA | | gland | | | (Pharmacia) |
| | | | | | | with a |
| | | | | | | modified |
| | | | | | | polylinker |
| L0754 | Soares placenta Nb2HP | | placenta | | | pT7T3D |
| | | | | | | (Pharmacia) |
| | | | | | | with a |
| | | | | | | modified |
| | | | | | | polylinker |
| L0755 | Soares_placenta_8to9we | | placenta | | | pT7T3D |
| | eks_2NbHP8to9W | | | | | (Pharmacia) |
| | | | | | | with a |
| | | | | | | modified |
| | | | | | | polylinker |
| L0756 | Soares_multiple_scleros | multiple sclerosis | | | | pT7T3D |
| | is_2NbHMSP | lesions | | | | (Pharmacia) |
| | | | | | | with a |
| | | | | | | modified |
| | | | | | | polylinker |
| | | | | | | V_TYPE |
| L0757 | Soares_senescent_fibrob | senescent fibroblast | | | | pT7T3D |
| | lasts_NbHSF | | | | | (Pharmacia) |
| | | | | | | with a |
| | | | | | | modified |
| | | | | | | polylinker |
| | | | | | | V_TYPE |
| L0758 | Soares_testis_NHT | | | | | pT7T3D- |
| | | | | | | Pac |
| | | | | | | (Pharmacia) |
| | | | | | | with a |
| | | | | | | modified |
| | | | | | | polylinker |
| L0759 | Soares_total_fetus_Nb2 | | | | | pT7T3D- |
| | HF8_9w | | | | | Pac |
| | | | | | | (Pharmacia) |
| | | | | | | with a |
| | | | | | | modified |
| | | | | | | polylinker |
| L0763 | NCl_CGAP_Br2 | breast | | | | pT7T3D- |
| | | | | | | Pac |
| | | | | | | (Pharmacia) |
| | | | | | | with a |
| | | | | | | modified |
| | | | | | | polylinker |
| L0764 | NCl_CGAP_Co3 | colon | | | | pT7T3D- |
| | | | | | | Pac |
| | | | | | | (Pharmacia) |
| | | | | | | with a |
| | | | | | | modified |
| | | | | | | polylinker |
| L0766 | NCl_GGAP_GCB1 | germinal center B | | | | pT7T3D- |
| | | cell | | | | Pac |
| | | | | | | (Pharmacia) |
| | | | | | | with a |
| | | | | | | modified |
| | | | | | | polylinker |
| L0768 | NCl_CGAP_GC4 | pooled germ cell | | | | pT7T3D- |
| | | tumors | | | | Pac |
| | | | | | | (Pharmacia) |
| | | | | | | with a |
| | | | | | | modified |
| | | | | | | polylinker |
| L0769 | NCl_CGAP_Bm25 | anaplastic | brain | | | pT7T3D- |
| | oligodendroglioma | | | | | Pac |
| | | | | | | (Pharmacia) |
| | | | | | | with a |
| | | | | | | modified |
| | | | | | | polylinker |
| L0770 | NCl_CGAP_Bm23 | glioblastoma | brain | | | pT7T3D- |
| | | (pooled) | | | | Pac |
| | | | | | | (Pharmacia) |
| | | | | | | with a |
| | | | | | | modified |
| | | | | | | polylinker |
| L0772 | NCl_CGAP_Co10 | colon tumor RER+ | colon | | | pT7T3D- |
| | | | | | | Pac |
| | | | | | | (Pharmacia) |
| | | | | | | with a |
| | | | | | | modified |
| | | | | | | polylinker |
| L0773 | NCl_CGAP_Co9 | colon tumor RER+ | colon | | | pT7T3D- |
| | | | | | | Pac |
| | | | | | | (Pharmacia) |
| | | | | | | with a |
| | | | | | | modified |
| | | | | | | polylinker |
| L0774 | NCl_CGAP_Kid3 | | kidney | | | pT7T3D- |
| | | | | | | Pac |
| | | | | | | (Pharmacia) |
| | | | | | | with a |
| | | | | | | modified |
| | | | | | | polylinker |
| L0775 | NCl_CGAP_Kid5 | 2 pooled tumors | kidney | | | pT7T3D- |
| | | (clear cell type) | | | | Pac |
| | | | | | | (Pharmacia) |
| | | | | | | with a |
| | | | | | | modified |
| | | | | | | polylinker |
| L0776 | NCl_CGAP_Lu5 | carcinoid | lung | | | pT7T3D- |
| | | | | | | Pac |
| | | | | | | (Pharmacia) |
| | | | | | | with a |
| | | | | | | modified |
| | | | | | | polylinker |
| L0777 | Soares_NhHMPu_S1 | Pooled human | mixed (see | | | pT7T3D- |
| | | melanocyte, fetal | below) | | | Pac |
| | | heart, and pregnant | | | | (Pharmacia) |
| | | | | | | with a |
| | | | | | | modified |
| | | | | | | polylinker |
| L0779 | Soares_NFL_T_GBC_S | | pooled | | | pT7T3D- |
| | 1 | | | | | Pac |
| | | | | | | (Pharmacia) |
| | | | | | | with a |
| | | | | | | modified |
| | | | | | | polylinker |
| L0780 | Soares_NSF_FS_9W_O | | pooled | | | pT7T3D- |
| | T_PA_P_S1 | | | | | Pac |
| | | | | | | (Pharmacia) |
| | | | | | | with a |
| | | | | | | modified |
| | | | | | | polylinker |
| L0781 | Barstead prostate BPH | | prostate | | | pT7T3D- |
| | HPLRB4 | | | | | Pac |
| | | | | | | (Pharmacia) |
| | | | | | | with a |
| | | | | | | modified |
| | | | | | | polylinker |
| L0783 | NCl_CGAP_Pr22 | normal prostate | prostate | | | pT7T3D- |
| | | | | | | Pac |
| | | | | | | (Pharmacia) |
| | | | | | | with a |
| | | | | | | modified |
| | | | | | | polylinker |
| L0789 | NCl_CGAP_Sub3 | | | | | pT7T3D- |
| | | | | | | Pac |
| | | | | | | (Pharmacia) |
| | | | | | | with a |
| | | | | | | modified |
| | | | | | | polylinker |
| L0791 | NCl_CGAP_Sub5 | | | | | pT7T3D- |
| | | | | | | Pac |
| | | | | | | (Pharmacia) |
| | | | | | | with a |
| | | | | | | modified |
| | | | | | | polylinker |
| L0792 | NCl_CGAP_Sub6 | | | | | pT7T3D- |
| | | | | | | Pac |
| | | | | | | (Pharmacia) |
| | | | | | | with a |
| | | | | | | modified |
| | | | | | | polylinker |
| L0794 | NCl_CGAP_GC6 | pooled germ cell | | | | pT7T3D- |
| | | tumors | | | | Pac |
| | | | | | | (Pharmacia) |
| | | | | | | with a |
| | | | | | | modified |
| | | | | | | polylinker |
| L0800 | NCl_CGAP_Col6 | colon tumor, RER+ | colon | | | pT7T3D- |
| | | | | | | Pac |
| | | | | | | (Pharmacia) |
| | | | | | | with a |
| | | | | | | modified |
| | | | | | | polylinker |
| L0803 | NCl_CGAP_Kid1 I | | kidney | | | pT7T3D- |
| | | | | | | Pac |
| | | | | | | (Pharmacia) |
| | | | | | | with a |
| | | | | | | modified |
| | | | | | | polylinker |
| L0804 | NCl_CGAP_Kid 12 | 2 pooled tumors | kidney | | | pT7T3D- |
| | | (clear cell type) | | | | Pac |
| | | | | | | (Pharmacia) |
| | | | | | | modified |
| | | | | | | polylinker |
| L0805 | NCl_CGAP_Lu24 | carcinoid | lung | | | pT7T3D- |
| | | | | | | Pac |
| | | | | | | (Pharmacia) |
| | | | | | | with a |
| | | | | | | modified |
| | | | | | | polylinker |
| L0806 | NCl_CGAP_Lu19 | squamous cell | lung | | | pT7T3D- |
| | | carcinoma, poorly | | | | Pac |
| | | differentiated (4 | | | | (Pharmacia) |
| | | | | | | with a |
| | | | | | | modified |
| | | | | | | polylinker |
| L0809 | NCl_CGAP_Pr28 | | prostate | | | pT7T3D- |
| | | | | | | Pac |
| | | | | | | (Pharmacia) |
| | | | | | | with a |
| | | | | | | modified |
| | | | | | | polylinker |
| L2251 | Human fetal lung | Fetal lung | | | | |

[0101] TABLE 5

| OMIM | |
|---|---|
| Reference | Description |
| 102200 | Somatotrophinoma |
| 106100 | Angloedema, hereditary |
| 107680 | ApoA-I and apoC-III deficiency, combined |
| 107680 | Corneal clouding, autosomal recessive |
| 107680 | Amyloidosis, 3 or more types |
| 107680 | Hypertriglyceridemia, one form |
| 107680 | Hypoalphalipoproteinemia |
| 107720 | Hypertriglyceridemia |
| 108725 | Atherosclerosis, susceptibility to |
| 120550 | C1q deficiency, type A |
| 120570 | C1q deficiency, type B |
| 120575 | C1q deficiency, type C |
| 120700 | C3 deficiency |
| 120950 | C8 deficiency, type I |
| 120960 | C8 deficiency, type II |
| 130500 | Elliptocytosis-1 |
| 131100 | Multiple endocrine neoplasia I |
| 131100 | Prolactinoma, hyperparathyroidism, carcinoid syndrome |
| 131100 | Carcinoid tumor of lung |
| 133171 | [Erythrocytosis, familial], 133100 |
| 133200 | Erythrokeratodermia variabilis |
| 133780 | Vitreoretinopathy, exudative, familial |
| 134934 | Thanatophoric dysplasia, types I and II, 187600 |
| 134934 | Achondroplasia, 100800 |
| 134934 | Craniosynostosis, nonsyndromic |
| 134934 | Crouzon syndrome with acanthosis nigricans |
| 134934 | Hypochondroplasia, 146000 |
| 136836 | Fucosyltransferase-6 deficiency |
| 138140 | Glucose transport defect, blood-brain banier |
| 143100 | Huntington disease |
| 145981 | Hypocalciuric hypercalcemia, type II |
| 147050 | Atopy |
| 147141 | Leukemia, acute lymphoblastic |
| 147791 | Jacobsen syndrome |
| 153454 | Ehiers-Danlos syndrome, type VI, 225400 |
| 153700 | Macular dystrophy, vitelliform type |
| 159555 | Leukemia, myeloid/lymphoid or mixed-lineage |
| 161015 | Mitochondrial complex I deficiency, 252010 |
| 164009 | Leukemia, acute promyelocytic, NUMA/RARA type |
| 164953 | Liposarcoma |
| 167410 | Rhabdomyosarcoma, alveolar, 268220 |
| 168000 | Paraganglioma, familial nonchromaffin, 1 |
| 168360 | Paraneoplastic sensory neuropathy |
| 168461 | Multiple myeloma, 254250 |
| 168461 | Parathyroid adenomatosis 1 |
| 168461 | Centrocytic lymphoma |
| 171760 | Hypophosphatasia, adult, 146300 |
| 171760 | Hypophosphatasia, infantile, 241500 |
| 176100 | Porphyria cutanea tarda |
| 176100 | Porphyria, hepatoerythropoietic |
| 177070 | Spherocytosis, hereditary, Japanese type |
| 177070 | Hermansky-Pudlak syndrome, 203300 |
| 178300 | Ptosis, hereditary congenital, 1 |
| 180072 | Night blindness, congenital stationary, type 3, 163500 |
| 180072 | Retinitis pigmentosa, autosomal recessive |
| 180721 | Retinitis pigmentosa, digenic |
| 180840 | Susceptibility to IiDDM |
| 182500 | Cataract, congenital |
| 186740 | Immunodeficiency due to defect in CD3-gamma |
| 186830 | Immunodeficiency, T-cell receptor/CD3 complex |
| 187040 | Leukemia-1, T-cell acute lymphoblastic |
| 188025 | Thrombocytopenia, Paris-Trousseau type |
| 188070 | Bleeding disorder due to defective thromboxane A2 receptor |
| 191181 | Cervical carcinoma |
| 193235 | Vitreoretinopathy, neovascular inflammatory |
| 194190 | Wolf-Hirscbhom syndrome |
| 203750 | 3-ketothiolase deficiency |
| 209901 | Bardet-Biedi syndrome 1 |
| 218000 | Andermann syndrome |
| 227220 | [Eye color, brown] |
| 230000 | Fucosidosis |
| 232600 | McArdle disease |
| 243500 | Isovalericacidemia |
| 252800 | Mucopolysaccharidosis Th |
| 252800 | Mucopolysaccharidosis Th/s |
| 252800 | Mucopolysaccharidosis Is |
| 255800 | Schwartz-Jampel syndrome |
| 256700 | Neuroblastoma |
| 259700 | Osteopetrosis, recessive |
| 259770 | Osteoporosis-pseudoglioma syndrome |
| 261640 | Phenylketonuria due to PTS deficiency |
| 300011 | Menkes disease, 309400 |
| 300011 | Occipital horn syndrome, 304150 |
| 300011 | Cutis laxa, neonatal |
| 300127 | Mental retardation, X-linked, 60 |
| 305450 | FG syndrome |
| 313700 | Perineal hypospadias |
| 313700 | Prostate cancer |
| 313700 | Spinal and bulbar muscular atrophy of Kennedy, 313200 |
| 313700 | Breast cancer, male, with Reifenstein syndrome |
| 313700 | Androgen insensitivity, several forms |
| 600045 | Xeroderma pigmentosum, group B, subtype 2 |
| 600048 | Breast cancer-3 |
| 600101 | Deafness, autosomal dominant 2 |
| 600319 | Diabetes mellitus, insulin-dependent, 4 |
| 600528 | CPT deficiency, hepatic, type I, 255120 |
| 600650 | Myopathy due to CPT II deficiency, 255110 |
| 600650 | CPT deficiency, hepatic, type II, 600649 |
| 600722 | Ceroid lipofuscinosis, neuronal, variant juvenile type, |
| | with granular osmiophilic deposits |
| 600722 | Ceroid lipofuscinosis, neuronal-1, infantile, 256730 |
| 600839 | Bartter syndrome, 241200 |
| 600957 | Persistent Mullerian duct syndrome, type I, 261550 |
| 600965 | Deafness, autosomal dominant 6 |
| 600975 | Glaucoma 3, primary infantile, B |
| 601238 | Cerebellar ataxia, Cayman type |
| 601382 | Charcot-Marie-Tooth neuropathy-4B |
| 601800 | [Hair color, brown] |
| 601846 | Muscular dystrophy with rimmed vacuoles |
| 601884 | [High bone mass] |
| 602216 | Peutz-Jeghers syndrome, 175200 |
| 602477 | Febrile convulsions, familial, 2 |
| 602574 | Deafness, autosomal dominant 12, 601842 |
| 602574 | Deafness, autosomal dominant 8, 601543 |

[0102] Polynucleotide and Polypeptide Variants

[0103] The present invention is also directed to variants of the connective tissue associated polynucleotide sequence disclosed in SEQ ID NO:X or the complementary strand thereto, nucleotide sequences encoding the polypeptide of SEQ ID NO:Y, the nucleotide sequence of SEQ ID NO:X encoding the polypeptide sequence as defined in column 6 of Table 1A, nucleotide sequences encoding the polypeptide as defined in column 6 of Table 1A, the nucleotide sequence as defined in columns 8 and 9 of Table 2, nucleotide sequences encoding the polypeptide encoded by the nucleotide sequence as defined in columns 8 and 9 of Table 2, the nucleotide sequence as defined in column 6 of Table 1B, nucleotide sequences encoding the polypeptide encoded by the nucleotide sequence as defined in column 6 of Table 1B, the cDNA sequence contained in Clone ID NO:Z, and/or nucleotide sequences encoding a polypeptide encoded by the cDNA sequence contained in Clone ID NO:Z.

[0104] The present invention also encompasses variants of the polypeptide sequence disclosed in SEQ ID NO:Y, a polypeptide sequence as defined in column 6 of Table 1A, a polypeptide sequence encoded by the polynucleotide sequence in SEQ ID NO:X, a polypeptide sequence encoded by the nucleotide sequence as defined in columns 8 and 9 of Table 2, a polypeptide sequence encoded by the nucleotide sequence as defined in column 6 of Table 1B, a polypeptide sequence encoded by the complement of the polynucleotide sequence in SEQ ID NO:X, and/or a polypeptide sequence encoded by the cDNA sequence contained in Clone ID NO:Z.

[0105] “Variant” refers to a polynucleotide or polypeptide differing from the polynucleotide or polypeptide of the present invention, but retaining essential properties thereof. Generally, variants are overall closely similar, and, in many regions, identical to the polynucleotide or polypeptide of the present invention.

[0106] Thus, one aspect of the invention provides an isolated nucleic acid molecule comprising, or alternatively consisting of, a polynucleotide having a nucleotide sequence selected from the group consisting of: (a) a nucleotide sequence described in SEQ ID NO:X or contained in the cDNA sequence of Clone ID NO:Z; (b) a nucleotide sequence in SEQ ID NO:X or the cDNA in Clone ID NO:Z which encodes a mature connective tissue associated polypeptide; (c) a nucleotide sequence in SEQ ID NO:X or the cDNA sequence of Clone ID NO:Z, which encodes a biologically active fragment of a connective tissue associated polypeptide; (d) a nucleotide sequence in SEQ ID NO:X or the cDNA sequence of Clone ID NO:Z, which encodes an antigenic fragment of a connective tissue associated polypeptide; (e) a nucleotide sequence encoding a connective tissue associated polypeptide having the complete amino acid sequence of SEQ ID NO:Y or the complete amino acid sequence encoded by the cDNA in Clone ID NO:Z; (f) a nucleotide sequence encoding a mature connective tissue associated polypeptide of the amino acid sequence of SEQ ID NO:Y or the amino acid sequence encoded by the cDNA in Clone ID NO:Z; (g) a nucleotide sequence encoding a biologically active fragment of a connective tissue associated polypeptide having the complete amino acid sequence of SEQ ID NO:Y or the complete amino acid sequence encoded by the cDNA in Clone ID NO:Z; (h) a nucleotide sequence encoding an antigenic fragment of a connective tissue associated polypeptide having the complete amino acid sequence of SEQ ID NO:Y or the complete amino acid sequence encoded by the cDNA in Clone ID NO:Z; and (i) a nucleotide sequence complementary to any of the nucleotide sequences in (a), (b), (c), (d), (e), (f), (g), or (h), above.

[0107] The present invention is also directed to nucleic acid molecules which comprise, or alternatively consist of, a nucleotide sequence which is at least 80%, 85%, 90%, 95%, 96%, 97%, 98%, 99% or 100%, identical to, for example, any of the nucleotide sequences in (a), (b), (c), (d), (e), (f), (g), (h), or (i) above, the nucleotide coding sequence in SEQ ID NO:X or the complementary strand thereto, the nucleotide coding sequence of the cDNA contained in Clone ID NO:Z or the complementary strand thereto, a nucleotide sequence encoding the polypeptide of SEQ ID NO:Y, a nucleotide sequence encoding a polypeptide sequence encoded by the nucleotide sequence in SEQ ID NO:X, a polypeptide sequence encoded by the complement of the polynucleotide sequence in SEQ ID NO:X, a nucleotide sequence encoding the polypeptide encoded by the cDNA contained in Clone ID NO:Z, the nucleotide coding sequence in SEQ ID NO:X as defined in columns 8 and 9 of Table 2 or the complementary strand thereto, a nucleotide sequence encoding the polypeptide encoded by the nucleotide sequence in SEQ ID NO:X as defined in columns 8 and 9 of Table 2 or the complementary strand thereto, the nucleotide coding sequence in SEQ ID NO:B as defined in column 6 of Table 1B or the complementary strand thereto, a nucleotide sequence encoding the polypeptide encoded by the nucleotide sequence in SEQ ID NO:B as defined in column 6 of Table 1B or the complementary strand thereto, the nucleotide sequence in SEQ ID NO:X encoding the polypeptide sequence as defined in column 6 of Table 1A or the complementary strand thereto, nucleotide sequences encoding a polypeptide as defined in column 6 of Table 1A or the complementary strand thereto, and/or polynucleotide fragments of any of these nucleic acid molecules (e.g., those fragments described herein). Polynucleotides which hybridize to the complement of these nucleic acid molecules under stringent hybridization conditions or alternatively, under lower stringency conditions, are also encompassed by the invention, as are polypeptides encoded by these polynucleotides and nucleic acids.

[0108] In a preferred embodiment, the invention encompasses nucleic acid molecules which comprise, or alternatively, consist of a polynucleotide which hybridizes under stringent hybridization conditions, or alternatively, under lower stringency conditions, to a polynucleotide in (a), (b), (c), (d), (e), (f), (g), (h), or (i) above, as are polypeptides encoded by these polynucleotides. In another preferred embodiment, polynucleotides which hybridize to the complement of these nucleic acid molecules under stringent hybridization conditions or alternatively, under lower stringency conditions, are also encompassed by the invention, as are polypeptides encoded by these polynucleotides.

[0109] In another embodiment, the invention provides a purified protein comprising, or alternatively consisting of, a polypeptide having an amino acid sequence selected from the group consisting of: (a) the complete amino acid sequence of SEQ ID NO:Y or the complete amino acid sequence encoded by the cDNA in Clone ID NO:Z; (b) the amino acid sequence of a mature connective tissue associated polypeptide having the amino acid sequence of SEQ ID NO:Y or the amino acid sequence encoded by the cDNA in Clone ID NO:Z; (c) the amino acid sequence of a biologically active fragment of a connective tissue associated polypeptide having the complete amino acid sequence of SEQ ID NO:Y or the complete amino acid sequence encoded by the cDNA in Clone ID NO:Z; and (d) the amino acid sequence of an antigenic fragment of a connective tissue associated polypeptide having the complete amino acid sequence of SEQ ID NO:Y or the complete amino acid sequence encoded by the cDNA in Clone ID NO:Z.

[0110] The present invention is also directed to proteins which comprise, or alternatively consist of, an amino acid sequence which is at least 80%, 85%, 90%, 95%, 96%, 97%, 98%, 99% or 100%, identical to, for example, any of the amino acid sequences in (a), (b), (c), or (d), above, the amino acid sequence shown in SEQ ID NO:Y, the amino acid sequence encoded by the cDNA contained in Clone ID NO:Z, the amino acid sequence of the polypeptide encoded by the nucleotide sequence in SEQ ID NO:X as defined in columns 8 and 9 of Table 2, the amino acid sequence of the polypeptide encoded by the nucleotide sequence in SEQ I) NO:B as defined in column 6 of Table 1B, the amino acid sequence as defined in column 6 of Table 1A, an amino acid sequence encoded by the nucleotide sequence in SEQ ID NO:X, and an amino acid sequence encoded by the complement of the polynucleotide sequence in SEQ ID NO:X. Fragments of these polypeptides are also provided (e.g., those fragments described herein). Further proteins encoded by polynucleotides which hybridize to the complement of the nucleic acid molecules encoding these amino acid sequences under stringent hybridization conditions or alternatively, under lower stringency conditions, are also encompassed by the invention, as are the polynucleotides encoding these proteins.

[0111] By a nucleic acid having a nucleotide sequence at least, for example, 95% “identical” to a reference nucleotide sequence of the present invention, it is intended that the nucleotide sequence of the nucleic acid is identical to the reference sequence except that the nucleotide sequence may include up to five point mutations per each 100 nucleotides of the reference nucleotide sequence encoding the polypeptide. In other words, to obtain a nucleic acid having a nucleotide sequence at least 95% identical to a reference nucleotide sequence, up to 5% of the nucleotides in the reference sequence may be deleted or substituted with another nucleotide, or a number of nucleotides up to 5% of the total nucleotides in the reference sequence may be inserted into the reference sequence. The query sequence may be an entire sequence referred to in Table 1A or 2 as the ORF (open reading frame), or any fragment specified, as described herein.

[0112] As a practical matter, whether any particular nucleic acid molecule or polypeptide is at least 80%, 85%, 90%, 95%, 96%, 97%, 98% or 99% identical to a nucleotide sequence of the present invention can be determined conventionally using known computer programs. A preferred method for determining the best overall match between a query sequence (a sequence of the present invention) and a subject sequence, also referred to as a global sequence alignment, can be determined using the FASTDB computer program based on the algorithm of Brutlag et al. (Comp. App. Biosci. 6:237-245 (1990)). In a sequence alignment the query and subject sequences are both DNA sequences. An RNA sequence can be compared by converting U's to T's. The result of said global sequence alignment is expressed as percent identity. Preferred parameters used in a FASTDB alignment of DNA sequences to calculate percent identity are: Matrix=Unitary, k−tuple=4, Mismatch Penalty=1, Joining Penalty=30, Randomization Group Length=0, Cutoff Score=l, Gap Penalty=5, Gap Size Penalty 0.05, Window Size=500 or the length of the subject nucleotide sequence, whichever is shorter.

[0113] If the subject sequence is shorter than the query sequence because of 5′ or 3′ deletions, not because of internal deletions, a manual correction must be made to the results. This is because the FASTDB program does not account for 5′ and 3′ truncations of the subject sequence when calculating percent identity. For subject sequences truncated at the 5′ or 3′ ends, relative to the query sequence, the percent identity is corrected by calculating the number of bases of the query sequence that are 5′ and 3′ of the subject sequence, which are not matched/aligned, as a percent of the total bases of the query sequence. Whether a nucleotide is matched/aligned is determined by results of the FASTDB sequence alignment. This percentage is then subtracted from the percent identity, calculated by the above FASTDB program using the specified parameters, to arrive at a final percent identity score. This corrected score is what is used for the purposes of the present invention. Only bases outside the 5′ and 3′ bases of the subject sequence, as displayed by the FASTDB alignment, which are not matched/aligned with the query sequence, are calculated for the purposes of manually adjusting the percent identity score.

[0114] For example, a 90 base subject sequence is aligned to a 100 base query sequence to determine percent identity. The deletions occur at the 5′ end of the subject sequence and therefore, the FASTDB alignment does not show a matched/alignment of the first 10 bases at 5′ end. The 10 unpaired bases represent 10% of the sequence (number of bases at the 5′ and 3′ ends not matched/total number of bases in the query sequence) so 10% is subtracted from the percent identity score calculated by the FASTDB program. If the remaining 90 bases were perfectly matched the final percent identity would be 90%. In another example, a 90 base subject sequence is compared with a 100 base query sequence. This time the deletions are internal deletions so that there are no bases on the 5′ or 3′ of the subject sequence which are not matched/aligned with the query. In this case the percent identity calculated by FASTDB is not manually corrected. Once again, only bases 5′ and 3′ of the subject sequence which are not matched/aligned with the query sequence are manually corrected for. No other manual corrections are to be made for the purposes of the present invention.

[0115] By a polypeptide having an amino acid sequence at least, for example, 95% “identical” to a query amino acid sequence of the present invention, it is intended that the amino acid sequence of the subject polypeptide is identical to the query sequence except that the subject polypeptide sequence may include up to five amino acid alterations per each 100 amino acids of the query amino acid sequence. In other words, to obtain a polypeptide having an amino acid sequence at least 95% identical to a query amino acid sequence, up to 5% of the amino acid residues in the subject sequence may be inserted, deleted, (indels) or substituted with another amino acid. These alterations of the reference sequence may occur at the amino or carboxy terminal positions of the reference amino acid sequence or anywhere between those terminal positions, interspersed either individually among residues in the reference sequence or in one or more contiguous groups within the reference sequence.

[0116] As a practical matter, whether any particular polypeptide is at least 80%, 85%, 90%, 95%, 96%, 97%, 98% or 99% identical to, for instance, the amino acid sequence of a polypeptide referred to in Table 1A (e.g., an amino acid sequence identified in columns 5 or 6) or Table 2 (e.g., the amino acid sequence of the polypeptide encoded by the polynucleotide sequence defined in columns 8 and 9 of Table 2) or a fragment thereof, the amino acid sequence of the polypeptide encoded by the polynucleotide sequence in SEQ ID NO:B as defined in column 6 of Table 1B or a fragment thereof, the amino acid sequence of the polypeptide encoded by the nucleotide sequence in SEQ ID NO:X or a fragment thereof, or an amino acid sequence of the polypeptide encoded by cDNA contained in Clone ID NO:Z, or a fragment thereof, can be determined conventionally using known computer programs. A preferred method for determining the best overall match between a query sequence (a sequence of the present invention) and a subject sequence, also referred to as a global sequence alignment, can be determined using the FASTDB computer program based on the algorithm of Brutlag et al. (Comp. App. Biosci.6:237-245 (1990)). In a sequence alignment the query and subject sequences are either both nucleotide sequences or both amino acid sequences. The result of said global sequence alignment is expressed as percent identity. Preferred parameters used in a FASTDB amino acid alignment are: Matrix=PAM 0, k−tuple=2, Mismatch Penalty=1, Joining Penalty=20, Randomization Group Length−0, Cutoff Score=1, Window Size=sequence length, Gap Penalty=5, Gap Size Penalty=0.05, Window Size=500 or the length of the subject amino acid sequence, whichever is shorter.

[0117] If the subject sequence is shorter than the query sequence due to N- or C-terminal deletions, not because of internal deletions, a manual correction must be made to the results. This is because the FASTDB program does not account for N- and C-terminal truncations of the subject sequence when calculating global percent identity. For subject sequences truncated at the N- and C-termini, relative to the query sequence, the percent identity is corrected by calculating the number of residues of the query sequence that are N- and C-terminal of the subject sequence, which are not matched/aligned with a corresponding subject residue, as a percent of the total bases of the query sequence. Whether a residue is matched/aligned is determined by results of the FASTDB sequence alignment. This percentage is then subtracted from the percent identity, calculated by the above FASTDB program using the specified parameters, to arrive at a final percent identity score. This final percent identity score is what is used for the purposes of the present invention. Only residues to the N- and C-termini of the subject sequence, which are not matched/aligned with the query sequence, are considered for the purposes of manually adjusting the percent identity score. That is, only query residue positions outside the farthest N- and C-terminal residues of the subject sequence.

[0118] For example, a 90 amino acid residue subject sequence is aligned with a 100 residue query sequence to determine percent identity. The deletion occurs at the N-terminus of the subject sequence and therefore, the FASTDB alignment does not show a matching/alignment of the first 10 residues at the N-terminus. The 10 unpaired residues represent 10% of the sequence (number of residues at the N- and C-termini not matched/total number of residues in the query sequence) so 10% is subtracted from the percent identity score calculated by the FASTDB program. If the remaining 90 residues were perfectly matched the final percent identity would be 90%. In another example, a 90 residue subject sequence is compared with a 100 residue query sequence. This time the deletions are internal deletions so there are no residues at the N- or C-termini of the subject sequence which are not matched/aligned with the query. In this case the percent identity calculated by FASTDB is not manually corrected. Once again, only residue positions outside the N- and C-terminal ends of the subject sequence, as displayed in the FASTDB alignment, which are not matched/aligned with the query sequence are manually corrected for. No other manual corrections are to be made for the purposes of the present invention.

[0119] The polynucleotide variants of the invention may contain alterations in the coding regions, non-coding regions, or both. Especially preferred are polynucleotide variants containing alterations, which produce silent substitutions, additions, or deletions, but do not alter the properties or activities of the encoded polypeptide. Nucleotide variants produced by silent substitutions due to the degeneracy of the genetic code are preferred. Moreover, polypeptide variants in which less than 50, less than 40, less than 30, less than 20, less than 10, or 5-50, 5-25, 5-10, 1-5, or 1-2 amino acids are substituted, deleted, or added in any combination are also preferred. Polynucleotide variants can be produced for a variety of reasons, e.g., to optimize codon expression for a particular host (change codons in the human mRNA to those preferred by a bacterial host such as E. coli).

[0120] Naturally occurring variants are called “allelic variants,” and refer to one of several alternate forms of a gene occupying a given locus on a chromosome of an organism. (Genes II, Lewin, B., ed., John Wiley & Sons, New York (1985).) These allelic variants can vary at either the polynucleotide and/or polypeptide level and are included in the present invention. Alternatively, non-naturally occurring variants may be produced by mutagenesis techniques or by direct synthesis.

[0121] Using known methods of protein engineering and recombinant DNA technology, variants may be generated to improve or alter the characteristics of the polypeptides of the present invention. For instance, one or more amino acids can be deleted from the N-terminus or C-terminus of the polypeptides of the present invention without substantial loss of biological function. As an example, the authors of Ron et al., J. Biol. Chem. 268: 2984-2988 (1993), reported variant KGF proteins having heparin binding activity even after deleting 3, 8, or 27 amino-terminal amino acid residues. Similarly, Interferon gamma exhibited up to ten times higher activity after deleting 8-10 amino acid residues from the carboxy terminus of this protein. (Dobeli et al., J. Biotechnology 7:199-216 (1988).)

[0122] Moreover, ample evidence demonstrates that variants often retain a biological activity similar to that of the naturally occurring protein. For example, Gayle and coworkers (J. Biol. Chem. 268:22105-22111 (1993)) conducted extensive mutational analysis of human cytokine IL-1a. They used random mutagenesis to generate over 3,500 individual IL-1a mutants that averaged 2.5 amino acid changes per variant over the entire length of the molecule. Multiple mutations were examined at every possible amino acid position. The investigators found that “[m]ost of the molecule could be altered with little effect on either [binding or biological activity].” In fact, only 23 unique amino acid sequences, out of more than 3,500 nucleotide sequences examined, produced a protein that significantly differed in activity from wild-type. Furthermore, even if deleting one or more amino acids from the N-terminus or C-terminus of a polypeptide results in modification or loss of one or more biological functions, other biological activities may still be retained. For example, the ability of a deletion variant to induce and/or to bind antibodies which recognize the secreted form Will likely be retained when less than the majority of the residues of the secreted form are removed from the N-terminus or C-terminus. Whether a particular polypeptide lacking N- or C-terminal residues of a protein retains such immunogenic activities can readily be determined by routine methods describe herein and otherwise known in the art.

[0123] Thus, the invention further includes polypeptide variants which show a functional activity (e.g., biological activity) of the polypeptides of the invention. Such variants include deletions, insertions, inversions, repeats, and substitutions selected according to general rules known in the art so as have little effect on activity.

[0124] The present application is directed to nucleic acid molecules at least 80%, 85%, 90%, 95%, 96%, 97%, 98%, 99% or 100% identical to the nucleic acid sequences disclosed herein, (e.g., encoding a polypeptide having the amino acid sequence of an N and/or C terminal deletion), irrespective of whether they encode a polypeptide having functional activity. This is because even where a particular nucleic acid molecule does not encode a polypeptide having functional activity, one of skill in the art would still know how to use the nucleic acid molecule, for instance, as a hybridization probe or a polymerase chain reaction (PCR) primer. Uses of the nucleic acid molecules of the present invention that do not encode a polypeptide having functional activity include, inter alia, (1) isolating a gene or allelic or splice variants thereof in a cDNA library; (2) in situ hybridization (e.g., “FISH”) to metaphase chromosomal spreads to provide precise chromosomal location of the gene, as described in Verma et al., Human Chromosomes: A Manual of Basic Techniques, Pergamon Press, New York (1988); (3) Northern Blot analysis for detecting mRNA expression in specific tissues (e.g., normal connective tissues or diseased connective tissues); and (4) in situ hybridization (e.g., histochemistry) for detecting mRNA expression in specific tissues (e.g., normal connective tissue or diseased connective tissues).

[0125] Preferred, however, are nucleic acid molecules having sequences at least 80%, 85%, 90%, 95%, 96%, 97%, 98%, 99% or 100% identical to the nucleic acid sequences disclosed herein, which do, in fact, encode a polypeptide having functional activity. By a polypeptide having “functional activity” is meant, a polypeptide capable of displaying one or more known functional activities associated with a full-length (complete) protein of the invention. Such functional activities include, but are not limited to, biological activity, antigenicity [ability to bind (or compete with a polypeptide of the invention for binding) to an anti-polypeptide of the invention antibody], immunogenicity (ability to generate antibody which binds to a specific polypeptide of the invention), ability to form multimers with polypeptides of the invention, and ability to bind to a receptor or ligand for a polypeptide of the invention.

[0126] The functional activity of the polypeptides, and fragments, variants and derivatives of the invention, can be assayed by various methods.

[0127] For example, in one embodiment where one is assaying for the ability to bind or compete with full-length polypeptide of the present invention for binding to an anti-polypeptide of the invention antibody, various immunoassays known in the art can be used, including but not limited to, competitive and non-competitive assay systems using techniques such as radioimmunoassays, ELISA (enzyme linked immunosorbent assay), “sandwich” immunoassays, immunoradiometric assays, gel diffusion precipitation reactions, immunodiffusion assays, in situ immunoassays (using colloidal gold, enzyme or radioisotope labels, for example), western blots, precipitation reactions, agglutination assays (e.g., gel agglutination assays, hemagglutination assays), complement fixation assays, immunofluorescence assays, protein A assays, and immunoelectrophoresis assays, etc. In one embodiment, antibody binding is detected by detecting a label on the primary antibody. In another embodiment, the primary antibody is detected by detecting binding of a secondary antibody or reagent to the primary antibody. In a further embodiment, the secondary antibody is labeled. Many means are known in the art for detecting binding in an immunoassay and are within the scope of the present invention.

[0128] In another embodiment, where a ligand is identified, or the ability of a polypeptide fragment, variant or derivative of the invention to multimerize is being evaluated, binding can be assayed, e.g., by means well-known in the art, such as, for example, reducing and non-reducing gel chromatography, protein affinity chromatography, and affinity blotting. See generally, Phizicky et al., Microbiol. Rev. 59:94-123 (1995). In another embodiment, the ability of physiological correlates of a polypeptide of the present invention to bind to a substrate(s) of the polypeptide of the invention can be routinely assayed using techniques known in the art.

[0129] In addition, assays described herein (see Examples) and otherwise known in the art may routinely be applied to measure the ability of polypeptides of the present invention and fragments, variants and derivatives thereof to elicit polypeptide related biological activity (either in vitro or in vivo). Other methods will be known to the skilled artisan and are within the scope of the invention.

[0130] Of course, due to the degeneracy of the genetic code, one of ordinary skill in the art will immediately recognize that a large number of the nucleic acid molecules having a sequence at least 80%, 85%, 90%, 95%, 96%, 97%, 98%, 99%, or 100% identical to, for example, the nucleic acid sequence of the cDNA contained in Clone ID NO:Z, a nucleic acid sequence referred to in Table 1A (e.g., SEQ ID NO:X), a nucleic acid sequence disclosed in Table 2 (e.g., the nucleic acid sequence delineated in columns 8 and 9) or fragments thereof, will encode polypeptides “having functional activity.” In fact, since degenerate variants of any of these nucleotide sequences all encode the same polypeptide, in many instances, this will be clear to the skilled artisan even without performing the above described comparison assay. It will be further recognized in the art that, for such nucleic acid molecules that are not degenerate variants, a reasonable number will also encode a polypeptide having functional activity. This is because the skilled artisan is fully aware of amino acid substitutions that are either less likely or not likely to significantly effect protein function (e.g., replacing one aliphatic amino acid with a second aliphatic amino acid), as further described below.

[0131] For example, guidance concerning how to make phenotypically silent amino acid substitutions is provided in Bowie et al., “Deciphering the Message in Protein Sequences: Tolerance to Amino Acid Substitutions,” Science 247:1306-1310 (1990), wherein the authors indicate that there are two main strategies for studying the tolerance of an amino acid sequence to change.

[0132] The first strategy exploits the tolerance of amino acid substitutions by natural selection during the process of evolution. By comparing amino acid sequences in different species, conserved amino acids can be identified. These conserved amino acids are likely important for protein function. In contrast, the amino acid positions where substitutions have been tolerated by natural selection indicates that these positions are not critical for protein function. Thus, positions tolerating amino acid substitution could be modified while still maintaining biological activity of the protein.

[0133] The second strategy uses genetic engineering to introduce amino acid changes at specific positions of a cloned gene to identify regions critical for protein function. For example, site directed mutagenesis or alanine-scanning mutagenesis (introduction of single alanine mutations at every residue in the molecule) can be used. See Cunningham et al., Science 244:1081-1085 (1989). The resulting mutant molecules can then be tested for biological activity.

[0134] As the authors state, these two strategies have revealed that proteins are surprisingly tolerant of amino acid substitutions. The authors further indicate which amino acid changes are likely to be permissive at certain amino acid positions in the protein. For example, most buried (within the tertiary structure of the protein) amino acid residues require nonpolar side chains, whereas few features of surface side chains are generally conserved. Moreover, tolerated conservative amino acid substitutions involve replacement of the aliphatic or hydrophobic amino acids Ala, Val, Leu and Ile; replacement of the hydroxyl residues Ser and Thr; replacement of the acidic residues Asp and Glu; replacement of the amide residues Asn and Gln, replacement of the basic residues Lys, Arg, and His; replacement of the aromatic residues Phe, Tyr, and Trp, and replacement of the small-sized amino acids Ala, Ser, Thr, Met, and Gly. Besides conservative amino acid substitutions, variants of the present invention include (i) substitutions with one or more of the non-conserved amino acid residues, where the substituted amino acid residues may or may not be one encoded by the genetic code, or (ii) substitutions with one or more of the amino acid residues having a substituent group, or (iii) fusion of the mature polypeptide with another compound, such as a compound to increase the stability and/or solubility of the polypeptide (for example, polyethylene glycol), or (iv) fusion of the polypeptide with additional amino acids, such as, for example, an IgG Fc fusion region peptide, serum albumin (preferably human serum albumin) or a fragment or variant thereof, or leader or secretory sequence, or a sequence facilitating purification. Such variant polypeptides are deemed to be within the scope of those skilled in the art from the teachings herein.

[0135] For example, polypeptide variants containing amino acid substitutions of charged amino acids with other charged or neutral amino acids may produce proteins with improved characteristics, such as less aggregation. Aggregation of pharmaceutical formulations both reduces activity and increases clearance due to the aggregate's immunogenic activity. See Pinckard et al., Clin. Exp. Immunol. 2:331-340 (1967); Robbins et al., Diabetes 36: 838-845 (1987); Cleland et al., Crit. Rev. Therapeutic Drug Carrier Systems 10:307-377 (1993).

[0136] A further embodiment of the invention relates to polypeptides which comprise the amino acid sequence of a polypeptide having an amino acid sequence which contains at least one amino acid substitution, but not more than 50 amino acid substitutions, even more preferably, not more than 40 amino acid substitutions, still more preferably, not more than 30 amino acid substitutions, and still even more preferably, not more than 20 amino acid substitutions from a polypeptide sequence disclosed herein. Of course it is highly preferable for a polypeptide to have an amino acid sequence which comprises the amino acid sequence of a polypeptide of SEQ ID NO:Y, an amino acid sequence encoded by SEQ ID NO:X, an amino acid sequence encoded by the portion of SEQ ID NO:X as defined in columns 8 and 9 of Table 2, an amino acid sequence encoded by the complement of SEQ ID NO:X, and/or the amino acid sequence encoded by cDNA contained in Clone ID NO:Z which contains, in order of ever-increasing preference, at least one, but not more than 10, 9, 8, 7, 6, 5, 4, 3, 2 or 1 amino acid substitutions.

[0137] In specific embodiments, the polypeptides of the invention comprise, or alternatively, consist of, fragments or variants of a reference amino acid sequence selected from: (a) the amino acid sequence of SEQ ID NO:Y or fragments thereof (e.g., the mature form and/or other fragments described herein); (b) the amino acid sequence encoded by SEQ ID NO:X or fragments thereof; (c) the amino acid sequence encoded by the complement of SEQ ID NO:X or fragments thereof; (d) the amino acid sequence encoded by the portion of SEQ ID NO:X as defined in columns 8 and 9 of Table 2 or fragments thereof; and (e) the amino acid sequence encoded by cDNA contained in Clone ID NO:Z or fragments thereof; wherein the fragments or variants have 1-5, 5-10, 5-25, 5-50, 10-50 or 50-150, amino acid residue additions, substitutions, and/or deletions when compared to the reference amino acid sequence. In preferred embodiments, the amino acid substitutions are conservative. Polynucleotides encoding these polypeptides are also encompassed by the invention.

[0138] Polynucleotide and Polypeptide Fragments

[0139] The present invention is also directed to polynucleotide fragments of the polynucleotides (nucleic acids) of the invention. In the present invention, a “polynucleotide fragment” refers to a polynucleotide having a nucleic acid sequence which, for example: is a portion of the cDNA contained in Clone ID NO:Z or the complementary strand thereto; is a portion of the polynucleotide sequence encoding the polypeptide encoded by the cDNA contained in Clone ID NO:Z or the complementary strand thereto; is a portion of a polynucleotide sequence encoding the amino acid sequence encoded by the region of SEQ ID NO:X as defined in columns 8 and 9 of Table 2 or the complementary strand thereto; is a portion of the polynucleotide sequence of SEQ ID NO:X as defined in columns 8 and 9 of Table 2 or the complementary strand thereto; is a portion of the polynucleotide sequence in SEQ ID NO:X or the complementary strand thereto; is a polynucleotide sequence encoding a portion of the polypeptide of SEQ ID NO:Y; is a polynucleotide sequence encoding a portion of a polypeptide encoded by SEQ ID NO:X; is a polynucleotide sequence encoding a portion of a polypeptide encoded by the complement of the polynucleotide sequence in SEQ ID NO:X; is a portion of a polynucleotide sequence encoding the amino acid sequence encoded by the region of SEQ ID NO:B as defined in column 6 of Table 1B or the complementary strand thereto; or is a portion of the polynucleotide sequence of SEQ ID NO:B as defined in column 6 of Table 1B or the complementary strand thereto.

[0140] The polynucleotide fragments of the invention are preferably at least about 15 nt, and more preferably at least about 20 nt, still more preferably at least about 30 nt, and even more preferably, at least about 40 nt, at least about 50 nt, at least about 75 nt, or at least about 150 nt in length. A fragment “at least 20 nt in length,” for example, is intended to include 20 or more contiguous bases from the cDNA sequence contained in Clone ID NO:Z, or the nucleotide sequence shown in SEQ ID NO:X or the complementary stand thereto. In this context “about” includes the particularly recited value or a value larger or smaller by several (5, 4, 3, 2, or 1) nucleotides, at either terminus or at both termini. These nucleotide fragments have uses that include, but are not limited to, as diagnostic probes and primers as discussed herein. Of course, larger fragments (e.g., at least 160, 170, 180, 190, 200, 250, 500, 600, 1000, or 2000 nucleotides in length) are also encompassed by the invention.

[0141] Moreover, representative examples of polynucleotide fragments of the invention, comprise, or alternatively consist of, a sequence from about nucleotide number 1-50, 51-100, 101-150, 151-200, 201-250, 251-300, 301-350, 351-400, 401-450, 451-500, 501-550, 551-600, 651-700, 701-750, 751-800, 800-850, 851-900, 901-950, 951-1000, 1001-1050, 1051-1100, 1101-1150, 1151-1200, 1201-1250, 1251-1300, 1301-1350, 1351-1400, 1401-1450, 1451-1500, 1501-1550, 1551-1600, 1601-1650, 1651-1700, 1701-1750, 1751-1800, 1801-1850, 1851-1900, 1901-1950, 1951-2000, 2001-2050, 2051-2100, 2101-2150, 2151-2200, 2201-2250, 2251-2300, 2301-2350, 2351-2400, 2401-2450, 2451-2500, 2501-2550, 2551-2600, 2601-2650, 2651-2700, 2701-2750, 2751-2800, 2801-2850, 2851-2900, 2901-2950, 2951-3000, 3001-3050, 3051-3100, 3101-3150, 3151-3200, 3201-3250, 3251-3300, 3301-3350, 3351-3400, 3401-3450, 3451-3500, 3501-3550, 3551-3600, 3601-3650, 3651-3700, 3701-3750, 3751-3800, 3801-3850, 3851-3900, 3901-3950, 3951-4000, 4001-4050, 4051-4100, 4101-4150, 4151-4200, 4201-4250, 4251-4300, 4301-4350, 4351-4400, 4401-4450, 4451-4500, 4501-4550, 4551-4600, 4601-4650, 4651-4700, 4701-4750, 4751-4800, 4801-4850, 4851-4900, 4901-4950, 4951-5000, 5001-5050, 5051-5100, 5101-5150, 5151-5200, 5201-5250, 5251-5300, 5301-5350, 5351-5400, 5401-5450, 5451-5500, 5501-5550, 5551-5600, 5601-5650, 5651-5700, 5701-5750, 5751-5800, 5801-5850, 5851-5900, 5901-5950, 5951-6000, 6001-6050, 6051-6100, 6101-6150, 6151-6200, 6201-6250, 6251-6300, 6301-6350, 6351-6400, 6401-6450, 6451-6500, 6501-6550, 6551-6600, 6601-6650, 6651-6700, 6701-6750, 6751-6800, 6801-6850, 6851-6900, 6901-6950, 6951-7000, 7001-7050, 7051-7100, 7101-7150, 7151-7200, 7201-7250, 7251-7300 or 7301 to the end of SEQ ID NO:X, or the complementary strand thereto. In this context “about” includes the particularly recited range or a range larger or smaller by several (5, 4, 3, 2, or 1) nucleotides, at either terminus or at both termini. Preferably, these fragments encode a polypeptide, which has a functional activity (e.g., biological activity). More preferably, these polynucleotides can be used as probes or primers as discussed herein. Polynucleotides which hybridize to one or more of these polynucleotides under stringent hybridization conditions or alternatively, under lower stringency conditions are also encompassed by the invention, as are polypeptides encoded by these polynucleotides.

[0142] Further representative examples of polynucleotide fragments of the invention, comprise, or alternatively consist of, a sequence from about nucleotide number 1-50, 51-100, 101-150, 151-200, 201-250, 251-300, 301-350, 351-400, 401-450, 451-500, 501-550, 551-600, 651-700, 701-750, 751-800, 800-850, 851-900, 901-950, 951-1000, 1001-1050, 1051-1100, 1101-1150, 1151-1200, 1201-1250, 1251-1300, 1301-1350, 1351-1400, 1401-1450, 1451-1500, 1501-1550, 1551-1600, 1601-1650, 1651-1700, 1701-1750, 1751-1800, 1801-1850, 1851-1900, 1901-1950, 1951-2000, 2001-2050, 2051-2100, 2101-2150, 2151-2200, 2201-2250, 2251-2300, 2301-2350, 2351-2400, 2401-2450, 2451-2500, 2501-2550, 2551-2600, 2601-2650, 2651-2700, 2701-2750, 2751-2800, 2801-2850, 2851-2900, 2901-2950, 2951-3000, 3001-3050, 3051-3100, 3101-3150, 3151-3200, 3201-3250, 3251-3300, 3301-3350, 3351-3400, 3401-3450, 3451-3500, 3501-3550, 3551-3600, 3601-3650, 3651-3700, 3701-3750, 3751-3800, 3801-3850, 3851-3900, 3901-3950, 3951-4000, 4001-4050, 4051-4100, 4101-4150, 4151-4200, 4201-4250, 4251-4300, 4301-4350, 4351-4400, 4401-4450, 4451-4500, 4501-4550, 4551-4600, 4601-4650, 4651-4700, 4701-4750, 4751-4800, 4801-4850, 4851-4900, 4901-4950, 4951-5000, 5001-5050, 5051-5100, 5101-5150, 5151-5200, 5201-5250, 5251-5300, 5301-5350, 5351-5400, 5401-5450, 5451-5500, 5501-5550, 5551-5600, 5601-5650, 5651-5700, 5701-5750, 5751-5800, 5801-5850, 5851-5900, 5901-5950, 5951-6000, 6001-6050, 6051-6100, 6101-6150, 6151-6200, 6201-6250, 6251-6300, 6301-6350, 6351-6400, 6401-6450, 6451-6500, 6501-6550, 6551-6600, 6601-6650, 6651-6700, 6701-6750, 6751-6800, 6801-6850, 6851-6900, 6901-6950, 6951-7000, 7001-7050, 7051-7100, 7101-7150, 7151-7200, 7201-7250, 7251-7300 or 7301 to the end of the cDNA sequence contained in Clone ID NO:Z, or the complementary strand thereto. In this context “about” includes the particularly recited range or a range larger or smaller by several (5, 4, 3, 2, or 1) nucleotides, at either terminus or at both termini. Preferably, these fragments encode a polypeptide, which has a functional activity (e.g., biological activity). More preferably, these polynucleotides can be used as probes or primers as discussed herein. Polynucleotides which hybridize to one or more of these polynucleotides under stringent hybridization conditions or alternatively, under lower stringency conditions are also encompassed by the invention, as are polypeptides encoded by these polynucleotides.

[0143] Moreover, representative examples of polynucleotide fragments of the invention comprise, or alternatively consist of, a nucleic acid sequence comprising one, two, three, four, five, six, seven, eight, nine, ten, or more of the above described polynucleotide fragments of the invention in combination with a polynucleotide sequence delineated in Table 1B column 6. Additional, representative examples of polynucleotide fragments of the invention comprise, or alternatively consist of, a nucleic acid sequence comprising one, two, three, four, five, six, seven, eight, nine, ten, or more of the above described polynucleotide fragments of the invention in combination with a polynucleotide sequence that is the complementary strand of a sequence delineated in column 6 of Table 1B. In further embodiments, the above-described polynucleotide fragments of the invention comprise, or alternatively consist of, sequences delineated in Table 1B, column 6, and have a nucleic acid sequence which is different from that of the BAC fragment having the sequence disclosed in SEQ ID NO:B (see Table 1B, column 5). In additional embodiments, the above-described polynucleotide fragments of the invention comprise, or alternatively consist of, sequences delineated in Table 1B, column 6, and have a nucleic acid sequence which is different from that published for the BAC clone identified as BAC ID NO:A (see Table 1B, column 4). In additional embodiments, the above-described polynucleotides of the invention comprise, or alternatively consist of, sequences delineated Table 1B, column 6, and have a nucleic acid sequence which is different from that contained in the BAC clone identified as BAC ID NO:A (see Table 1B, column 4). Polypeptides encoded by these polynucleotides, other polynucleotides that encode these polypeptides, and antibodies that bind these polypeptides are also encompassed by the invention. Additionally, fragments and variants of the above-described polynucleotides and polypeptides are also encompassed by the invention.

[0144] In additional specific embodiments, polynucleotides of the invention comprise, or alternatively consist of, one, two, three, four, five, six, seven, eight, nine, ten, or more fragments of the sequences delineated in column 6 of Table 1B, and the polynucleotide sequence of SEQ ID NO:X (e.g., as defined in Table 1B, column 2) or fragments or variants thereof. Polypeptides encoded by these polynucleotides, other polynucleotides that encode these polypeptides, and antibodies that bind these polypeptides are also encompassed by the invention.

[0145] In additional specific embodiments, polynucleotides of the invention comprise, or alternatively consist of, one, two, three, four, five, six, seven, eight, nine, ten, or more fragments of the sequences delineated in column 6 of Table 1B which correspond to the same Clone ID NO:Z (see Table 1B, column 1), and the polynucleotide sequence of SEQ ID NO:X (e.g., as defined in Table 1A or 1B) or fragments or variants thereof. Polypeptides encoded by these polynucleotides, other polynucleotides that encode these polypeptides, and antibodies that bind these polypeptides are also encompassed by the invention.

[0146] In further specific embodiments, polynucleotides of the invention comprise, or alternatively consist of, one, two, three, four, five, six, seven, eight, nine, ten, or more fragments of the sequences delineated in the same row of column 6 of Table 1B, and the polynucleotide sequence of SEQ ID NO:X (e.g., as defined in Table 1A or 1B) or fragments or variants thereof. Polypeptides encoded by these polynucleotides, other polynucleotides that encode these polypeptides, and antibodies that bind these polypeptides are also encompassed by the invention.

[0147] In additional specific embodiments, polynucleotides of the invention comprise, or alternatively consist of a polynucleotide sequence in which the 3′ 10 polynucleotides of one of the sequences delineated in column 6 of Table 1B and the 5′ 10 polynucleotides of the sequence of SEQ ID NO:X are directly contiguous. Nucleic acids which hybridize to the complement of these 20 contiguous polynucleotides under stringent hybridization conditions or alternatively, under lower stringency conditions, are also encompassed by the invention. Polypeptides encoded by these polynucleotides and/or nucleic acids, other polynucleotides and/or nucleic acids that encode these polypeptides, and antibodies that bind these polypeptides are also encompassed by the invention. Additionally, fragments and variants of the above-described polynucleotides, nucleic acids, and polypeptides are also encompassed by the invention.

[0148] In additional specific embodiments, polynucleotides of the invention comprise, or alternatively consist of a polynucleotide sequence in which the 3′ 10 polynucleotides of one of the sequences delineated in column 6 of Table 1B and the 5′ 10 polynucleotides of a fragment or variant of the sequence of SEQ ID NO:X (e.g., as described herein) are directly contiguous Nucleic acids which hybridize to the complement of these 20 contiguous polynucleotides under stringent hybridization conditions or alternatively, under lower stringency conditions, are also encompassed by the invention. Polypeptides encoded by these polynucleotides and/or nucleic acids, other polynucleotides and/or nucleic acids encoding these polypeptides, and antibodies that bind these polypeptides are also encompassed by the invention. Additionally, fragments and variants of the above-described polynucleotides, nucleic acids, and polypeptides are also encompassed by the invention.

[0149] In further specific embodiments, polynucleotides of the invention comprise, or alternatively consist of a polynucleotide sequence in which the 3′ 10 polynucleotides of a fragment or variant of the sequence of SEQ ID NO:X and the 5′ 10 polynucleotides of the sequence of one of the sequences delineated in column 6 of Table 1B are directly contiguous. Nucleic acids which hybridize to the complement of these 20 contiguous polynucleotides under stringent hybridization conditions or alternatively, under lower stringency conditions, are also encompassed by the invention. Polypeptides encoded by these polynucleotides and/or nucleic acids, other polynucleotides and/or nucleic acids encoding these polypeptides, and antibodies that bind these polypeptides are also encompassed by the invention. Additionally, fragments and variants of the above-described polynucleotides, nucleic acids, and polypeptides are also encompassed by the invention.

[0150] In specific embodiments, polynucleotides of the invention comprise, or alternatively consist of a polynucleotide sequence in which the 3′ 10 polynucleotides of one of the sequences delineated in column 6 of Table 1B and the 5′ 10 polynucleotides of another sequence in column 6 are directly contiguous. In preferred embodiments, the 3′ 10 polynucleotides of one of the sequences delineated in column 6 of Table 1B is directly contiguous with the 5′ 10 polynucleotides of the next sequential exon delineated in Table 1B, column 6. Nucleic acids which hybridize to the complement of these 20 contiguous polynucleotides under stringent hybridization conditions or alternatively, under lower stringency conditions, are also encompassed by the invention. Polypeptides encoded by these polynucleotides and/or nucleic acids, other polynucleotides and/or nucleic acids encoding these polypeptides, and antibodies that bind these polypeptides are also encompassed by the invention. Additionally, fragments and variants of the above-described polynucleotides, nucleic acids, and polypeptides are also encompassed by the invention.

[0151] In the present invention, a “polypeptide fragment” refers to an amino acid sequence which is a portion of that contained in SEQ ID NO:Y, a portion of an amino acid sequence encoded by the portion of SEQ ID NO:X as defined in columns 8 and 9 of Table 2, a portion of an amino acid sequence encoded by the polynucleotide sequence of SEQ ID NO:X, a portion of an amino acid sequence encoded by the complement of the polynucleotide sequence in SEQ ID NO:X, and/or a portion of an amino acid sequence encoded by the cDNA contained in Clone ID NO:Z. Protein (polypeptide) fragments may be “free-standing,” or comprised within a larger polypeptide of which the fragment forms a part or region, most preferably as a single continuous region. Representative examples of polypeptide fragments of the invention, include, for example, fragments comprising, or alternatively consisting of, from about amino acid number 1-20, 21-40, 41-60, 61-80, 81-100, 102-120, 121-140, 141-160, 161-180, 181-200, 201-220, 221-240, 241-260, 261-280, 281-300, 301-320, 321-340, 341-360, 361-380, 381-400, 401-420, 421-440, 441-460, 461-480, 481-500, 501-520, 521-540, 541-560, 561-580, 581-600, 601-620, 621-640, 641-660, 661-680, 681-700, 701-720, 721-740, 741-760, 761-780, 781-800, 801-820, 821-840, 841-860, 861-880, 881-900, 901-920, 921-940, 941-960, 961-980, 981-1000, 1001-1020, 1021-1040, 1041-1060, 1061-1080, 1081-1100, 1101-1120, 1121-1140, 1141-1160, 1161-1180, 1181-1200, 1201-1220, 1221-1240, 1241-1260, 1261-1280, 1281-1300, 1301-1320, 1321-1340, 1341-1360, 1361-1380, 1381-1400, 1401-1420, 1421-1440, or 1441 to the end of the coding region. In a preferred embodiment, polypeptide fragments of the invention include, for example, fragments comprising, or alternatively consisting of, from about amino acid number 1-20, 21-40, 41-60, 61-80, 81-100, 102-120, 121-140, 141-160, 161-180, 181-200, 201-220, 221-240, 241-260, 261-280, 281-300, 301-320, 321-340, 341-360, 361-380, 381-400, 401-420, 421-440, 441-460, 461-480, 481-500, 501-520, 521-540, 541-560, 561-580, 581-600, 601-620, 621-640, 641-660, 661-680, 681-700, 701-720, 721-740, 741-760, 761-780, 781-800, 801-820, 821-840, 841-860, 861-880, 881-900, 901-920, 921-940, 941-960, 961-980, 981-1000, 1001-1020, 1021-1040, 1041-1060, 1061-1080, 1081-1100, 1101-1120, 1121-1140, 1141-1160, 1161-1180, 1181-1200, 1201-1220, 1221-1240, 1241-1260, 1261-1280, 1281-1300, 1301-1320, 1321-1340, 1341-1360, 1361-1380, 1381-1400, 1401-1420, 1421-1440, or 1441 to the end of the coding region of SEQ ID NO:Y. Moreover, polypeptide fragments of the invention may be at least about 10, 15, 20, 25, 30, 35, 40, 45, 50, 55, 60, 65, 70, 75, 80, 85, 90, 100, 110, 120, 130, 140, or 150 amino acids in length. In this context “about” includes the particularly recited ranges or values, or ranges or values larger or smaller by several (5, 4, 3, 2, or 1) amino acids, at either extreme or at both extremes. Polynucleotides encoding these polypeptide fragments are also encompassed by the invention.

[0152] Even if deletion of one or more amino acids from the N-terminus of a protein results in modification of loss of one or more biological functions of the protein, other functional activities (e.g., biological activities, ability to multimerize, ability to bind a ligand) may still be retained. For example, the ability of shortened muteins to induce and/or bind to antibodies which recognize the complete or mature forms of the polypeptides generally will be retained when less than the majority of the residues of the complete or mature polypeptide are removed from the N-terminus. Whether a particular polypeptide lacking N-terminal residues of a complete polypeptide retains such immunologic activities can readily be determined by routine methods described herein and otherwise known in the art. It is not unlikely that a mutein with a large number of deleted N-terminal amino acid residues may retain some biological or immunogenic activities. In fact, peptides composed of as few as six amino acid residues may often evoke an immune response.

[0153] Accordingly, polypeptide fragments include the secreted protein as well as the mature form. Further preferred polypeptide fragments include the secreted protein or the mature form having a continuous series of deleted residues from the amino or the carboxy terminus, or both. For example, any number of amino acids, ranging from 1-60, can be deleted from the amino terminus of either the secreted polypeptide or the mature form. Similarly, any number of amino acids, ranging from 1-30, can be deleted from the carboxy terminus of the secreted protein or mature form. Furthermore, any combination of the above amino and carboxy terminus deletions is preferred. Similarly, polynucleotides encoding these polypeptide fragments are also preferred.

[0154] The present invention further provides polypeptides having one or more residues deleted from the amino terminus of the amino acid sequence of a polypeptide disclosed herein (e.g., a polypeptide of SEQ ID NO:Y, a polypeptide encoded by the polynucleotide sequence contained in SEQ ID NO:X or the complement thereof, a polypeptide encoded by the portion of SEQ ID NO:X as defined in columns 8 and-9 of Table 2, a polypeptide encoded by the portion of SEQ ID NO:B as defined in column 6 of Table 1B, and/or a polypeptide encoded by the cDNA contained in Clone ID NO:Z). In particular, N-terminal deletions may be described by the general formula m−q, where q is a whole integer representing the total number of amino acid residues in a polypeptide of the invention (e.g., the polypeptide disclosed in SEQ ID NO:Y, or the polypeptide encoded by the portion of SEQ ID NO:X as defined in columns 8 and 9 of Table 2), and m is defined as any integer ranging from 2 to q−6. Polynucleotides encoding these polypeptides are also encompassed by the invention. The present invention further provides polypeptides having one or more residues from the carboxy terminus of the amino acid sequence of a polypeptide disclosed herein (e.g., a polypeptide of SEQ ID NO:Y, a polypeptide encoded by the polynucleotide sequence contained in SEQ ID NO:X, a polypeptide encoded by the portion of SEQ ID NO:X as defined in columns 8 and 9 of Table 2, and/or a polypeptide encoded by the cDNA contained in Clone ID NO:Z). In particular, C-terminal deletions may be described by the general formula 1−n, where n is any whole integer ranging from 6 to q−1, and where n corresponds to the position of amino acid residue in a polypeptide of the invention. Polynucleotides encoding these polypeptides are also encompassed by the invention.

[0155] In addition, any of the above described N- or C-terminal deletions can be combined to produce a N- and C-terminal deleted polypeptide. The invention also provides polypeptides having one or more amino acids deleted from both the amino and the carboxyl termini, which may be described generally as having residues m−n of a polypeptide encoded by SEQ ID NO:X (e.g., including, but not limited to, the preferred polypeptide disclosed as SEQ ID NO:Y and the polypeptide encoded by the portion of SEQ ID NO:X as defined in columns 8 and 9 of Table 2), the cDNA contained in Clone ID NO:Z, and/or the complement thereof, where n and m are integers as described above. Polynucleotides encoding these polypeptides are also encompassed by the invention.

[0156] Also as mentioned above, even if deletion of one or more amino acids from the C-terminus of a protein results in modification of loss of one or more biological functions of the protein, other functional activities (e.g., biological activities, ability to multimerize, ability to bind a ligand) may still be retained. For example the ability of the shortened mutein to induce and/or bind to antibodies which recognize the complete or mature forms of the polypeptide generally will be retained when less than the majority of the residues of the complete or mature polypeptide are removed from the C-terminus. Whether a particular polypeptide lacking C-terminal residues of a complete polypeptide retains such immunologic activities can readily be determined by routine methods described herein and otherwise known in the art. It is not unlikely that a mutein with a large number of deleted C-terminal amino acid residues may retain some biological or immunogenic activities. In fact, peptides composed of as few as six amino acid residues may often evoke an immune response.

[0157] The present application is also directed to proteins containing polypeptides at least 80%, 85%, 90%, 95%, 96%, 97%, 98% or 99% identical to a polypeptide sequence set forth herein. In preferred embodiments, the application is directed to proteins containing polypeptides at least 80%, 85%, 90%, 95%, 96%, 97%, 98% or 99% identical to polypeptides having the amino acid sequence of the specific N- and C-terminal deletions. Polynucleotides encoding these polypeptides are also encompassed by the invention.

[0158] Any polypeptide sequence encoded by, for example, the polynucleotide sequences set forth as SEQ ID NO:X or the complement thereof, (presented, for example, in Tables 1A and 2), the cDNA contained in Clone ID NO:Z, or the polynucleotide sequence as defined in column 6 of Table 1B, may be analyzed to determine certain preferred regions of the polypeptide. For example, the amino acid sequence of a polypeptide encoded by a polynucleotide sequence of SEQ ID NO:X (e.g., the polypeptide of SEQ ID NO:Y and the polypeptide encoded by the portion of SEQ ID NO:X as defined in columns 8 and 9 of Table 2) or the cDNA contained in Clone ID NO:Z may be analyzed using the default parameters of the DNASTAR computer algorithm (DNASTAR, Inc., 1228 S. Park St., Madison, Wis. 53715 USA; http://www.dnastar.com/).

[0159] Polypeptide regions that may be routinely obtained using the DNASTAR computer algorithm include, but are not limited to, Garnier-Robson alpha-regions, beta-regions, turn-regions, and coil-regions; Chou-Fasman alpha-regions, beta-regions, and turn-regions; Kyte-Doolittle hydrophilic regions and hydrophobic regions; Eisenberg alpha- and beta-amphipathic regions; Karplus-Schulz flexible regions; Emini surface-forming regions; and Jameson-Wolf regions of high antigenic index. Among highly preferred polynucleotides of the invention in this regard are those that encode polypeptides comprising regions that combine several structural features, such as several (e.g., 1, 2, 3 or 4) of the features set out above.

[0160] Additionally, Kyte-Doolittle hydrophilic regions and hydrophobic regions, Emini surface-forming regions, and Jameson-Wolf regions of high antigenic index (i.e., containing four or more contiguous amino acids having an antigenic index of greater than or equal to 1.5, as identified using the default parameters of the Jameson-Wolf program) can routinely be used to determine polypeptide regions that exhibit a high degree of potential for antigenicity. Regions of high antigenicity are determined from data by DNASTAR analysis by choosing values which represent regions of the polypeptide which are likely to be exposed on the surface of the polypeptide in an environment in which antigen recognition may occur in the process of initiation of an immune response.

[0161] Preferred polypeptide fragments of the invention are fragments comprising, or alternatively, consisting of, an amino acid sequence that displays a functional activity (e.g. biological activity) of the polypeptide sequence of which the amino acid sequence is a fragment. By a polypeptide displaying a “functional activity” is meant a polypeptide capable of one or more known functional activities associated with a full-length protein, such as, for example, biological activity, antigenicity, immunogenicity, and/or multimerization, as described herein.

[0162] Other preferred polypeptide fragments are biologically active fragments. Biologically active fragments are those exhibiting activity similar, but not necessarily identical, to an activity of the polypeptide of the present invention. The biological activity of the fragments may include an improved desired activity, or a decreased undesirable activity.

[0163] In preferred embodiments, polypeptides of the invention comprise, or alternatively consist of, one, two, three, four, five or more of the antigenic fragments of the polypeptide of SEQ ID NO:Y, or portions thereof. Polynucleotides encoding these polypeptides are also encompassed by the invention.

[0164] The present invention encompasses polypeptides comprising, or alternatively consisting of, an epitope of: the polypeptide sequence shown in SEQ ID NO:Y; a polypeptide sequence encoded by SEQ ID NO:X or the complementary strand thereto; the polypeptide sequence encoded by the portion of SEQ ID NO:X as defined in columns 8 and 9 of Table 2; the polypeptide sequence encoded by the portion of SEQ ID NO:B as defined in column 6 of Table 1B or the complement thereto; the polypeptide sequence encoded by the cDNA contained in Clone ID NO:Z; or the polypeptide sequence encoded by a polynucleotide that hybridizes to the sequence of SEQ ID NO:X, the complement of the sequence of SEQ ID NO:X, the complement of a portion of SEQ ID NO:X as defined in columns 8 and 9 of Table 2, or the cDNA sequence contained in Clone ID NO:Z under stringent hybridization conditions or alternatively, under lower stringency hybridization as defined supra. The present invention further encompasses polynucleotide sequences encoding an epitope of a polypeptide sequence of the invention (such as, for example, the sequence disclosed in SEQ ID NO:X, or a fragment thereof), polynucleotide sequences of the complementary strand of a polynucleotide sequence encoding an epitope of the invention, and polynucleotide sequences which hybridize to the complementary strand under stringent hybridization conditions or alternatively, under lower stringency hybridization conditions defined supra.

[0165] The term “epitopes,” as used herein, refers to portions of a polypeptide having antigenic or immunogenic activity in an animal, preferably a mammal, and most preferably in a human. In a preferred embodiment, the present invention encompasses a polypeptide comprising an epitope, as well as the polynucleotide encoding this polypeptide. An “immunogenic epitope,” as used herein, is defined as a portion of a protein that elicits an antibody response in an animal, as determined by any method known in the art, for example, by the methods for generating antibodies described infra. (See, for example, Geysen et al., Proc. Natl. Acad. Sci. USA 81:3998-4002 (1983)). The term “antigenic epitope,” as used herein, is defined as a portion of a protein to which an antibody can immunospecifically bind its antigen as determined by any method well known in the art, for example, by the immunoassays described herein. Immunospecific binding excludes non-specific binding but does not necessarily exclude cross-reactivity with other antigens. Antigenic epitopes need not necessarily be immunogenic.

[0166] Fragments, which function as epitopes may be produced by any conventional means. (See, e.g., Houghten, R. A., Proc. Natl. Acad. Sci. USA 82:5131-5135 (1985) further described in U.S. Pat. No. 4,631,211.)

[0167] In the present invention, antigenic epitopes preferably contain a sequence of at least 4, at least 5, at least 6, at least 7, more preferably at least 8, at least 9, at least 10, at least 11, at least 12, at least 13, at least 14, at least 15, at least 20, at least 25, at least 30, at least 40, at least 50, and, most preferably, between about 15 to about 30 amino acids. Preferred polypeptides comprising immunogenic or antigenic epitopes are at least 10, 15, 20, 25, 30, 35, 40, 45, 50, 55, 60, 65, 70, 75, 80, 85, 90, 95, or 100 amino acid residues in length. Additional non-exclusive preferred antigenic epitopes include the antigenic epitopes disclosed herein, as well as portions thereof. Antigenic epitopes are useful, for example, to raise antibodies, including monoclonal antibodies, that specifically bind the epitope. Preferred antigenic epitopes include the antigenic epitopes disclosed herein, as well as any combination of two, three, four, five or more of these antigenic epitopes. Antigenic epitopes can be used as the target molecules in immunoassays. (See, for instance, Wilson et al., Cell 37:767-778 (1984); Sutcliffe et al., Science 219:660-666 (1983)).

[0168] Non-limiting examples of epitopes of polypeptides that can be used to generate antibodies of the invention include a polypeptide comprising, or alternatively consisting of, at least one, two, three, four, five, six or more of the portion(s) of SEQ ID NO:Y specified in column 6 of Table 1A. These polypeptide fragments have been determined to bear antigenic epitopes of the proteins of the invention by the analysis of the Jameson-Wolf antigenic index, which is included in the DNAStar suite of computer programs. By “comprise” it is intended that a polypeptide contains at least one, two, three, four, five, six or more of the portion(s) of SEQ ID NO:Y shown in column 6 of Table 1A, but it may contain additional flanking residues on either the amino or carboxyl termini of the recited portion. Such additional flanking sequences are preferably sequences naturally found adjacent to the portion; i.e., contiguous sequence shown in SEQ ID NO:Y. The flanking sequence may, however, be sequences from a heterolgous polypeptide, such as from another protein described herein or from a heterologous polypeptide not described herein. In particular embodiments, epitope portions of a polypeptide of the invention comprise one, two, three, or more of the portions of SEQ ID NO:Y shown in column 6 of Table 1A. Polynucleotides encoding these polypeptides are also encompassed by the invention.

[0169] Similarly, immunogenic epitopes can be used, for example, to induce antibodies according to methods well known in the art. See, for instance, Sutcliffe et al., supra; Wilson et al., supra; Chow et al., Proc. Natl. Acad. Sci. USA 82:910-914; and Bittle et al., J. Gen. Virol. 66:2347-2354 (1985). Preferred immunogenic epitopes include the immunogenic epitopes disclosed herein, as well as any combination of two, three, four, five or more of these immunogenic epitopes. The polypeptides comprising one or more immunogenic epitopes may be presented for eliciting an antibody response together with a carrier protein, such as an albumin, to an animal system (such as rabbit or mouse), or, if the polypeptide is of sufficient length (at least about 25 amino acids), the polypeptide may be presented without a carrier. However, immunogenic epitopes comprising as few as 8 to 10 amino acids have been shown to be sufficient to raise antibodies capable of binding to, at the very least, linear epitopes in a denatured polypeptide (e.g., in Western blotting).

[0170] Epitope-bearing polypeptides of the present invention may be used to induce antibodies according to methods well known in the art including, but not limited to, in vivo immunization, in vitro immunization, and phage display methods. See, e.g., Sutcliffe et al., supra; Wilson et al., supra, and Bittle et al., J. Gen. Virol., 66:2347-2354 (1985). If in vivo immunization is used, animals may be immunized with free peptide; however, anti-peptide antibody titer may be boosted by coupling the peptide to a macromolecular carrier, such as keyhole limpet hemacyanin (KLH) or tetanus toxoid. For instance, peptides containing cysteine residues may be coupled to a carrier using a linker such as maleimidobenzoyl-N-hydroxysuccinimide ester (MBS), while other peptides may be coupled to carriers using a more general linking agent such as glutaraldehyde. Animals such as rabbits, rats and mice are immunized with either free or carrier-coupled peptides, for instance, by intraperitoneal and/or intradermal injection of emulsions containing about 100 μg of peptide or carrier protein and Freund's adjuvant or any other adjuvant known for stimulating an immune response. Several booster injections may be needed, for instance, at intervals of about two weeks, to provide a useful titer of anti-peptide antibody which can be detected, for example, by ELISA assay using free peptide adsorbed to a solid surface. The titer of anti-peptide antibodies in serum from an immunized animal may be increased by selection of anti-peptide antibodies, for instance, by adsorption to the peptide on a solid support and elution of the selected antibodies according to methods well known in the art.

[0171] As one of skill in the art will appreciate, and as discussed above, the polypeptides of the present invention (e.g., those comprising an immunogenic or antigenic epitope) can be fused to heterologous polypeptide sequences. For example, polypeptides of the present invention (including fragments or variants thereof), may be fused with the constant domain of immunoglobulins (IgA, IgE, IgG, IgM), or portions thereof (CH1, CH2, CH3, or any combination thereof and portions thereof, resulting in chimeric polypeptides. By way of another non-limiting example, polypeptides and/or antibodies of the present invention (including fragments or variants thereof) may be fused with albumin (including but not limited to recombinant human serum albumin or fragments or variants thereof (see, e.g., U.S. Pat. No. 5,876,969, issued Mar. 2, 1999, EP Patent 0 413 622, and U.S. Pat. No. 5,766,883, issued Jun. 16, 1998, herein incorporated by reference in their entirety)). In a preferred embodiment, polypeptides and/or antibodies of the present invention (including fragments or variants thereof) are fused with the mature form of human serum albumin (i.e., amino acids 1-585 of human serum albumin as shown in FIGS. 1 and 2 of EP Patent 0 322 094) which is herein incorporated by reference in its entirety. In another preferred embodiment, polypeptides and/or antibodies of the present invention (including fragments or variants thereof) are fused with polypeptide fragments comprising, or alternatively consisting of, amino acid residues 1−z of human serum albumin, where z is an integer from 369 to 419, as described in U.S. Pat. No. 5,766,883 herein incorporated by reference in its entirety. Polypeptides and/or antibodies of the present invention (including fragments or variants thereof) may be fused to either the N- or C-terminal end of the heterologous protein (e.g., immunoglobulin Fc polypeptide or human serum albumin polypeptide). Polynucleotides encoding fusion proteins of the invention are also encompassed by the invention.

[0172] Such fusion proteins as those described above may facilitate purification and may increase half-life in vivo. This has been shown for chimeric proteins consisting of the first two domains of the human CD4-polypeptide and various domains of the constant regions of the heavy or light chains of mammalian immunoglobulins. See, e.g., EP 394,827; Traunecker et al., Nature, 331:84-86 (1988). Enhanced delivery of an antigen across the epithelial barrier to the immune system has been demonstrated for antigens (e.g., insulin) conjugated to an FcRn binding partner such as IgG or Fc fragments (see, e.g., PCT Publications WO 96/22024 and WO 99/04813). IgG Fusion proteins that have a disulfide-linked dimeric structure due to the IgG portion desulfide bonds have also been found to be more efficient in binding and neutralizing other molecules than monomeric polypeptides or fragments thereof alone. See, e.g., Fountoulakis et al., J. Biochem., 270:3958-3964 (1995). Nucleic acids encoding the above epitopes can also be recombined with a gene of interest as an epitope tag (e.g., the hemagglutinin (HA) tag or flag tag) to aid in detection and purification of the expressed polypeptide. For example, a system described by Janknecht et al. allows for the ready purification of non-denatured fusion proteins expressed in human cell lines (Janknecht et al., 1991, Proc. Natl. Acad. Sci. USA 88:8972-897). In this system, the gene of interest is subcloned into a vaccinia recombination plasmid such that the open reading frame of the gene is translationally fused to an amino-terminal tag consisting of six histidine residues. The tag serves as a matrix binding domain for the fusion protein. Extracts from cells infected with the recombinant vaccinia virus are loaded onto Ni2+ nitriloacetic acid-agarose column and histidine-tagged proteins can be selectively eluted with imidazole-containing buffers.

[0173] Fusion Proteins

[0174] Any polypeptide of the present invention can be used to generate fusion proteins. For example, the polypeptide of the present invention, when fused to a second protein, can be used as an antigenic tag. Antibodies raised against the polypeptide of the present invention can be used to indirectly detect the second protein by binding to the polypeptide. Moreover, because secreted proteins target cellular locations based on trafficking signals, polypeptides of the present invention which are shown to be secreted can be used as targeting molecules once fused to other proteins.

[0175] Examples of domains that can be fused to polypeptides of the present invention include not only heterologous signal sequences, but also other heterologous functional regions. The fusion does not necessarily need to be direct, but may occur through linker sequences.

[0176] In certain preferred embodiments, proteins of the invention are fusion proteins comprising an amino acid sequence that is an N and/or C-terminal deletion of a polypeptide of the invention. In preferred embodiments, the invention is directed to a fusion protein comprising an amino acid sequence that is at least 80%, 85%, 90%, 95%, 96%, 97%, 98% or 99% identical to a polypeptide sequence of the invention. Polynucleotides encoding these proteins are also encompassed by the invention.

[0177] Moreover, fusion proteins may also be engineered to improve characteristics of the polypeptide of the present invention. For instance, a region of additional amino acids, particularly charged amino acids, may be added to the N-terminus of the polypeptide to improve stability and persistence during purification from the host cell or subsequent handling and storage. Also, peptide moieties may be added to the polypeptide to facilitate purification. Such regions may be removed prior to final preparation of the polypeptide. The addition of peptide moieties to facilitate handling of polypeptides is familiar and routine techniques in the art.

[0178] As one of skill in the art will appreciate that, as discussed above, polypeptides of the present invention, and epitope-bearing fragments thereof, can be combined with heterologous polypeptide sequences. For example, the polypeptides of the present invention may be fused with heterologous polypeptide sequences, for example, the polypeptides of the present invention may be fused with the constant domain of immunoglobulins (IgA, IgE, IgG, IgM) or portions thereof (CH1, CH2, CH3, and any combination thereof, including both entire domains and portions thereof), or albumin (including, but not limited to, native or recombinant human albumin or fragments or variants thereof (see, e.g., U.S. Pat. No. 5,876,969, issued Mar. 2, 1999, EP Patent 0 413 622, and U.S. Pat. No. 5,766,883, issued Jun. 16, 1998, herein incorporated by reference in their entirety)), resulting in chimeric polypeptides. For example, EP-A-O 464 533 (Canadian counterpart 2045869) discloses fusion proteins comprising various portions of constant region of immunoglobulin molecules together with another human protein or part thereof. In many cases, the Fc part in a fusion protein is beneficial in therapy and diagnosis, and thus can result in, for example, improved pharmacokinetic properties (EP-A 0232 262). Alternatively, deleting the Fc part after the fusion protein has been expressed, detected, and purified, would be desired. For example, the Fc portion may hinder therapy and diagnosis if the fusion protein is used as an antigen for immunizations. In drug discovery, for example, human proteins, such as hIL-5, have been fused with Fc portions for the purpose of high-throughput screening assays to identify antagonists of hIL-5. See, D. Bennett et al., J. Molecular Recognition 8:52-58 (1995); K. Johanson et al., J. Biol. Chem. 270:9459-9471 (1995).

[0179] Moreover, the polypeptides of the present invention can be fused to marker sequences, such as a polypeptide, which facilitates purification of the fused polypeptide. In preferred embodiments, the marker amino acid sequence is a hexa-histidine peptide, such as the tag provided in a pQE vector (QIAGEN, Inc., 9259 Eton Avenue, Chatsworth, Calif., 91311), among others, many of which are commercially available. As described in Gentz et al., Proc. Natl. Acad. Sci. USA 86:821-824 (1989), for instance, hexa-histidine provides for convenient purification of the fusion protein. Another peptide tag useful for purification, the “HA” tag, corresponds to an epitope derived from the influenza hemagglutinin protein (Wilson et al., Cell 37:767 (1984).)

[0180] Additional fusion proteins of the invention may be generated through the techniques of gene-shuffling, motif-shuffling, exon-shuffling, and/or codon-shuffling (collectively referred to as “DNA shuffling”), briefly described below, and further described herein. DNA shuffling may be employed to modulate the activities of polypeptides of the invention, such methods can be used to generate polypeptides with altered activity, as well as agonists and antagonists of the polypeptides. See, generally, U.S. Pat. Nos. 5,605,793; 5,811,238; 5,830,721; 5,834,252; and 5,837,458, and Patten et al., Curr. Opinion Biotechnol. 8:724-33 (1997); Harayama, Trends Biotechnol. 16(2):76-82 (1998); Hansson et al., J. Mol. Biol. 287:265-76 (1999); and Lorenzo and Blasco, Biotechniques 24(2):308-13 (1998); each of these patents and publications are hereby incorporated by reference in its entirety). In a preferred embodiment, one or more components, motifs, sections, parts, domains, fragments, etc., of a polynucleotide encoding a polypeptide of the invention may be recombined with one or more components, motifs, sections, parts, domains, fragments, etc., of one or more heterologous molecules encoding a heterologous polypeptide.

[0181] Thus, any of these above fusions can be engineered using the polynucleotides or the polypeptides of the present invention.

[0182] Recombinant and Synthetic Production of Polypeptides of the Invention

[0183] The present invention also relates to vectors containing the polynucleotide of the present invention, host cells, and the production of polypeptides by synthetic and recombinant techniques. The vector may be, for example, a phage, plasmid, viral, or retroviral vector. Retroviral vectors may be replication competent or replication defective. In the latter case, viral propagation generally will occur only in complementing host cells.

[0184] The polynucleotides of the invention may be joined to a vector containing a selectable marker for propagation in a host. Generally, a plasmid vector is introduced in a precipitate, such as a calcium phosphate precipitate, or in a complex with a charged lipid. If the vector is a virus, it may be packaged in vitro using an appropriate packaging cell line and then transduced into host cells.

[0185] The polynucleotide insert should be operatively linked to an appropriate promoter, such as the phage lambda PL promoter, the E. coli lac, trp, phoA and tac promoters, the SV40 early and late promoters and promoters of retroviral LTRs, to name a few. Other suitable promoters will be known to the skilled artisan. The expression constructs will further contain sites for transcription initiation, termination, and, in the transcribed region, a ribosome binding site for translation. The coding portion of the transcripts expressed by the constructs will preferably include a translation initiating codon at the beginning and a termination codon (UAA, UGA or UAG) appropriately positioned at the end of the polypeptide to be translated.

[0186] As indicated, the expression vectors will preferably include at least one selectable marker. Such markers include dihydrofolate reductase, G41 8 or neomycin resistance, glutamine synthase, for eukaryotic cell culture and tetracycline, kanamycin or ampicillin resistance genes for culturing in E. coli and other bacteria. Representative examples of appropriate hosts include, but are not limited to, bacterial cells, such as E. coli, Streptomyces and Salmonella typhimurium cells; fungal cells, such as yeast cells (e.g., Saccharomyces cerevisiae or Pichia pastoris (ATCC Accession No. 201178)); insect cells such as Drosophila S2 and Spodoptera Sf9 cells; animal cells such as CHO, COS, 293, NSO and Bowes melanoma cells; and plant cells. Appropriate culture mediums and conditions for the above-described host cells are known in the art.

[0187] Among vectors preferred for use in bacteria include pQE70, pQE60 and pQE-9, available from QIAGEN, Inc.; pBluescript vectors, Phagescript vectors, pNH8A, pNH16a, pNH18A, pNH46A, available from Stratagene Cloning Systems, Inc.; and ptrc99a, pKK223-3, pKK233-3, pDR540, pRIT5 available from Pharmacia Biotech, Inc. Among preferred eukaryotic vectors are pWLNEO, pSV2CAT, pOG44, pXT1 and pSG available from Stratagene; and pSVK3, pBPV, pMSG and pSVL available from Pharmacia. Preferred expression vectors for use in yeast systems include, but are not limited to pYES2, pYD1, pTEF1/Zeo, pYES2/GS, pPICZ, pGAPZ, pGAPZalph, pPIC9, pPIC3.5, pHIL-D2, pHIL-S1, pPIC3.5K, pPIC9K, and PAO815 (all available from Invitrogen, Carlsbad, Calif.). Other suitable vectors will be readily apparent to the skilled artisan.

[0188] Vectors which use glutamine synthase (GS) or DHFR as the selectable markers can be amplified in the presence of the drugs methionine sulphoximine or methotrexate, respectively. An advantage of glutamine synthase based vectors is the availabilty of cell lines (e.g., the murine myeloma cell line, NSO) which are glutamine synthase negative. Glutamine synthase expression systems can also function in glutamine synthase expressing cells (e.g., Chinese Hamster Ovary (CHO) cells) by providing additional inhibitor to prevent the functioning of the endogenous gene. A glutamine synthase expression system and components thereof are detailed in PCT publications: WO87/04462; WO86/05807; WO89/01036; WO89/10404; and WO91/06657 which are hereby incorporated in their entireties by reference herein. Additionally, glutamine synthase expression vectors can be obtained from Lonza Biologics, Inc. (Portsmouth, N.H.). Expression and production of monoclonal antibodies using a GS expression system in murine myeloma cells is described in Bebbington et al., Bio/technology 10:169(1992) and in Biblia and Robinson Biotechnol. Prog. 11:1 (1995) which are herein incorporated by reference.

[0189] The present invention also relates to host cells containing the above-described vector constructs described herein, and additionally encompasses host cells containing nucleotide sequences of the invention that are operably associated with one or more heterologous control regions (e.g., promoter and/or enhancer) using techniques known of in the art. The host cell can be a higher eukaryotic cell, such as a mammalian cell (e.g., a human derived cell), or a lower eukaryotic cell, such as a yeast cell, or the host cell can be a prokaryotic cell, such as a bacterial cell. A host strain may be chosen, which modulates the expression of the inserted gene sequences, or modifies and processes the gene product in the specific fashion desired. Expression from certain promoters can be elevated in the presence of certain inducers; thus expression of the genetically engineered polypeptide may be controlled. Furthermore, different host cells have characteristics and specific mechanisms for the translational and post-translational processing and modification (e.g., phosphorylation, cleavage) of proteins. Appropriate cell lines can be chosen to ensure the desired modifications and processing of the foreign protein expressed.

[0190] Introduction of the nucleic acids and nucleic acid constructs of the invention into the host cell can be effected by calcium phosphate transfection, DEAE-dextran mediated transfection, cationic lipid-mediated transfection, electroporation, transduction, infection, or other methods. Such methods are described in many standard laboratory manuals, such as Davis et al., Basic Methods In Molecular Biology (1986). It is specifically contemplated that the polypeptides of the present invention may in fact be expressed by a host cell lacking a recombinant vector.

[0191] In addition to encompassing host cells containing the vector constructs discussed herein, the invention also encompasses primary, secondary, and immortalized host cells of vertebrate origin, particularly mammalian origin, that have been engineered to delete or replace endogenous genetic material (e.g., connective tissue antigen coding sequence), and/or to include genetic material (e.g., heterologous polynucleotide sequences) that is operably associated with connective tissue associated polynucleotides of the invention, and which activates, alters, and/or amplifies endogenous connective tissue associated polynucleotides. For example, techniques known in the art may be used to operably associate heterologous control regions (e.g., promoter and/or enhancer) and endogenous connective tissue associated polynucleotide sequences via homologous recombination (see, e.g., U.S. Pat. No. 5,641,670, issued Jun. 24, 1997; International Publication Number WO 96/29411; International Publication Number WO 94/12650; Koller et al., Proc. Natl. Acad. Sci. USA 86:8932-8935 (1989); and Zijlstra et al., Nature 342:435-438 (1989), the disclosures of each of which are incorporated by reference in their entireties).

[0192] Polypeptides of the present invention can also be recovered from: products purified from natural sources, including bodily fluids, tissues and cells, whether directly isolated or cultured; products of chemical synthetic procedures; and products produced by recombinant techniques from a prokaryotic or eukaryotic host, including, for example, bacterial, yeast, higher plant, insect, and mammalian cells. Depending upon the host employed in a recombinant production procedure, the polypeptides of the present invention may be glycosylated or may be non-glycosylated. In addition, polypeptides of the invention may also include an initial modified methionine residue, in some cases as a result of host-mediated processes. Thus, it is well known in the art that the N-terminal methionine encoded by the translation initiation codon generally is removed with high efficiency from any protein after translation in all eukaryotic cells. While the N-terminal methionine on most proteins also is efficiently removed in most prokaryotes, for some proteins, this prokaryotic removal process is inefficient, depending on the nature of the amino acid to which the N-terminal methionine is covalently linked.

[0193] In one embodiment, the yeast Pichia pastoris is used to express polypeptides of the invention in a eukaryotic system. Pichia pastoris is a methylotrophic yeast which can metabolize methanol as its sole carbon source. A main step in the methanol metabolization pathway is the oxidation of methanol to formaldehyde using O₂. This reaction is catalyzed by the enzyme alcohol oxidase. In order to metabolize methanol as its sole carbon source, Pichia pastoris must generate high levels of alcohol oxidase due, in part, to the relatively low affinity of alcohol oxidase for O₂. Consequently, in a growth medium depending on methanol as a main carbon source, the promoter region of one of the two alcohol oxidase genes (AOX1) is highly active. In the presence of methanol, alcohol oxidase produced from the AOX1 gene comprises up to approximately 30% of the total soluble protein in Pichia pastoris. See, Ellis, S. B., et al., Mol. Cell. Biol. 5:1111-21 (1985); Koutz, P. J, et al., Yeast 5:167-77 (1989); Tschopp, J. F., et al., Nucl. Acids Res. 15:3859-76 (1987). Thus, a heterologous coding sequence, such as, for example, a polynucleotide of the present invention, under the transcriptional regulation of all or part of the AOX1 regulatory sequence is expressed at exceptionally high levels in Pichia yeast grown in the presence of methanol.

[0194] In one example, the plasmid vector pPIC9K is used to express DNA encoding a polypeptide of the invention, as set forth herein, in a Pichea yeast system essentially as described in “Pichia Protocols: Methods in Molecular Biology,” D. R. Higgins and J. Cregg, eds. The Humana Press, Totowa, N.J., 1998. This expression vector allows expression and secretion of a polypeptide of the invention by virtue of the strong AOX1 promoter linked to the Pichia pastoris alkaline phosphatase (PHO) secretory signal peptide (i.e., leader) located upstream of a multiple cloning site.

[0195] Many other yeast vectors could be used in place of pPIC9K, such as, pYES2, pYD1, pTEF1/Zeo, pYES2/GS, pPICZ, pGAPZ, pGAPZalpha, pPIC9, pPIC3.5, pHIL-D2, pHIL-S1, pPIC3.5K, and PAO815, as one skilled in the art would readily appreciate, as long as the proposed expression construct provides appropriately located signals for transcription, translation, secretion (if desired), and the like, including an in-frame AUG as required.

[0196] In another embodiment, high-level expression of a heterologous coding sequence, such as, for example, a polynucleotide of the present invention, may be achieved by cloning the heterologous polynucleotide of the invention into an expression vector such as, for example, pGAPZ or pGAPZalpha, and growing the yeast culture in the absence of methanol.

[0197] In addition to encompassing host cells containing the vector constructs discussed herein, the invention also encompasses primary, secondary, and immortalized host cells of vertebrate origin, particularly mammalian origin, that have been engineered to delete or replace endogenous genetic material (e.g., coding sequence), and/or to include genetic material (e.g., heterologous polynucleotide sequences) that is operably associated with polynucleotides of the invention, and which activates, alters, and/or amplifies endogenous polynucleotides. For example, techniques known in the art may be used to operably associate heterologous control regions (e.g., promoter and/or enhancer) and endogenous polynucleotide sequences via homologous recombination (see, e.g., U.S. Pat. No. 5,641,670, issued Jun. 24, 1997; International Publication No. WO 96/29411, published Sep. 26, 1996; International Publication No. WO 94/12650, published Aug. 4, 1994; Koller et al., Proc. Natl. Acad. Sci. USA 86:8932-8935 (1989); and Zijlstra et al., Nature 342:435-438 (1989), the disclosures of each of which are incorporated by reference in their entireties).

[0198] In addition, polypeptides of the invention can be chemically synthesized using techniques known in the art (e.g., see Creighton, 1983, Proteins: Structures and Molecular Principles, W.H. Freeman & Co., N.Y., and Hunkapiller et al., Nature, 310:105-111 (1984)). For example, a polypeptide corresponding to a fragment of a polypeptide can be synthesized by use of a peptide synthesizer. Furthermore, if desired, nonclassical amino acids or chemical amino acid analogs can be introduced as a substitution or addition into the polypeptide sequence. Non-classical amino acids include, but are not limited to, to the D-isomers of the common amino acids, 2,4-diaminobutyric acid, a-amino isobutyric acid, 4-aminobutyric acid, Abu, 2-amino butyric acid, g-Abu, e-Ahx, 6-amino hexanoic acid, Aib, 2-amino isobutyric acid, 3-amino propionic acid, omithine, norleucine, norvaline, hydroxyproline, sarcosine, citrulline, homocitrulline, cysteic acid, t-butylglycine, t-butylalanine, phenylglycine, cyclohexylalanine, b-alanine, fluoro-amino acids, designer amino acids such as b-methyl amino acids, Ca-methyl amino acids, Na-methyl amino acids, and amino acid analogs in general. Furthermore, the amino acid can be D (dextrorotary) or L (levorotary).

[0199] The invention encompasses polypeptides of the present invention which are differentially modified during or after translation, e.g., by glycosylation, acetylation, phosphorylation, amidation, derivatization by known protecting/blocking groups, proteolytic cleavage, linkage to an antibody molecule or other cellular ligand, etc. Any of numerous chemical modifications may be carried out by known techniques, including but not limited, to specific chemical cleavage by cyanogen bromide, trypsin, chymotrypsin, papain, V8 protease, NaBH₄; acetylation, formylation, oxidation, reduction; metabolic synthesis in the presence of tunicamycin; etc.

[0200] Additional post-translational modifications encompassed by the invention include, for example, e.g., N-linked or O-linked carbohydrate chains, processing of N-terminal or C-terminal ends), attachment of chemical moieties to the amino acid backbone, chemical modifications of N-linked or O-linked carbohydrate chains, and addition or deletion of an N-terminal methionine residue as a result of procaryotic host cell expression. The polypeptides may also be modified with a detectable label, such as an enzymatic, fluorescent, isotopic or affinity label to allow for detection and isolation of the protein.

[0201] Examples of suitable enzymes include horseradish peroxidase, alkaline phosphatase, beta-galactosidase, or acetylcholinesterase; examples of suitable prosthetic group complexes include streptavidin/biotin and avidin/biotin; examples of suitable fluorescent materials include umbelliferone, fluorescein, fluorescein isothiocyanate, rhodamine, dichlorotriazinylamine fluorescein, dansyl chloride or phycoerythrin; an example of a luminescent material includes luminol; examples of bioluminescent materials include luciferase, luciferin, and aequorin; and examples of suitable radioactive material include iodine (¹²¹I, ¹²³I, ¹²⁵I, ¹³¹I), carbon (¹⁴C), sulfur (³⁵S), tritium (³H), indium (¹¹¹In, ¹¹²In, ^{113m}In), technetium (⁹⁹Tc, ^{99m}Tc), thallium (²⁰¹Ti), gallium (⁶⁸Ga, ⁶⁷Ga), palladium (¹⁰³Pd), molybdenum (⁹⁹Mo), xenon (¹³³Xe), fluorine (¹⁸F), ¹⁵³Sm, ¹⁷⁷Lu, ¹⁵⁹Gd, ¹⁴⁹Pm, ¹⁴⁰La, ¹⁷⁵Yb, ¹⁶⁶Ho, ⁹⁰Y, ⁴⁷Sc, ¹⁸⁶Re, ¹⁸⁸Re, 142Pr, ¹⁰⁵Rh, and ⁹⁷Ru.

[0202] In specific embodiments, a polypeptide of the present invention or fragment or variant thereof is attached to macrocyclic chelators that associate with radiometal ions, including but not limited to, ¹⁷⁷Lu, ⁹⁰Y, ¹⁶⁶Ho, and ¹⁵³Sm, to polypeptides. In a preferred embodiment, the radiometal ion associated with the macrocyclic chelators is ¹¹¹In. In another preferred embodiment, the radiometal ion associated with the macrocyclic chelator is 90Y. In specific embodiments, the macrocyclic chelator is 1,4,7,10-tetraazacyclododecane-N,N′,N″,N′″-tetraacetic acid (DOTA). In other specific embodiments, DOTA is attached to an antibody of the invention or fragment thereof via a linker molecule. Examples of linker molecules useful for conjugating DOTA to a polypeptide are commonly known in the art—see, for example, DeNardo et al., Clin Cancer Res. 4(10):2483-90 (1998); Peterson et al., Bioconjug. Chem. 10(4):553-7 (1999); and Zimmerman et al, Nucl. Med. Biol. 26(8):943-50 (1999); which are hereby incorporated by reference in their entirety.

[0203] As mentioned, the connective tissue associated proteins of the invention may be modified by either natural processes, such as posttranslational processing, or by chemical modification techniques which are well known in the art. It will be appreciated that the same type of modification may be present in the same or varying degrees at several sites in a given connective tissue associated polypeptide. Connective tissue associated polypeptides may be branched, for example, as a result of ubiquitination, and they may be cyclic, with or without branching. Cyclic, branched, and branched cyclic connective tissue associated polypeptides may result from posttranslation natural processes or may be made -by synthetic methods. Modifications include acetylation, acylation, ADP-ribosylation, amidation, covalent attachment of flavin, covalent attachment of a heme moiety, covalent attachment of a nucleotide or nucleotide derivative, covalent attachment of a lipid or lipid derivative, covalent attachment of phosphotidylinositol, cross-linking, cyclization, disulfide bond formation, demethylation, formation of covalent cross-links, formation of cysteine, formation of pyroglutamate, formylation, gamma-carboxylation, glycosylation, GPI anchor formation, hydroxylation, iodination, methylation, myristoylation, oxidation, pegylation, proteolytic processing, phosphorylation, prenylation, racemization, selenoylation, sulfation, transfer-RNA mediated addition of amino acids to proteins such as arginylation, and ubiquitination. (See, for instance, PROTEINS—STRUCTURE AND MOLECULAR PROPERTIES, 2nd Ed., T. E. Creighton, W. H. Freeman and Company, New York (1993); POSTTRANSLATIONAL COVALENT MODIFICATION OF PROTEINS, B. C. Johnson, Ed., Academic Press, New York, pgs. 1-12 (1983); Seifter et al., Meth. Enzymol. 182:626-646 (1990); Rattan et al., Ann. N.Y. Acad. Sci. 663:48-62 (1992)).

[0204] Also provided by the invention are chemically modified derivatives of the polypeptides of the invention which may provide additional advantages such as increased solubility, stability and circulating time of the polypeptide, or decreased immunogenicity (see U.S. Pat. No. 4,179,337). The chemical moieties for derivitization may be selected from water soluble polymers such as polyethylene glycol, ethylene glycol/propylene glycol copolymers, carboxymethylcellulose, dextran, polyvinyl alcohol and the like. The polypeptides may be modified at random positions within the molecule, or at predetermined positions within the molecule and may include one, two, three or more attached chemical moieties. The polymer may be of any molecular weight, and may be branched or unbranched. For polyethylene glycol, the preferred molecular weight is between about 1 kDa and about 100 kDa (the term “about” indicating that in preparations of polyethylene glycol, some molecules will weigh more, some less, than the stated molecular weight) for ease in handling and manufacturing. Other sizes may be used, depending on the desired therapeutic profile (e.g., the duration of sustained release desired, the effects, if any on biological activity, the ease in handling, the degree or lack of antigenicity and other known effects of the polyethylene glycol to a therapeutic protein or analog). For example, the polyethylene glycol may have an average molecular weight of about 200, 500, 1000, 1500, 2000, 2500, 3000, 3500, 4000, 4500, 5000, 5500, 6000, 6500, 7000, 7500, 8000, 8500, 9000, 9500, 10,000, 10,500, 11,000, 11,500, 12,000, 12,500, 13,000, 13,500, 14,000, 14,500, 15,000, 15,500, 16,000, 16,500, 17,000, 17,500, 18,000, 18,500, 19,000, 19,500, 20,000, 25,000, 30,000, 35,000, 40,000, 50,000, 55,000, 60,000, 65,000, 70,000, 75,000, 80,000, 85,000, 90,000, 95,000, or 100,000 kDa.

[0205] As noted above, the polyethylene glycol may have a branched structure. Branched polyethylene glycols are described, for example, in U.S. Pat. No. 5,643,575; Morpurgo et al., Appl. Biochem. Biotechnol. 56:59-72 (1996); Vorobjev et al., Nucleosides Nucleotides 18:2745-2750 (1999); and Caliceti et al., Bioconjug. Chem. 10:638-646 (1999), the disclosures of each of which are incorporated herein by reference.

[0206] The polyethylene glycol molecules (or other chemical moieties) should be attached to the protein with consideration of effects on functional or antigenic domains of the protein. There are a number of attachment methods available to those skilled in the art, such as, for example, the method disclosed in EP 0 401 384 (coupling PEG to G-CSF), herein incorporated by reference; see also Malik et al., Exp. Hematol. 20:1028-1035 (1992), reporting pegylation of GM-CSF using tresyl chloride. For example, polyethylene glycol may be covalently bound through amino acid residues via a reactive group, such as a free amino or carboxyl group. Reactive groups are those to which an activated polyethylene glycol molecule may be bound. The amino acid residues having a free amino group may include lysine residues and the N-terminal amino acid residues; those having a free carboxyl group may include aspartic acid residues glutamic acid residues and the C-terminal amino acid residue. Sulfhydryl groups may also be used as a reactive group for attaching the polyethylene glycol molecules. Preferred for therapeutic purposes is attachment at an amino group, such as attachment at the N-terminus or lysine group.

[0207] As suggested above, polyethylene glycol may be attached to proteins via linkage to any of a number of amino acid residues. For example, polyethylene glycol can be linked to proteins via covalent bonds to lysine, histidine, aspartic acid, glutamic acid, or cysteine residues. One or more reaction chemistries may be employed to attach polyethylene glycol to specific amino acid residues (e.g., lysine, histidine, aspartic acid, glutamic acid, or cysteine) of the protein or to more than one type of amino acid residue (e.g., lysine, histidine, aspartic acid, glutamic acid, cysteine and combinations thereof) of the protein.

[0208] One may specifically desire proteins chemically modified at the N-terminus. Using polyethylene glycol as an illustration of the present composition, one may select from a variety of polyethylene glycol molecules (by molecular weight, branching, etc.), the proportion of polyethylene glycol molecules to protein (polypeptide) molecules in the reaction mix, the type of pegylation reaction to be performed, and the method of obtaining the selected N-terminally pegylated protein. The method of obtaining the N-terminally pegylated preparation (i.e., separating this moiety from other monopegylated moieties if necessary) may be by purification of the N-terminally pegylated material from a population of pegylated protein molecules. Selective proteins chemically modified at the N-terminus modification may be accomplished by reductive alkylation which exploits differential reactivity of different types of primary amino groups (lysine versus the N-terminal) available for derivatization in a particular protein. Under the appropriate reaction conditions, substantially selective derivatization of the protein at the N-terminus with a carbonyl group containing polymer is achieved.

[0209] As indicated above, pegylation of the proteins of the invention may be accomplished by any number of means. For example, polyethylene glycol may be attached to the protein either directly or by an intervening linker. Linkerless systems for attaching polyethylene glycol to proteins are described in Delgado et al., Crit. Rev. Thera. Drug Carrier Sys. 9:249-304 (1992); Francis et al., Intern. J. of Hematol. 68:1-18 (1998); U.S. Pat. No. 4,002,531; U.S. Pat. No. 5,349,052; WO 95/06058; and WO 98/32466, the disclosures of each of which are incorporated herein by reference.

[0210] One system for attaching polyethylene glycol directly to amino acid residues of proteins without an intervening linker employs tresylated MPEG, which is produced by the modification of monmethoxy polyethylene glycol (MPEG) using tresylchloride (ClSO₂CH₂CF₃). Upon reaction of protein with tresylated MPEG, polyethylene glycol is directly attached to amine groups of the protein. Thus, the invention includes protein-polyethylene glycol conjugates produced by reacting proteins of the invention with a polyethylene glycol molecule having a 2,2,2-trifluoreothane sulphonyl group.

[0211] Polyethylene glycol can also be attached to proteins using a number of different intervening linkers. For example, U.S. Pat. No. 5,612,460, the entire disclosure of which is incorporated herein by reference, discloses urethane linkers for connecting polyethylene glycol to proteins. Protein-polyethylene glycol conjugates wherein the polyethylene glycol is attached to the protein by a linker can also be produced by reaction of proteins with compounds such as MPEG-succinimidylsuccinate, MPEG activated with 1,1′-carbonyldiimidazole, MPEG-2,4,5-trichloropenylcarbonate, MPEG-p-nitrophenolcarbonate, and various MPEG-succinate derivatives. A number of additional polyethylene glycol derivatives and reaction chemistries for attaching polyethylene glycol to proteins are described in International Publication No. WO 98/32466, the entire disclosure of which is incorporated herein by reference. Pegylated protein products produced using the reaction chemistries set out herein are included within the scope of the invention.

[0212] The number of polyethylene glycol moieties attached to each protein of the invention (i.e., the degree of substitution) may also vary. For example, the pegylated proteins of the invention may be linked, on average, to 1, 2, 3, 4, 5, 6, 7, 8, 9, 10, 12, 15, 17, 20, or more polyethylene glycol molecules. Similarly, the average degree of substitution within ranges such as 1-3, 2-4, 3-5, 4-6, 5-7, 6-8, 7-9, 8-10, 9-11, 10-12, 11-13, 12-14, 13-15, 14-16, 15-17, 16-18, 17-19, or 18-20 polyethylene glycol moieties per protein molecule. Methods for determining the degree of substitution are discussed, for example, in Delgado et al., Crit. Rev. Thera. Drug Carrier Sys. 9:249-304 (1992).

[0213] The connective tissue associated polypeptides of the invention can be recovered and purified from chemical synthesis and recombinant cell cultures by standard methods which include, but are not limited to, ammonium sulfate or ethanol precipitation, acid extraction, anion or cation exchange chromatography, phosphocellulose chromatography, hydrophobic interaction chromatography, affinity chromatography, hydroxylapatite chromatography and lectin chromatography. Most preferably, high performance liquid chromatography (“HPLC”) is employed for purification. Well known techniques for refolding protein may be employed to regenerate active conformation when the polypeptide is denatured during isolation and/or purification.

[0214] Connective tissue associated polynucleotides and polypeptides may be used in accordance with the present invention for a variety of applications, particularly those that make use of the chemical and biological properties of connective tissue associated antigens. Among these are applications in the detection, prevention, diagnosis and/or treatment of diseases associated with connective tissues, such as e.g., cancer, tumors, rheumatoid arthritis, psoriatic arthritis, discoid lupus erythematosus, systemic lupus erythematosus, scleroderma, CREST syndrome, Sjogren's syndrome, polymyositis, dermatomyositis, mixed connective tissue disease, relapsing polychondritis, vasculitis, Henoch-Schonlein syndrome, erythema nodosum, polyarteritis nodosa, temporal (giant cell) arteritis, Takayasu's arteritis, Wegener's granulomatosis, Reiter's syndrome, Behcet's syndrome, ankylosing spondylitis, cellulitis, keloids, Ehler Danlos syndrome, Marfan syndrome, pseudoxantoma elasticum, osteogenese imperfecta, chondrodysplasias, epidermolysis bullosa, Alport syndrome, cutis laxa, genetic disorders affecting skeleton, skin and muscles; formation of excessive scar tissue; deposition of pathological amounts of connective tissue in body organs, including kidney, intestines and heart, and in liver by liver cirrhosis, in skin by scleroderma, in lung by lung fibrosis, in bone marrow by leukemia, in blood vessels by atherosclerosis, and in joints by rheumatic diseases. Additional applications relate to diagnosis and to treatment of disorders of cells, tissues and organisms. These aspects of the invention are discussed further below.

[0215] In a preferred embodiment, polynucleotides expressed in a particular tissue type are used to detect, diagnose, treat, prevent and/or prognose disorders associated with the tissue type.

[0216] The polypeptides of the invention may be in monomers or multimers (i.e., dimers, trimers, tetramers and higher multimers). Accordingly, the present invention relates to monomers and multimers of the polypeptides of the invention, their preparation, and compositions (preferably, Therapeutics) containing them. In specific embodiments, the polypeptides of the invention are monomers, dimers, trimers or tetramers. In additional embodiments, the multimers of the invention are at least dimers, at least trimers, or at least tetramers.

[0217] Multimers encompassed by the invention may be homomers or heteromers. As used herein, the term homomer refers to a multimer containing only polypeptides corresponding to a protein of the invention (e.g., the amino acid sequence of SEQ ID NO:Y, an amino acid sequence encoded by SEQ ID NO:X or the complement of SEQ ID NO:X, the amino acid sequence encoded by the portion of SEQ ID NO:X as defined in columns 8 and 9 of Table 2, and/or an amino acid sequence encoded by cDNA contained in Clone ID NO:Z (including fragments, variants, splice variants, and fusion proteins, corresponding to these as described herein)). These homomers may contain polypeptides having identical or different amino acid sequences. In a specific embodiment, a homomer of the invention is a multimer containing only polypeptides having an identical amino acid sequence. In another specific embodiment, a homomer of the invention is a multimer containing polypeptides having different amino acid sequences. In specific embodiments, the multimer of the invention is a homodimer (e.g., containing two polypeptides having identical or different amino acid sequences) or a homotrimer (e.g., containing three polypeptides having identical and/or different amino acid sequences). In additional embodiments, the homomeric multimer of the invention is at least a homodimer, at least a homotrimer, or at least a homotetramer.

[0218] As used herein, the term heteromer refers to a multimer containing two or more heterologous polypeptides (i.e., polypeptides of different proteins) in addition to the polypeptides of the invention. In a specific embodiment, the multimer of the invention is a heterodimer, a heterotrimer, or a heterotetramer. In additional embodiments, the heteromeric multimer of the invention is at least a heterodimer, at least a heterotrimer, or at least a heterotetramer.

[0219] Multimers of the invention may be the result of hydrophobic, hydrophilic, ionic and/or covalent associations and/or may be indirectly linked by, for example, liposome formation. Thus, in one embodiment, multimers of the invention, such as, for example, homodimers or homotrimers, are formed when polypeptides of the invention contact one another in solution. In another embodiment, heteromultimers of the invention, such as, for example, heterotrimers or heterotetramers, are formed when polypeptides of the invention contact antibodies to the polypeptides of the invention (including antibodies to the heterologous polypeptide sequence in a fusion protein of the invention) in solution. In other embodiments, multimers of the invention are formed by covalent associations with and/or between the polypeptides of the invention. Such covalent associations may involve one or more amino acid residues contained in the polypeptide sequence (e.g., that recited in SEQ ID NO:Y, encoded by the portion of SEQ ID NO:X as defined in columns 8 and 9 of Table 2, and/or encoded by the cDNA contained in Clone ID NO:Z). In one instance, the covalent associations are cross-linking between cysteine residues located within the polypeptide sequences which interact in the native (i.e., naturally occurring) polypeptide. In another instance, the covalent associations are the consequence of chemical or recombinant manipulation. Alternatively, such covalent associations may involve one or more amino acid residues contained in the heterologous polypeptide sequence in a fusion protein. In one example, covalent associations are between the heterologous sequence contained in a fusion protein of the invention (see, e.g., U.S. Pat. No. 5,478,925). In a specific example, the covalent associations are between the heterologous sequence contained in a Fc fusion protein of the invention (as described herein). In another specific example, covalent associations of fusion proteins of the invention are between heterologous polypeptide sequence from another protein that is capable of forming covalently associated multimers, such as for example, osteoprotegerin (see, e.g., International Publication NO: WO 98/49305, the contents of which are herein incorporated by reference in its entirety). In another embodiment, two or more polypeptides of the invention are joined through peptide linkers. Examples include those peptide linkers described in U.S. Pat. No. 5,073,627 (hereby incorporated by reference). Proteins comprising multiple polypeptides of the invention separated by peptide linkers may be produced using conventional recombinant DNA technology.

[0220] Another method for preparing multimer polypeptides of the invention involves use of polypeptides of the invention fused to a leucine zipper or isoleucine zipper polypeptide sequence. Leucine zipper and isoleucine zipper domains are polypeptides that promote multimerization of the proteins in which they are found. Leucine zippers were originally identified in several DNA-binding proteins (Landschulz et al., Science 240:1759, (1988)), and have since been found in a variety of different proteins. Among the known leucine zippers are naturally occurring peptides and derivatives thereof that dimerize or trimerize. Examples of leucine zipper domains suitable for producing soluble multimeric proteins of the invention are those described in PCT application WO 94/10308, hereby incorporated by reference. Recombinant fusion proteins comprising a polypeptide of the invention fused to a polypeptide sequence that dimerizes or trimerizes in solution are expressed in suitable host cells, and the resulting soluble multimeric fusion protein is recovered from the culture supematant using techniques known in the art.

[0221] Trimeric polypeptides of the invention may offer the advantage of enhanced biological activity. Preferred leucine zipper moieties and isoleucine moieties are those that preferentially form trimers. One example is a leucine zipper derived from lung surfactant protein D (SPD), as described in Hoppe et al. (FEBS Letters 344:191, (1994)) and in U.S. patent application Ser. No. 08/446,922, hereby incorporated by reference. Other peptides derived from naturally occurring trimeric proteins may be employed in preparing trimeric polypeptides of the invention.

[0222] In another example, proteins of the invention are associated by interactions between Flag® polypeptide sequence contained in fusion proteins of the invention containing Flag® polypeptide sequence. In a further embodiment, proteins of the invention are associated by interactions between heterologous polypeptide sequence contained in Flag® fusion proteins of the invention and anti-Flag® antibody.

[0223] The multimers of the invention may be generated using chemical techniques known in the art. For example, polypeptides desired to be contained in the multimers of the invention may be chemically cross-linked using linker molecules and linker molecule length optimization techniques known in the art (see, e.g., U.S. Pat No. 5,478,925, which is herein incorporated by reference in its entirety). Additionally, multimers of the invention may be generated using techniques known in the art to form one or more inter-molecule cross-links between the cysteine residues located within the sequence of the polypeptides desired to be contained in the multimer (see, e.g., U.S. Pat. No. 5,478,925, which is herein incorporated by reference in its entirety). Further, polypeptides of the invention may be routinely modified by the addition of cysteine or biotin to the C-terminus or N-terminus of the polypeptide and techniques known in the art may be applied to generate multimers containing one or more of these modified polypeptides (see, e.g., U.S. Pat. No. 5,478,925, which is herein incorporated by reference in its entirety). Additionally, techniques known in the art may be applied to generate liposomes containing the polypeptide components desired to be contained in the multimer of the invention (see, e.g., U.S. Pat. No. 5,478,925, which is herein incorporated by reference in its entirety). Alternatively, multimers of the invention may be generated using genetic engineering techniques known in the art. In one embodiment, polypeptides contained in multimers of the invention are produced recombinantly using fusion protein technology described herein or otherwise known in the art (see, e.g., U.S. Pat. No. 5,478,925, which is herein incorporated by reference in its entirety). In a specific embodiment, polynucleotides coding for a homodimer of the invention are generated by ligating a polynucleotide sequence encoding a polypeptide of the invention to a sequence encoding a linker polypeptide and then further to a synthetic polynucleotide encoding the translated product of the polypeptide in the reverse orientation from the original C-terminus to the N-terminus (lacking the leader sequence) (see, e.g., U.S Pat. No. 5,478,925, which is herein incorporated by reference in its entirety). In another embodiment, recombinant techniques described herein or otherwise known in the art are applied to generate recombinant polypeptides of the invention which contain a transmembrane domain (or hydrophobic or signal peptide) and which can be incorporated by membrane reconstitution techniques into liposomes (see, e.g., U.S. Pat. No. 5,478,925, which is herein incorporated by reference in its entirety).

[0224] Antibodies

[0225] Further polypeptides of the invention relate to antibodies and T-cell antigen receptors (TCR) which immunospecifically bind a polypeptide, polypeptide fragment, or variant of the invention (e.g., a polypeptide or fragment or variant of the amino acid sequence of SEQ ID NO:Y or a polypeptide encoded by the cDNA contained in Clone ID NO:Z, and/or an epitope, of the present invention) as determined by immunoassays well known in the art for assaying specific antibody-antigen binding. Antibodies of the invention include, but are not limited to, polyclonal, monoclonal, multispecific, human, humanized or chimeric antibodies, single chain antibodies, Fab fragments, F(ab′) fragments, fragments produced by a Fab expression library, anti-idiotypic (anti-Id) antibodies (including, e.g., anti-Id antibodies to antibodies of the invention), intracellularly-made antibodies (i.e., intrabodies), and epitope-binding fragments of any of the above. The term “antibody,” as used herein, refers to immunoglobulin molecules and immunologically active portions of immunoglobulin molecules, i.e., molecules that contain an antigen binding site that immunospecifically binds an antigen. The immunoglobulin molecules of the invention can be of any type (e.g., IgG, IgE, IgM, IgD, IgA and IgY), class (e.g., IgG1, IgG2, IgG3, IgG4, IgA1 and IgA2) or subclass of immunoglobulin molecule. In preferred embodiments, the immunoglobulin molecules of the invention are IgG1. In other preferred embodiments, the immunoglobulin molecules of the invention are IgG4.

[0226] Most preferably the antibodies are human antigen-binding antibody fragments of the present invention and include, but are not limited to, Fab, Fab′ and F(ab′)2, Fd, single-chain Fvs (scFv), single-chain antibodies, disulfide-linked Fvs (sdFv) and fragments comprising either a VL or VH domain. Antigen-binding antibody fragments, including single-chain antibodies, may comprise the variable region(s) alone or in combination with the entirety or a portion of the following: hinge region, CH1, CH2, and CH3 domains. Also included in the invention are antigen-binding fragments also comprising any combination of variable region(s) with a hinge region, CH1, CH2, and CH3 domains. The antibodies of the invention may be from any animal origin including birds and mammals. Preferably, the antibodies are human, murine (e.g., mouse and rat), donkey, ship rabbit, goat, guinea pig, camel, horse, or chicken. As used herein, “human” antibodies include antibodies having the amino acid sequence of a human immunoglobulin and include antibodies isolated from human immunoglobulin libraries or from animals transgenic for one or more human immunoglobulin and that do not express endogenous immunoglobulins, as described infra and, for example in, U.S. Pat. No. 5,939,598 by Kucherlapati et al.

[0227] The antibodies of the present invention may be monospecific, bispecific, trispecific or of greater multispecificity. Multispecific antibodies may be specific for different epitopes of a polypeptide of the present invention or may be specific for both a polypeptide of the present invention as well as for a heterologous epitope, such as a heterologous polypeptide or solid support material. See, e.g., PCT publications WO 93/17715; WO 92/08802; WO 91/00360; WO 92/05793; Tutt, et al., J. Immunol. 147:60-69 (1991); U.S. Pat. Nos. 4,474,893; 4,714,681; 4,925,648; 5,573,920; 5,601,819; Kostelny et al., J. Immunol. 148:1547-1553 (1992).

[0228] Antibodies of the present invention may be described or specified in terms of the epitope(s) or portion(s) of a polypeptide of the present invention which they recognize or specifically bind. The epitope(s) or polypeptide portion(s) may be specified as described herein, e.g., by N-terminal and C-terminal positions, or by size in contiguous amino acid residues, or listed in the Tables and Figures. Preferred epitopes of the invention include those shown in column 6 of Table 1A, as well as polynucleotides that encode these epitopes. Antibodies, which specifically bind any epitope or polypeptide of the present invention may also be excluded. Therefore, the present invention includes antibodies that specifically bind polypeptides of the present invention, and allows for the exclusion of the same.

[0229] Antibodies of the present invention may also be described or specified in terms of their cross-reactivity. Antibodies that do not bind any other analog, ortholog, or homolog of a polypeptide of the present invention are included. Antibodies that bind polypeptides with at least 95%, at least 90%, at least 85%, at least 80%, at least 75%, at least 70%, at least 65%, at least 60%, at least 55%, and at least 50% identity (as calculated using methods known in the art and described herein) to a polypeptide of the present invention are also included in the present invention. In specific embodiments, antibodies of the present invention cross-react with murine, rat and/or rabbit homologs of human proteins and the corresponding epitopes thereof. Antibodies that do not bind polypeptides with less than 95%, less than 90%, less than 85%, less than 80%, less than 75%, less than 70%, less than 65%, less than 60%, less than 55%, and less than 50% identity (as calculated using methods known in the art and described herein) to a polypeptide of the present invention are also included in the present invention. In a specific embodiment, the above-described cross-reactivity is with respect to any single specific antigenic or immunogenic polypeptide, or combination(s) of 2, 3, 4, 5, or more of the specific antigenic and/or immunogenic polypeptides disclosed herein. Further included in the present invention are antibodies which bind polypeptides encoded by polynucleotides which hybridize to a polynucleotide of the present invention under stringent hybridization conditions (as described herein). Antibodies of the present invention may also be described or specified in terms of their binding affinity to a polypeptide of the invention. Preferred binding affinities include those with a dissociation constant or Kd less than 5×10⁻² M, 10⁻² M, 5×10⁻³ M, 10⁻³ M, 5×10⁻⁴ M, 10⁻⁴ M, 5×10⁻⁵ M, 10⁻⁵ M, 5×10⁻⁶ M, 10⁻⁶M, 5×10⁻⁷ M, 10⁷ M, 5×10⁻⁸ M, 10⁻⁸ M, 5×10⁻⁹ M, 10⁻⁹ M, 5×10⁻¹⁰ M, 10⁻¹⁰ M, 5×10⁻¹¹ M, 10⁻¹¹ M, 5×10⁻¹² M, 10⁻¹² M, 5×10⁻¹³ M, 10⁻¹³ M, 5×10⁻¹⁴ M, 10⁻¹⁴ M, 5×10⁻¹⁵ M, or 10⁻¹⁵ M.

[0230] The invention also provides antibodies that competitively inhibit binding of an antibody to an epitope of the invention as determined by any method known in the art for determining competitive binding, for example, the immunoassays described herei-n. In preferred embodiments, the antibody competitively inhibits binding to the epitope by at least 95%, at least 90%, at least 85%, at least 80%, at least 75%, at least 70%, at least 60%, or at least 50%.

[0231] Antibodies of the present invention may act as agonists or antagonists of the polypeptides of the present invention. For example, the present invention includes antibodies which disrupt the receptor/ligand interactions with the polypeptides of the invention either partially or fully. Preferably, antibodies of the present invention bind an antigenic epitope disclosed herein, or a portion thereof. The invention features both receptor-specific antibodies and ligand-specific antibodies. The invention also features receptor-specific antibodies, which do not prevent ligand binding but prevent receptor activation. Receptor activation (i.e., signaling) may be determined by techniques described herein or otherwise known in the art. For example, receptor activation can be determined by detecting the phosphorylation (e.g., tyrosine or serine/threonine) of the receptor or its substrate by immunoprecipitation followed by western blot analysis (for example, as described supra). In specific embodiments, antibodies are provided that inhibit ligand activity or receptor activity by at least 95%, at least 90%, at least 85%, at least 80%, at least 75%, at least 70%, at least 60%, or at least 50% of the activity in absence of the antibody.

[0232] The invention also features receptor-specific antibodies which both prevent ligand binding and receptor activation as well as antibodies that recognize the receptor-ligand complex, and, preferably, do not specifically recognize the unbound receptor or the unbound ligand. Likewise, included in the invention are neutralizing antibodies which bind the ligand and prevent binding of the ligand to the receptor, as well as antibodies which bind the ligand, thereby preventing receptor activation, but do not prevent the ligand from binding the receptor. Further included in the invention are antibodies, which activate the receptor. These antibodies may act as receptor agonists, i.e., potentiate or activate either all or a subset of the biological activities of the ligand-mediated receptor activation, for example, by inducing dimerization of the receptor. The antibodies may be specified as agonists, antagonists or inverse agonists for biological activities comprising the specific biological activities of the peptides of the invention disclosed herein. The above antibody agonists can be made using methods known in the art. See, e.g., PCT publication WO 96/40281; U.S. Pat. No. 5,811,097; Deng et al., Blood 92(6):1981-1988 (1998); Chen et al., Cancer Res. 58(16):3668-3678 (1998); Harrop et al., J. Immunol. 161(4):1786-1794 (1998); Zhu et al., Cancer Res. 58(15):3209-3214 (1998); Yoon et al., J. Immunol. 160(7):3170-3179 (1998); Prat et al., J. Cell. Sci. 1l (Pt2):237-247 (1998); Pitard et al., J. Immunol. Methods 205(2):177-190 (1997); Liautard et al., Cytokine 9(4):233-241 (1997); Carlson et al., J. Biol. Chem. 272(17):11295-11301 (1997); Taryman et al., Neuron 14(4):755-762 (1995); Muller et al., Structure 6(9):1153-1167 (1998); Bartunek et al., Cytokine 8(1):14-20 (1996) (which are all incorporated by reference herein in their entireties).

[0233] Antibodies of the present invention may be used, for example, to purify, detect, and target the polypeptides of the present invention, including both in vitro and in vivo diagnostic and therapeutic methods. For example, the antibodies have utility in immunoassays for qualitatively and quantitatively measuring levels of the polypeptides of the present invention in biological samples. See, e.g., Harlow et al., Antibodies: A Laboratory Manual, (Cold Spring Harbor Laboratory Press, 2nd ed. 1988); incorporated by reference herein in its entirety.

[0234] As discussed in more detail below, the antibodies of the present invention may be used either alone or in combination with other compositions. The antibodies may further be recombinantly fused to a heterologous polypeptide at the N- or C-terminus or chemically conjugated (including covalent and non-covalent conjugations) to polypeptides or other compositions. For example, antibodies of the present invention may be recombinantly fused or conjugated to molecules useful as labels in detection assays and effector molecules such as heterologous polypeptides, drugs, radionuclides, or toxins. See, e.g., PCT publications WO 92/08495; WO 91/14438; WO 89/12624; U.S. Pat. No. 5,314,995; and EP 396,387; the disclosures of which are incorporated herein by reference in their entireties.

[0235] The antibodies of the invention include derivatives that are modified, i.e., by the covalent attachment of any type of molecule to the antibody such that covalent attachment does not prevent the antibody from generating an anti-idiotypic response. For example, but not by way of limitation, the antibody derivatives include antibodies that have been modified, e.g., by glycosylation, acetylation, pegylation, phosphylation, amidation, derivatization by known protecting/blocking groups, proteolytic cleavage, linkage to a cellular ligand or other protein, etc. Any of numerous chemical modifications may be carried out by known techniques, including, but not limited to specific chemical cleavage, acetylation, formylation, metabolic synthesis of tunicamycin, etc. Additionally, the derivative may contain one or more non-classical amino acids.

[0236] The antibodies of the present invention may be generated by any suitable method known in the art. Polyclonal antibodies to an antigen-of-interest can be produced by various procedures well known in the art. For example, a polypeptide of the invention can be administered to various host animals including, but not limited to, rabbits, mice, rats, etc. to induce the production of sera containing polyclonal antibodies specific for the antigen. Various adjuvants may be used to increase the immunological response, depending on the host species, and include but are not limited to, Freund's (complete and incomplete), mineral gels such as aluminum hydroxide, surface active substances such as lysolecithin, pluronic polyols, polyanions, peptides, oil emulsions, keyhole limpet hemocyanins, dinitrophenol, and potentially useful human adjuvants such as BCG (bacille Calmette-Guerin) and corynebacterium parvum. Such adjuvants are also well known in the art.

[0237] Monoclonal antibodies can be prepared using a wide variety of techniques known in the art including the use of hybridoma, recombinant, and phage display technologies, or a combination thereof. For example, monoclonal antibodies can be produced using hybridoma techniques including those known in the art and taught, for example, in Harlow et al., Antibodies: A Laboratory Manual, (Cold Spring Harbor Laboratory Press, 2nd ed. 1988); Hammerling, et al., in: Monoclonal Antibodies and T-Cell Hybridomas 563-681 (Elsevier, N.Y., 1981) (said references incorporated by reference in their entireties). The term “monoclonal antibody” as used herein is not limited to antibodies produced through hybridoma technology. The term “monoclonal antibody” refers to an antibody that is derived from a single clone, including any eukaryotic, prokaryotic, or phage clone, and not the method by which it is produced.

[0238] Methods for producing and screening for specific antibodies using hybridoma technology are routine and well known in the art and are discussed in detail in the Examples. In a non-limiting example, mice can be immunized with a polypeptide of the invention or a cell expressing such peptide. Once an immune response is detected, e.g., antibodies specific for the antigen are detected in the mouse serum, the mouse spleen is harvested and splenocytes isolated. The splenocytes are then fused by well known techniques to any suitable myeloma cells, for example cells from cell line SP20 available from the ATCC. Hybridomas are selected and cloned by limited dilution. The hybridoma clones are then assayed by methods known in the art for cells that secrete antibodies capable of binding a polypeptide of the invention. Ascites fluid, which generally contains high levels of antibodies, can be generated by immunizing mice with positive hybridoma clones.

[0239] Accordingly, the present invention provides methods of generating monoclonal antibodies as well as antibodies produced by the method comprising culturing a hybridoma cell secreting an antibody of the invention wherein, preferably, the hybridoma is generated by fusing splenocytes isolated from a mouse immunized with an antigen of the invention with myeloma cells and then screening the hybridomas resulting from the fusion for hybridoma clones that secrete an antibody able to bind a polypeptide of the invention.

[0240] Another well known method for producing both polyclonal and monoclonal human B cell lines is transformation using Epstein Barr Virus (EBV). Protocols for generating EBV-transformed B cell lines are commonly known in the art, such as, for example, the protocol outlined in Chapter 7.22 of Current Protocols in Immunology, Coligan et al., Eds., 1994, John Wiley & Sons, NY, which is hereby incorporated in its entirety by reference herein. The source of B cells for transformation is commonly human peripheral blood, but B cells for transformation may also be derived from other sources including, but not limited to, lymph nodes, tonsil, spleen, tumor tissue, and infected tissues. Tissues are generally made into single cell suspensions prior to EBV transformation. Additionally, steps may be taken to either physically remove or inactivate T cells (e.g., by treatment with cyclosporin A) in B cell-containing samples, because T cells from individuals seropositive for anti-EBV antibodies can suppress B cell immortalization by EBV.

[0241] In general, the sample containing human B cells is innoculated with EBV, and cultured for 3-4 weeks. A typical source of EBV is the culture supernatant of the B95-8 cell line (ATCC #VR-1492). Physical signs of EBV transformation can generally be seen towards the end of the 3-4 week culture period. By phase-contrast microscopy, transformed cells may appear large, clear, hairy and tend to aggregate in tight clusters of cells. Initially, EBV lines are generally polyclonal. However, over prolonged periods of cell cultures, EBV lines may become monoclonal or polyclonal as a result of the selective outgrowth of particular B cell clones. Alternatively, polyclonal EBV transformed lines may be subcloned (e.g., by limiting dilution culture) or fused with a suitable fusion partner and plated at limiting dilution to obtain monoclonal B cell lines. Suitable fusion partners for EBV transformed cell lines include mouse myeloma cell lines (e.g., SP2/0, X63-Ag8.653), heteromyeloma cell lines (human x mouse; e.g, SPAM-8, SBC-H20, and CB-F7), and human cell lines (e.g., GM 1500, SKO-007, RPMI 8226, and KR-4). Thus, the present invention also provides a method of generating polyclonal or monoclonal human antibodies against polypeptides of the invention or fragments thereof, comprising EBV-transformation of human B cells.

[0242] Antibody fragments, which recognize specific epitopes may be generated by known techniques. For example, Fab and F(ab′)2 fragments of the invention may be produced by proteolytic cleavage of immunoglobulin molecules, using enzymes such as papain (to produce Fab fragments) or pepsin (to produce F(ab′)2 fragments). F(ab′)2 fragments contain the variable region, the light chain constant region and the CH1 domain of the heavy chain. For example, the antibodies of the present invention can also be generated using various phage display methods known in the art and as discussed in detail in the Examples (e.g., Example 10). In phage display methods, functional antibody domains are displayed on the surface of phage particles, which carry the polynucleotide sequences encoding them. In a particular embodiment, such phage can be utilized to display antigen binding domains expressed from a repertoire or combinatorial antibody library (e.g., human or murine). Phage expressing an antigen binding domain that binds the antigen of interest can be selected or identified with antigen, e.g., using labeled antigen or antigen bound or captured to a solid surface or bead. Phage used in these methods are typically filamentous phage including fd and M13 binding domains expressed from phage with Fab, Fv or disulfide stabilized Fv antibody domains recombinantly fused to either the phage gene III or gene VII protein. Examples of phage display methods that can be used to make the antibodies of the present invention include those disclosed in Brinkman et al., J. Immunol. Methods 182:41-50 (1995); Ames et al., J. Immunol. Methods 184:177-186 (1995); Kettleborough et al., Eur. J. Immunol. 24:952-958 (1994); Persic et al., Gene 187 9-18 (1997); Burton et al., Advances in Immunology 57:191-280 (1994); PCT application No. PCT/GB91/01134; PCT publications WO 90/02809; WO 91/10737; WO 92/01047; WO 92/18619; WO 93/11236; WO 95/15982; WO 95/20401; and U.S. Pat. Nos. 5,698,426; 5,223,409; 5,403,484; 5,580,717; 5,427,908; 5,750,753; 5,821,047; 5,571,698; 5,427,908; 5,516,637; 5,780,225; 5,658,727; 5,733,743 and 5,969,108; each of which is incorporated herein by reference in its entirety.

[0243] As described in the above references, after phage selection, the antibody coding regions from the phage can be isolated and used to generate whole antibodies, including human antibodies, or any other desired antigen binding fragment, and expressed in any desired host, including mammalian cells, insect cells, plant cells, yeast, and bacteria, e.g., as described in detail below. For example, techniques to recombinantly produce Fab, Fab′ and F(ab′)2 fragments can also be employed using methods known in the art such as those disclosed in PCT publication WO 92/22324; Mullinax et al., BioTechniques 12(6):864-869 (1992); and Sawai et al., AJRI 34:26-34 (1995); and Better et al., Science 240:1041-1043 (1988) (said references incorporated by reference in their entireties).

[0244] Examples of techniques which can be used to produce single-chain Fvs and antibodies include those described in U.S. Pat. Nos. 4,946,778 and 5,258,498; Huston et al., Methods in Enzymology 203:46-88 (1991); Shu et al., PNAS 90:7995-7999 (1993); and Skerra et al., Science 240:1038-1040 (1988). For some uses, including in vivo use of antibodies in humans and in vitro detection assays, it may be preferable to use chimeric, humanized, or human antibodies. A chimeric antibody is a molecule in which different portions of the antibody are derived from different animal species, such as antibodies having a variable region derived from a murine monoclonal antibody and a human immunoglobulin constant region. Methods for producing chimeric antibodies are known in the art. See e.g., Morrison, Science 229:1202 (1985); Oi et al., BioTechniques 4:214 (1986); Gillies et al., (1989) J. Immunol. Methods 125:191-202; U.S. Pat. Nos. 5,807,715; 4,816,567; and 4,816397, which are incorporated herein by reference in their entirety. Humanized antibodies are antibody molecules from non-human species antibody that binds the desired antigen having one or more complementarity determining regions (CDRs) from the non-human species and a framework regions from a human immunoglobulin molecule. Often, framework residues in the human framework regions will be substituted with the corresponding residue from the CDR donor antibody to alter, preferably improve, antigen binding. These framework substitutions are identified by methods well known in the art, e.g., by modeling of the interactions of the CDR and framework residues to identify framework residues important for antigen binding and sequence comparison to identify unusual framework residues at particular positions. (See, e.g., Queen et al., U.S. Pat. No. 5,585,089; Riechmann et al., Nature 332:323 (1988), which are incorporated herein by reference in their entireties.) Antibodies can be humanized using a variety of techniques known in the art including, for example, CDR-grafting (EP 239,400; PCT publication WO 91/09967; U.S. Pat. Nos. 5,225,539; 5,530,101; and 5,585,089), veneering or resurfacing (EP 592,106; EP 519,596; Padlan, Molecular Immunology 28(4/5):489-498 (1991); Studnicka et al., Protein Engineering 7(6):805-814 (1994); Roguska. et al., PNAS 91:969-973 (1994)), and chain shuffling (U.S. Pat. No. 5,565,332).

[0245] Completely human antibodies are particularly desirable for therapeutic treatment of human patients. Human antibodies can be made by a variety of methods known in the art including phage display methods described above using antibody libraries derived from human immunoglobulin sequences. See also, U.S. Pat. Nos. 4,444,887 and 4,716,111; and PCT publications WO 98/46645, WO 98/50433, WO 98/24893, WO 98/16654, WO 96/34096, WO 96/33735, and WO 91/10741; each of which is incorporated herein by reference in its entirety.

[0246] Human antibodies can also be produced using transgenic mice which are incapable of expressing functional endogenous immunoglobulins, but which can express human immunoglobulin genes. For example, the human heavy and light chain immunoglobulin gene complexes may be introduced randomly or by homologous recombination into mouse embryonic stem cells. Alternatively, the human variable region, constant region, and diversity region may be introduced into mouse embryonic stem cells in addition to the human heavy and light chain genes. The mouse heavy and light chain immunoglobulin genes may be rendered non-functional separately or simultaneously with the introduction of human immunoglobulin loci by homologous recombination. In particular, homozygous deletion of the JH region prevents endogenous antibody production. The modified embryonic stem cells are expanded and microinjected into blastocysts to produce chimeric mice. The chimeric mice are then bred to produce homozygous offspring, which express human antibodies. The transgenic mice are immunized in the normal fashion with a selected antigen, e.g., all or a portion of a polypeptide of the invention. Monoclonal antibodies directed against the antigen can be obtained from the immunized, transgenic mice using conventional hybridoma technology. The human immunoglobulin transgenes harbored by the transgenic mice rearrange during B cell differentiation, and subsequently undergo class switching and somatic mutation. Thus, using such a technique, it is possible to produce therapeutically useful IgG, IgA, IgM and IgE antibodies. For an overview of this technology for producing human antibodies, see Lonberg and Huszar, Int. Rev. Immunol. 13:65-93 (1995). For a detailed discussion of this technology for producing human antibodies and human monoclonal antibodies and protocols for producing such antibodies, see, e.g., PCT publications WO 98/24893; WO 92/01047; WO 96/34096; WO 96/33735; European Patent No. 0 598 877; U.S. Pat. Nos. 5,413,923; 5,625,126; 5,633,425; 5,569,825; 5,661,016; 5,545,806; 5,814,318; 5,885,793; 5,916,771; 5,939,598; 6,075,181 and 6,114,598, which are incorporated by reference herein in their entirety. In addition, companies such as Abgenix, Inc. (Freemont, Calif.) and Genpharm (San Jose, Calif.) can be engaged to provide human antibodies directed against a selected antigen using technology similar to that described above.

[0247] Completely human antibodies which recognize a selected epitope can be generated using a technique referred to as “guided selection.” In this approach a selected non-human monoclonal antibody, e.g., a mouse antibody, is used to guide the selection of a completely human antibody recognizing the same epitope. (Jespers et al., Bio/technology 12:899-903 (1988)).

[0248] Further, antibodies to the polypeptides of the invention can, in turn, be utilized to generate anti-idiotype antibodies that “mimic” polypeptides of the invention using techniques well known to those skilled in the art. (See, e.g., Greenspan & Bona, FASEB J. 7(5):437-444; (1989) and Nissinoff, J. Inmunol. 147(8):2429-2438 (1991)). For example, antibodies which bind to and competitively inhibit polypeptide multimerization and/or binding of a polypeptide of the invention to a ligand can be used to generate anti-idiotypes that “mimic” the polypeptide multimerization and/or binding domain and, as a consequence, bind to and neutralize polypeptide and/or its ligand. Such neutralizing anti-idiotypes or Fab fragments of such anti-idiotypes can be used in therapeutic regimens to neutralize polypeptide ligand/receptor. For example, such anti-idiotypic antibodies can be used to bind a polypeptide of the invention and/or to bind its ligand(s)/receptor(s), and thereby block its biological activity. Alternatively, antibodies which bind to and enhance polypeptide multimerization and/or binding, and/or receptor/ligand multimerization, binding and/or signaling can be used to generate anti-idiotypes that function as agonists of a polypeptide of the invention and/or its ligand/receptor. Such agonistic anti-idiotypes or Fab fragments of such anti-idiotypes can be used in therapeutic regimens as agonists of the polypeptides of the invention or its ligand(s)/receptor(s). For example, such anti-idiotypic antibodies can be used to bind a polypeptide of the invention and/or to bind its ligand(s)/receptor(s), and thereby promote or enhance its biological activity.

[0249] Intrabodies of the invention can be produced using methods known in the art, such as those disclosed and reviewed in Chen et al., Hum. Gene Ther. 5:595-601 (1994); Marasco, W.A., Gene Ther. 4:11-15 (1997); Rondon and Marasco, Annu. Rev. Microbiol. 51:257-283 (1997); Proba et al., J. Mol. Biol. 275:245-253 (1998); Cohen et al., Oncogene 17:2445-2456 (1998); Ohage and Steipe, J. Mol. Biol. 291:1119-1128 (1999); Ohage et al., J. Mol. Biol. 291:1129-1134 (1999); Wirtz and Steipe, Protein Sci. 8:2245-2250 (1999); Zhu et al., J. Immunol. Methods 231:207-222 (1999); and references cited therein.

[0250] Polynucleotides Encoding Antibodies

[0251] The invention further provides polynucleotides comprising a nucleotide sequence encoding an antibody of the invention and fragments thereof. The invention also encompasses polynucleotides that hybridize under stringent or alternatively, under lower stringency hybridization conditions, e.g., as defined supra, to polynucleotides that encode an antibody, preferably, that specifically binds to a polypeptide of the invention, preferably, an antibody that binds to a polypeptide having the amino acid sequence of SEQ ID NO:Y, to a polypeptide encoded by a portion of SEQ ID NO:X as defined in columns 8 and 9 of Table 2, and/or to a polypeptide encoded by the cDNA contained in Clone ID NO:Z.

[0252] The polynucleotides may be obtained, and the nucleotide sequence of the polynucleotides determined, by any method known in the art. For example, if the nucleotide sequence of the antibody is known, a polynucleotide encoding the antibody may be assembled from chemically synthesized oligonucleotides (e.g., as described in Kutmeier et al., BioTechniques 17:242 (1994)), which, briefly, involves the synthesis of overlapping oligonucleotides containing portions of the sequence encoding the antibody, annealing and ligating of those oligonucleotides, and then amplification of the ligated oligonucleotides by PCR.

[0253] Alternatively, a polynucleotide encoding an antibody may be generated from nucleic acid from a suitable source. If a clone containing a nucleic acid encoding a particular antibody is not available, but the sequence of the antibody molecule is known, a nucleic acid encoding the immunoglobulin may be chemically synthesized or obtained from a suitable source (e.g., an antibody cDNA library, or a cDNA library generated from, or nucleic acid, preferably poly A+RNA, isolated from, any tissue or cells * expressing the antibody, such as hybridoma cells selected to express an antibody of the invention) by PCR amplification using synthetic primers hybridizable to the 3′ and 5′ ends of the sequence or by cloning using an oligonucleotide probe specific for the particular gene sequence to identify, e.g., a cDNA clone from a cDNA library that encodes the antibody. Amplified nucleic acids generated by PCR may then be cloned into replicable cloning vectors using any method well known in the art.

[0254] Once the nucleotide sequence and corresponding amino acid sequence of the antibody is determined, the nucleotide sequence of the antibody may be manipulated using methods well known in the art for the manipulation of nucleotide sequences, e.g., recombinant DNA techniques, site directed mutagenesis, PCR, etc. (see, for example, the techniques described in Sambrook et al., 1990, Molecular Cloning, A Laboratory Manual, 2d Ed., Cold Spring Harbor Laboratory, Cold Spring Harbor, N.Y. and Ausubel et al., eds., 1998, Current Protocols in Molecular Biology, John Wiley & Sons, NY, which are both incorporated by reference herein in their entireties ), to generate antibodies having a different amino acid sequence, for example to create amino acid substitutions, deletions, and/or insertions.

[0255] In a specific embodiment, the amino acid sequence of the heavy and/or light chain variable domains may be inspected to identify the sequences of the complementarity determining regions (CDRs) by methods that are well know in the art, e.g., by comparison to known amino acid sequences of other heavy and light chain variable regions to determine the regions of sequence hypervariability. Using routine recombinant DNA techniques, one or more of the CDRs may be inserted within framework regions, e.g., into human framework regions to humanize a non-human antibody, as described supra. The framework regions may be naturally occurring or consensus framework regions, and preferably human framework regions (see, e.g., Chothia et al., J. Mol. Biol. 278: 457-479 (1998) for a listing of human framework regions). Preferably, the polynucleotide generated by the combination of the framework regions and CDRs encodes an antibody that specifically binds a polypeptide of the invention. Preferably, as discussed supra, one or more amino acid substitutions may be made within the framework regions, and, preferably, the amino acid substitutions improve binding of the antibody to its antigen. Additionally, such methods may be used to make amino acid substitutions or deletions of one or more variable region cysteine residues participating in an intrachain disulfide bond to generate antibody molecules lacking one or more intrachain disulfide bonds. Other alterations to the polynucleotide are encompassed by the present invention and within the skill of the art.

[0256] In addition, techniques developed for the production of “chimeric antibodies” (Morrison et al., Proc. Natl. Acad. Sci. 81:851-855 (1984); Neuberger et al., Nature 312:604-608 (1984); Takeda et al., Nature 314:452-454 (1985)) by splicing genes from a mouse antibody molecule of appropriate antigen specificity together with genes from a human antibody molecule of appropriate biological activity can be used. As described supra, a chimeric antibody is a molecule in which different portions are derived from different animal species, such as those having a variable region derived from a murine nmAb and a human immunoglobulin constant region, e.g., humanized antibodies.

[0257] Alternatively, techniques described for the production of single chain antibodies (U.S. Pat. No. 4,946,778; Bird, Science 242:423-42 (1988); Huston et al., Proc Natl. Acad. Sci. USA 85:5879-5883 (1988); and Ward et al., Nature 334:544-54 (1989)) can be adapted to produce single chain antibodies. Single chain antibodies are formed by linking the heavy and light chain fragments of the Fv region via an amino acid bridge, resulting in a single chain polypeptide. Techniques for the assembly of functional Fv fragments in E. coli may also be used (Skerra et al., Science 242:1038-1041 (1988)).

[0258] Methods of Producing Antibodies

[0259] The antibodies of the invention can be produced by any method known in the art for the synthesis of antibodies, in particular, by chemical synthesis or preferably, by recombinant expression techniques. Methods of producing antibodies include, but are not limited to, hybridoma technology, EBV transformation, and other methods discussed herein as well as through the use recombinant DNA technology, as discussed below.

[0260] Recombinant expression of an antibody of the invention, or fragment, derivative or analog thereof, (e.g., a heavy or light chain of an antibody of the invention or a single chain antibody of the invention), requires construction of an expression vector containing a polynucleotide that encodes the antibody. Once a polynucleotide encoding an antibody molecule or a heavy or light chain of an antibody, or portion thereof (preferably containing the heavy or light chain variable domain), of the invention has been obtained, the vector for the production of the antibody molecule may be produced by recombinant DNA technology using techniques well known in the art. Thus, methods for preparing a protein by expressing a polynucleotide containing an antibody encoding nucleotide sequence are described herein. Methods which are well known to those skilled in the art can be used to construct expression vectors containing antibody coding sequences and appropriate transcriptional and translational control signals. These methods include, for example, in vitro recombinant DNA techniques, synthetic techniques, and in vivo genetic recombination. The invention, thus, provides replicable vectors comprising a nucleotide sequence encoding an antibody molecule of the invention, or a heavy or light chain thereof, or a heavy or light chain variable domain, operably linked to a promoter. Such vectors may include the nucleotide sequence encoding the constant region of the antibody molecule (see, e.g., PCT Publication WO 86/05807; PCT Publication WO 89/01036; and U.S. Pat. No. 5,122,464) and the variable domain of the antibody may be cloned into such a vector for expression of the entire heavy or light chain.

[0261] The expression vector is transferred to a host cell by conventional techniques and the transfected cells are then cultured by conventional techniques to produce an antibody of the invention. Thus, the invention includes host cells containing a polynucleotide encoding an antibody of the invention, or a heavy or light chain thereof, or a single chain antibody of the invention, operably linked to a heterologous promoter. In preferred embodiments for the expression of double-chained antibodies, vectors encoding both the heavy and light chains may be co-expressed in the host cell for expression of the entire immunoglobulin molecule, as detailed below.

[0262] A variety of host-expression vector systems may be utilized to express the antibody molecules of the invention. Such host-expression systems represent vehicles by which the coding sequences of interest may be produced and subsequently purified, but also represent cells which may, when transformed or transfected with the appropriate nucleotide coding sequences, express an antibody molecule of the invention in situ. These include but are not limited to microorganisms such as bacteria (e.g., E. coli, B. subtilis) transformed with recombinant bacteriophage DNA, plasmid DNA or cosmid DNA expression vectors containing antibody coding sequences; yeast (e.g., Saccharomyces, Pichia) transformed with recombinant yeast expression vectors containing antibody coding sequences; insect cell systems infected with recombinant virus expression vectors (e.g., baculovirus) containing antibody coding sequences; plant cell systems infected with recombinant virus expression vectors (e.g., cauliflower mosaic virus, CaMV; tobacco mosaic virus, TMV) or transformed with recombinant plasmid expression vectors (e.g., Ti plasmid) containing antibody coding sequences; or mammalian cell systems (e.g., COS, CHO, BHK, 293, 3T3 cells) harboring recombinant expression constructs containing promoters derived from the genome of mammalian cells (e.g., metallothionein promoter) or from mammalian viruses (e.g., the adenovirus late promoter; the vaccinia virus 7.5K promoter). Preferably, bacterial cells such as Escherichia coli, and more preferably, eukaryotic cells, especially for the expression of whole recombinant antibody molecule, are used for the expression of a recombinant antibody molecule. For example, mammalian cells such as Chinese hamster ovary cells (CHO), in conjunction with a vector such as the major intermediate early gene promoter element from human cytomegalovirus is an effective expression system for antibodies (Foecking et al., Gene 45:101 (1986); Cockett et al., Bio/Technology 8:2 (1990)).

[0263] In bacterial systems, a number of expression vectors may be advantageously selected depending upon the use intended for the antibody molecule being expressed. For example, when a large quantity of such a protein is to be produced, for the generation of pharmaceutical compositions of an antibody molecule, vectors which direct the expression of high levels of fusion protein products that are readily purified may be desirable. Such vectors include, but are not limited, to the E. coli expression vector pUR278 (Ruther et al., EMBO J. 2:1791 (1983)), in which the antibody coding sequence may be ligated individually into the vector in frame with the lac Z coding region so that a fusion protein is produced; pIN vectors (Inouye & Inouye, Nucleic Acids Res. 13:3101-3109 (1985); Van Heeke & Schuster, J. Biol. Chem. 24:5503-5509 (1989)); and the like. pGEX vectors may also be used to express foreign polypeptides as fusion proteins with glutathione S-transferase (GST). In general, such fusion proteins are soluble and can easily be purified from lysed cells by adsorption and binding to matrix glutathione-agarose beads followed by elution in the presence of free glutathione. The pGEX vectors are designed to include thrombin or factor Xa protease cleavage sites so that the cloned target gene product can be released from the GST moiety.

[0264] In an insect system, Autographa califomica nuclear polyhedrosis virus (AcNPV) is used as a vector to express foreign genes. The virus grows in Spodoptera frugiperda cells. The antibody coding sequence may be cloned individually into non-essential regions (for example the polyhedrin gene) of the virus and placed under control of an AcNPV promoter (for example the polyhedrin promoter).

[0265] In mammalian host cells, a number of viral-based expression systems may be utilized. In cases where an adenovirus is used as an expression vector, the antibody coding sequence of interest may be ligated to an adenovirus transcription/translation control complex, e.g., the late promoter and tripartite leader sequence. This chimeric gene may then be inserted in the adenovirus genome by in vitro or in vivo recombination. Insertion in a non-essential region of the viral genome (e.g., region E1 or E3) will result in a recombinant virus that is viable and capable of expressing the antibody molecule in infected hosts. (e.g., see Logan & Shenk, Proc. Natl. Acad. Sci. USA 81:355-359 (1984)). Specific initiation signals may also be required for efficient translation of inserted antibody coding sequences. These signals include the ATG initiation codon and adjacent sequences. Furthermore, the initiation codon must be in phase with the reading frame of the desired coding sequence to ensure translation of the entire insert. These exogenous translational control signals and initiation codons can be of a variety of origins, both natural and synthetic. The efficiency of expression may be enhanced by the inclusion of appropriate transcription enhancer elements, transcription terminators, etc. (see Bittner et al., Methods in Enzymol. 153:51-544 (1987)).

[0266] In addition, a host cell strain may be chosen which modulates the expression of the inserted sequences, or modifies and processes the gene product in the specific fashion desired. Such modifications (e.g., glycosylation) and processing (e.g., cleavage) of protein products may be important for the function of the protein. Different host cells have characteristic and specific mechanisms for the post-translational processing and modification of proteins and gene products. Appropriate cell lines or host systems can be chosen to ensure the correct modification and processing of the foreign protein expressed. To this end, eukaryotic host cells which possess the cellular machinery for proper processing of the primary transcript, glycosylation, and phosphorylation of the gene product may be used. Such mammalian host cells include but are not limited to CHO, VERY, BHK, Hela, COS, MDCK, 293, 3T3, WI38, and in particular, breast cancer cell lines such as, for example, BT483, Hs578T, HTB2, BT20 and T47D, and normal mammary gland cell line such as, for example, CRL7030 and Hs578Bst.

[0267] For long-term, high-yield production of recombinant proteins, stable expression is preferred. For example, cell lines, which stably express the antibody molecule may be engineered. Rather than using expression vectors which contain viral origins of replication, host cells can be transformed with DNA controlled by appropriate expression control elements (e.g., promoter, enhancer, sequences, transcription terminators, polyadenylation sites, etc.), and a selectable marker. Following the introduction of the foreign DNA, engineered cells may be allowed to grow for 1-2 days in an enriched media, and then are switched to a selective media. The selectable marker in the recombinant plasmid confers resistance to the selection and allows cells to stably integrate the plasmid into their chromosomes and grow to form foci which in turn can be cloned and expanded into cell lines. This method may advantageously be used to engineer cell lines, which express the antibody molecule. Such engineered cell lines may be particularly useful in screening and evaluation of compounds that interact directly or indirectly with the antibody molecule.

[0268] A number of selection systems may be used, including but not limited to the herpes simplex virus thymidine kinase (Wigler et al., Cell 11:223 (1977)), hypoxanthine-guanine phosphoribosyltransferase (Szybalska & Szybalski, Proc. Natl. Acad. Sci. USA 48:202 (1992)), and adenine phosphoribosyltransferase (Lowy et al., Cell 22:817 (1980)) genes can be employed in tk-, hgprt- or aprt-cells, respectively. Also, antimetabolite resistance can be used as the basis of selection for the following genes: dhfr, which confers resistance to methotrexate (Wigler et al., Natl. Acad. Sci. USA 77:357 (1980); O'Hare et al., Proc. Natl. Acad. Sci. USA 78:1527 (1981)); gpt, which confers resistance to mycophenolic acid (Mulligan & Berg, Proc. Natl. Acad. Sci. USA 78:2072 (1981)); neo, which confers resistance to the aminoglycoside G-418 Clinical Pharmacy 12:488-505; Wu and Wu, Biotherapy 3:87-95 (1991); Tolstoshev, Ann. Rev. Pharnacol. Toxicol. 32:573-596 (1993); Mulligan, Science 260:926-932 (1993); and Morgan and Anderson, Ann. Rev. Biochem. 62:191-217 (1993); TIB TECH 11(5):155-215 (1993)); and hygro, which confers resistance to hygromycin (Santerre et al., Gene 30:147 (1984)). Methods commonly known in the art of recombinant DNA technology may be routinely applied to select the desired recombinant clone, and such methods are described, for example, in Ausubel et al. (eds.), Current Protocols in Molecular Biology, John Wiley & Sons, NY (1993); Kriegler, Gene Transfer and Expression, A Laboratory Manual, Stockton Press, NY (1990); and in Chapters 12 and 13, Dracopoli et al. (eds), Current Protocols in Human Genetics, John Wiley & Sons, NY (1994); Colberre-Garapin et al., J. Mol. Biol. 150:1 (1981), which are incorporated by reference herein in their entireties.

[0269] The expression levels of an antibody molecule can be increased by vector amplification (for a review, see Bebbington and Hentschel, The use of vectors based on gene amplification for the expression of cloned genes in mammalian cells in DNA cloning, Vol.3. (Academic Press, New York, 1987)). When a marker in the vector system expressing antibody is amplifiable, increase in the level of inhibitor present in culture of host cell will increase the number of copies of the marker gene. Since the amplified region is associated with the antibody gene, production of the antibody will also increase (Crouse et al., Mol. Cell. Biol. 3:257 (1983)).

[0270] Vectors, which use glutamine synthase (GS) or DHFR as the selectable markers can be amplified in the presence of the drugs methionine sulphoximine or methotrexate, respectively. An advantage of glutamine synthase based vectors are the availabilty of cell lines (e.g., the murine myeloma cell line, NSO) which are glutamine synthase negative. Glutamine synthase expression systems can also function in glutamine synthase expressing cells (e.g., Chinese Hamster Ovary (CHO) cells) by providing additional inhibitor to prevent the functioning of the endogenous gene. A glutamine synthase expression system and components thereof are detailed in PCT publications: WO87/04462; WO86/05807; WO89/01036; WO89/10404; and WO91/06657, which are incorporated in their entireties by reference herein. Additionally, glutamine synthase expression vectors that may be used according to the present invention are commercially available from suplliers, including, for example Lonza Biologics, Inc. (Portsmouth, N.H.). Expression and production of monoclonal antibodies using a GS expression system in murine myeloma cells is described in Bebbington et al., Bio/technology 10:169(1992) and in Biblia and Robinson Biotechnol. Prog. 11:1 (1995) which are incorporated in their entirities by reference herein.

[0271] The host cell may be co-transfected with two expression vectors of the invention, the first vector encoding a heavy chain derived polypeptide and the second vector encoding a light chain derived polypeptide. The two vectors may contain identical selectable markers, which enable equal expression of heavy and light chain polypeptides. Alternatively, a single vector may be used which encodes, and is capable of expressing, both heavy and light chain polypeptides. In such situations, the light chain should be placed before the heavy chain to avoid an excess of toxic free heavy chain (Proudfoot, Nature 322:52 (1986); Kohler, Proc. Natl. Acad. Sci. USA 77:2197 (1980)). The coding sequences for the heavy and light chains may comprise cDNA or genomic DNA.

[0272] Once an antibody molecule of the invention has been produced by an animal, chemically synthesized, or recombinantly expressed, it may be purified by any method known in the art for purification of an immunoglobulin molecule, for example, by chromatography (e.g., ion exchange, affinity, particularly by affinity for the specific antigen after Protein A, and sizing column chromatography), centrifugation, differential solubility, or by any other standard technique for the purification of proteins. In addition, the antibodies of the present invention or fragments thereof can be fused to heterologous polypeptide sequences described herein or otherwise known in the art, to facilitate purification.

[0273] The present invention encompasses antibodies recombinantly fused or chemically conjugated (including both covalently and non-covalently conjugations) to a polypeptide (or portion thereof, preferably at least 10, 20, 30, 40, 50, 60, 70, 80, 90 or 100 amino acids of the polypeptide) of the present invention to generate fusion proteins. The fusion does not necessarily need to be direct, but may occur through linker sequences. The antibodies may be specific for antigens other than polypeptides (or portion thereof, preferably at least 10, 20, 30, 40, 50, 60, 70, 80, 90 or 100 amino acids of the polypeptide) of the present invention. For example, antibodies may be used to target the polypeptides of the present invention to particular cell types, either in vitro or in vivo, by fusing or conjugating the polypeptides of the present invention to antibodies specific for particular cell surface receptors. Antibodies fused or conjugated to the polypeptides of the present invention may also be used in in vitro immunoassays and purification methods using methods known in the art. See e.g., Harbor et al., supra, and PCT publication WO 93/21232; EP 439,095; Naramura et al., Immunol. Lett. 39:91-99 (1994); U.S. Pat. No. 5,474,981; Gillies et al., PNAS 89:1428-1432 (1992); Fell et al., J. Immunol. 146:2446-2452 (1991), which are incorporated by reference in their entireties.

[0274] The present invention further includes compositions comprising the polypeptides of the present invention fused or conjugated to antibody domains other than the variable regions. For example, the polypeptides of the present invention may be fused or conjugated to an antibody Fc region, or portion thereof. The antibody portion fused to a polypeptide of the present invention may comprise the constant region, hinge region, CH1 domain, CH2 domain, and CH3 domain or any combination of whole domains or portions thereof. The polypeptides may also be fused or conjugated to the above antibody portions to form multimers. For example, Fc portions fused to the polypeptides of the present invention can form dimers through disulfide bonding between the Fc portions. Higher multimeric forms can be made by fusing the polypeptides to portions of IgA and IgM. Methods for fusing or conjugating the polypeptides of the present invention to antibody portions are known in the art. See, e.g., U.S. Pat. Nos. 5,336,603; 5,622,929; 5,359,046; 5,349,053; 5,447,851; 5,112,946; EP 307,434; EP 367,166; PCT publications WO 96/04388; WO 91/06570; Ashkenazi et al., Proc. Natl. Acad. Sci. USA 88:10535-10539 (1991); Zheng et al., J. Immunol. 154:5590-5600 (1995); and Vil et al., Proc. Natl. Acad. Sci. USA 89:11337-11341 (1992) (said references incorporated by reference in their entireties).

[0275] As discussed, supra, the polypeptides corresponding to a polypeptide, polypeptide fragment, or a variant of SEQ ID NO:Y may be fused or conjugated to the above antibody portions to increase the in vivo half life of the polypeptides or for use in immunoassays using methods known in the art. Further, the polypeptides corresponding to SEQ ID NO:Y may be fused or conjugated to the above antibody portions to facilitate purification. One reported example describes chimeric proteins consisting of the first two domains of the human CD4-polypeptide and various domains of the constant regions of the heavy or light chains of mammalian immunoglobulins. See EP 394,827; Traunecker et al., Nature 331:84-86 (1988). The polypeptides of the present invention fused or conjugated to an antibody having disulfide-linked dimeric structures (due to the IgG) may also be more efficient in binding and neutralizing other molecules, than the monomeric secreted protein or protein fragment alone. See, for example, Fountoulakis et al., J. Biochem. 270:3958-3964 (1995). In many cases, the Fc part in a fusion protein is beneficial in therapy and diagnosis, and thus can result in, for example, improved pharmacokinetic properties. See, for example, EP A 232,262. Alternatively, deleting the Fc part after the fusion protein has been expressed, detected, and purified, would be desired. For example, the Fc portion may hinder therapy and diagnosis if the fusion protein is used as an antigen for immunizations. In drug discovery, for example, human proteins, such as hIL-5, have been fused with Fc portions for the purpose of high-throughput screening assays to identify antagonists of hIL-5. (See, Bennett et al., J. Molecular Recognition 8:52-58 (1995); Johanson et al., J. Biol. Chem. 270:9459-9471 (1995)).

[0276] Moreover, the antibodies or fragments thereof of the present invention can be fused to marker sequences, such as a peptide to facilitate purification. In preferred embodiments, the marker amino acid sequence is a hexa-histidine peptide, such as the tag provided in a pQE vector (QIAGEN, Inc., 9259 Eton Avenue, Chatsworth, Calif., 91311), among others, many of which are commercially available. As described in Gentz et al., Proc. Natl. Acad. Sci. USA 86:821-824 (1989), for instance, hexa-histidine provides for convenient purification of the fusion protein. Other peptide tags useful for purification include, but are not limited to, the “HA” tag, which corresponds to an epitope derived from the influenza hemagglutinin protein (Wilson et al., Cell 37:767 (1984)) and the “flag” tag.

[0277] The present invention further encompasses antibodies or fragments thereof conjugated to a diagnostic or therapeutic agent. The antibodies can be used diagnostically to, for example, monitor the development or progression of a tumor as part of a clinical testing procedure to, e.g., determine the efficacy of a given treatment regimen. Detection can be facilitated by coupling the antibody to a detectable substance. Examples of detectable substances include various enzymes, prosthetic groups, fluorescent materials, luminescent materials, bioluminescent materials, radioactive materials, positron emitting metals using various positron emission tomographies, and nonradioactive paramagnetic metal ions. The detectable substance may be coupled or conjugated either directly to the antibody (or fragment thereof) or indirectly, through an intermediate (such as, for example, a linker known in the art) using techniques known in the art. See, for example, U.S. Pat. No. 4,741,900 for metal ions which can be conjugated to antibodies for use as diagnostics according to the present invention.

[0278] Further, an antibody or fragment thereof may be conjugated to a therapeutic moiety such as a cytotoxin, e.g., a cytostatic or cytocidal agent, a therapeutic agent or a radioactive metal ion, e.g., alpha-emitters such as, for example, 213Bi. A cytotoxin or cytotoxic agent includes any agent that is detrimental to cells. Examples include paclitaxol, cytochalasin B, gramicidin D, ethidium bromide, emetine, mitomycin, etoposide, tenoposide, vincristine, vinblastine, colchicin, doxorubicin, daunorubicin, dihydroxy anthracin dione, mitoxantrone, mithramycin, actinomycin D, 1-dehydrotestosterone, glucocorticoids, procaine, tetracaine, lidocaine, propranolol, and puromycin and analogs or homologs thereof. Therapeutic agents include, but are not limited to, antimetabolites (e.g., methotrexate, 6-mercaptopurine, 6-thioguanine, cytarabine, 5-fluorouracil decarbazine), alkylating agents (e.g., mechlorethamine, thioepa chlorambucil, melphalan, carmustine (BSNU) and lomustine (CCNU), cyclothosphamide, busulfan, dibromomannitol, streptozotocin, mitomycin C, and cis-dichlorodiamine platinum (II) (DDP) cisplatin), anthracyclines (e.g., daunorubicin (formerly daunomycin) and doxorubicin), antibiotics (e.g., dactinomycin (formerly actinomycin), bleomycin, mithramycin, and anthramycin (AMC)), and anti-mitotic agents (e.g., vincristine and vinblastine).

[0279] The conjugates of the invention can be used for modifying a given biological response, the therapeutic agent or drug moiety is not to be construed as limited to classical chemical therapeutic agents. For example, the drug moiety may be a protein or polypeptide possessing a desired biological activity. Such proteins may include, for example, a toxin such as abrin, ricin A, pseudomonas exotoxin, or diphtheria toxin; a protein such as tumor necrosis factor, a-interferon, β-interferon, nerve growth factor, platelet derived growth factor, tissue plasminogen activator, an apoptotic agent, e.g., TNF-alpha, TNF-beta, AIM I (See, International Publication No. WO 97/33899), AIM II (See, International Publication No. WO 97/34911), Fas Ligand (Takahashi et al., Int. Immunol., 6:1567-1574 (1994)), VEGI (See, International Publication No. WO 99/23105), a thrombotic agent or an anti-angiogenic agent, e.g., anglostatin or endostatin; or, biological response modifiers such as, for example, lymphokines, interleukin-1 (“IL-1”), interleukin-2 (“IL-2”), interleukin-6 (“IL-6”), granulocyte macrophage colony stimulating factor (“GM-CSF”), granulocyte colony stimulating factor (“G-CSF”), or other growth factors.

[0280] Antibodies may also be attached to solid supports, which are particularly useful for immunoassays or purification of the target antigen. Such solid supports include, but are not limited to, glass, cellulose, polyacrylamide, nylon, polystyrene, polyvinyl chloride or polypropylene.

[0281] Techniques for conjugating such therapeutic moiety to antibodies are well known. See, for example, Arnon et al., “Monoclonal Antibodies For Immunotargeting Of Drugs In Cancer Therapy”, in Monoclonal Antibodies And Cancer Therapy, Reisfeld et al. (eds.), pp. 243-56 (Alan R. Liss, Inc. 1985); Hellstrom et al., “Antibodies For Drug Delivery”, in Controlled Drug Delivery (2nd Ed.), Robinson et al. (eds.), pp. 623-53 (Marcel Dekker, Inc. 1987); Thorpe, “Antibody Carriers Of Cytotoxic Agents In Cancer Therapy: A Review”, in Monoclonal Antibodies '84: Biological And Clinical Applications, Pinchera et al. (eds.), pp. 475-506 (1985); “Analysis, Results, And Future Prospective Of The Therapeutic Use Of Radiolabeled Antibody In Cancer Therapy”, in Monoclonal Antibodies For Cancer Detection And Therapy, Baldwin et al. (eds.), pp. 303-16 (Academic Press 1985), and Thorpe et al., “The Preparation And Cytotoxic Properties Of Antibody-Toxin Conjugates”, Immunol. Rev. 62:119-58 (1982).

[0282] Alternatively, an antibody can be conjugated to a second antibody to form an antibody heteroconjugate as described by Segal in U.S. Pat. No. 4,676,980, which is incorporated herein by reference in its entirety.

[0283] An antibody, with or without a therapeutic moiety conjugated to it, administered alone or in combination with cytotoxic factor(s) and/or cytokine(s) can be used as a therapeutic.

[0284] Immunophenotyping

[0285] The antibodies of the invention may be utilized for immunophenotyping of cell lines and biological samples. Translation products of the genes of the present invention may be useful as cell specific markers, or more specifically as cellular markers that are differentially expressed at various stages of differentiation and/or maturation of particular cell types. Monoclonal antibodies directed against a specific epitope, or combination of epitopes, will allow for the screening of cellular populations expressing the marker. Various techniques can be utilized using monoclonal antibodies to screen for cellular populations expressing the marker(s), and include magnetic separation using antibody-coated magnetic beads, “panning” with antibody attached to a solid matrix (i.e., plate), and flow cytometry (See, e.g., U.S. Pat. No. 5,985,660; and Morrison et al., Cell, 96:737-49 (1999)).

[0286] These techniques allow for the screening of particular populations of cells, such as might be found with hematological malignancies (i.e. minimal residual disease (MRD) in acute leukemic patients) and “non-self” cells in transplantations to prevent Graft-versus-Host Disease (GVHD). Alternatively, these techniques allow for the screening of hematopoietic stem and progenitor cells capable of undergoing proliferation and/or differentiation, as might be found in human umbilical cord blood.

[0287] Assays for Antibody Binding

[0288] The antibodies of the invention may be assayed for immunospecific binding by any method known in the art. The immunoassays which can be used include but are not limited to competitive and non-competitive assay systems using techniques such as western blots, radioimmunoassays, ELISA (enzyme linked immunosorbent assay), “sandwich” immunoassays, immunoprecipitation assays, precipitin reactions, gel diffusion precipitin reactions, immunodiffusion assays, agglutination assays, complement-fixation assays, immunoradiometric assays, fluorescent immunoassays, and protein A immunoassays, to name but a few. Such assays are routine and well known in the art (see, e.g., Ausubel et al, eds, 1994, Current Protocols in Molecular Biology, Vol. 1, John Wiley & Sons, Inc., New York, which is incorporated by reference herein in its entirety). Exemplary immunoassays are described briefly below (but are not intended by way of limitation).

[0289] Immunoprecipitation protocols generally comprise lysing a population of cells in a lysis buffer such as RIPA buffer (1% NP-40 or Triton X-100, 1% sodium deoxycholate, 0.1% SDS, 0.15 M NaCl, 0.01 M sodium phosphate at pH 7.2, 1% Trasylol) supplemented with protein phosphatase and/or protease inhibitors (e.g., EDTA, PMSF, aprotinin, sodium vanadate), adding the antibody of interest to the cell lysate, incubating for a period of time (e.g., 1-4 hours) at 4° C., adding protein A and/or protein G sepharose beads to the cell lysate, incubating for about an hour or more at 4° C., washing the beads in lysis buffer and resuspending the beads in SDS/sample buffer. The ability of the antibody of interest to immunoprecipitate a particular antigen can be assessed by, e.g., western blot analysis. One of skill in the art would be knowledgeable as to the parameters that can be modified to increase the binding of the antibody to an antigen and decrease the background (e.g., pre-clearing the cell lysate with sepharose beads). For further discussion regarding immunoprecipitation protocols see, e.g., Ausubel et al., eds., (1994), Current Protocols in Molecular Biology, Vol. 1, John Wiley & Sons, Inc., New York, section 10.16.1.

[0290] Western blot analysis generally comprises preparing protein samples, electrophoresis of the protein samples in a polyacrylamide gel (e.g., 8%-20% SDS-PAGE depending on the molecular weight of the antigen), transferring the protein sample from the polyacrylamide gel to a membrane such as nitrocellulose, PVDF or nylon, blocking the membrane in blocking solution (e.g., PBS with 3% BSA or non-fat milk), washing the membrane in washing buffer (e.g., PBS-Tween 20), blocking the membrane with primary antibody (the antibody of interest) diluted in blocking buffer, washing the membrane in washing buffer, blocking the membrane with a secondary antibody (which recognizes the primary antibody, e.g., an anti-human antibody) conjugated to an enzymatic substrate (e.g., horseradish peroxidase or alkaline phosphatase) or radioactive molecule (e.g., 32P or 125I) diluted in blocking buffer, washing the membrane in wash buffer, and detecting the presence of the antigen. One of skill in the art would be knowledgeable as to the parameters that can be modified to increase the signal detected and to reduce the background noise. For further discussion regarding western blot protocols see, e.g., Ausubel et al., eds., (1994), Current Protocols in Molecular Biology, Vol. 1, John Wiley & Sons, Inc., New York, section 10.8.1.

[0291] ELISAs comprise preparing antigen, coating the well of a 96 well microtiter plate with the antigen, adding the antibody of interest conjugated to a detectable compound such as an enzymatic substrate (e.g., horseradish peroxidase or alkaline phosphatase) to the well and incubating for a period of time, and detecting the presence of the antigen. In ELISAs the antibody of interest does not have to be conjugated to a detectable compound; instead, a second antibody (which recognizes the antibody of interest) conjugated to a detectable compound may be added to the well. Further, instead of coating the well with the antigen, the antibody may be coated to the well. In this case, a second antibody conjugated to a detectable compound may be added following the addition of the antigen of interest to the coated well. One of skill in the art would be knowledgeable as to the parameters that can be modified to increase the signal detected as well as other variations of ELISAs known in the art. For further discussion regarding ELISAs see, e.g., Ausubel et al., eds, (1994), Current Protocols in Molecular Biology, Vol. 1, John Wiley & Sons, Inc., New York, section 11.2.1.

[0292] The binding affinity of an antibody to an antigen and the off-rate of an antibody-antigen interaction can be determined by competitive binding assays. One example of a competitive binding assay is a radioimmunoassay comprising the incubation of labeled antigen (e.g., 3H or 125I) with the antibody of interest in the presence of increasing amounts of unlabeled antigen, and the detection of the antibody bound to the labeled antigen. The affinity of the antibody of interest for a particular antigen and the binding off-rates can be determined from the data by scatchard plot analysis. Competition with a second antibody can also be determined using radioimmunoassays. In this case, the antigen is incubated with antibody of interest conjugated to a labeled compound (e.g., 3H or 125I) in the presence of increasing amounts of an unlabeled second antibody.

[0293] Antibodies of the invention may be characterized using immunocytochemisty methods on cells (e.g., mammalian cells, such as CHO cells) transfected with a vector enabling the expression of a connective tissue antigen or with vector alone using techniques commonly known in the art. Antibodies that bind connective tissue antigen transfected cells, but not vector-only transfected cells, are connective tissue antigen specific.

[0294] Therapeutic Uses

[0295] The present invention is further directed to antibody-based therapies which involve administering antibodies of the invention to an animal, preferably a mammal, and most preferably a human, patient for treating one or more of the disclosed diseases, disorders, or conditions. Therapeutic compounds of the invention include, but are not limited to, antibodies of the invention (including fragments, analogs and derivatives thereof as described herein) and nucleic acids encoding antibodies of the invention (including fragments, analogs and derivatives thereof and anti-idiotypic antibodies as described herein). The antibodies of the invention can be used to treat, inhibit or prevent diseases, disorders or conditions associated with aberrant expression and/or activity of a polypeptide of the invention, including, but not limited to, any one or more of the diseases, disorders, or conditions described herein. The treatment and/or prevention of diseases, disorders, or conditions associated with aberrant expression and/or activity of a polypeptide of the invention includes, but is not limited to, alleviating symptoms associated with those diseases, disorders or conditions. Antibodies of the invention may be provided in pharmaceutically acceptable compositions as known in the art or as described herein.

[0296] In a specific and preferred embodiment, the present invention is directed to antibody-based therapies which involve administering antibodies of the invention to an animal, preferably a mammal, and most preferably a human, patient for treating one or more of the diseases, disorders, or conditions of connective tissues, including, but not limited to, rheumatoid arthritis, psoriatic arthritis, discoid lupus erythematosus, systemic lupus erythematosus, scleroderma, CREST syndrome, Sjogren's syndrome, polymyositis, dermatomyositis, mixed connective tissue disease, relapsing polychondritis, vasculitis, Henoch-Schonlein syndrome, erythema nodosum, polyarteritis nodosa, temporal (giant cell) arteritis, Takayasu's arteritis, Wegener's granulomatosis, Reiter's syndrome, Behcet's syndrome, ankylosing spondylitis, cellulitis, keloids, Ehler Danlos syndrome, Marfan syndrome, pseudoxantoma elasticum, osteogenese imperfecta, chondrodysplasias, epidernolysis bullosa, Alport syndrome, cutis laxa, genetic disorders affecting skeleton, skin and muscles; formation of excessive scar tissue; deposition of pathological amounts of connective tissue in body organs, including kidney, intestines and heart, and in liver by liver cirrhosis, in skin by scleroderma, in lung by lung fibrosis, in bone marrow by leukemia, in blood vessels by atherosclerosis, and in joints by rheumatic diseases. Therapeutic compounds of the invention include, but are not limited to, antibodies of the invention (e.g., antibodies directed to the full length protein expressed on the cell surface of a mammalian cell; antibodies directed to an epitope of a connective tissue associated polypeptide of the invention (such as, a linear epitope (shown in Table 1A, column 6) or a conformational epitope), including fragments, analogs and derivatives thereof as described herein) and nucleic acids encoding antibodies of the invention (including fragments, analogs and derivatives thereof and anti-idiotypic antibodies as described herein). The antibodies of the invention can be used to treat, inhibit or prevent diseases, disorders or conditions associated with aberrant expression and/or activity of a polypeptide of the invention, including, but not limited to, any one or more of the diseases, disorders, or conditions of connective tissues described herein. The treatment and/or prevention of diseases, disorders, or conditions of connective tissues associated with aberrant expression and/or activity of a polypeptide of the invention includes, but is not limited to, alleviating symptoms associated with those diseases, disorders or conditions. Antibodies of the invention may be provided in pharmaceutically acceptable compositions as known in the art or as described herein.

[0297] A summary of the ways in which the antibodies of the present invention may be used therapeutically includes binding polynucleotides or polypeptides of the present invention locally or systemically in the body or by direct cytotoxicity of the antibody, e.g. as mediated by complement (CDC) or by effector cells (ADCC). Some of these approaches are described in more detail below. Armed with the teachings provided herein, one of ordinary skill in the art will know how to use the antibodies of the present invention for diagnostic, monitoring or therapeutic purposes without undue experimentation.

[0298] The antibodies of this invention may be advantageously utilized in combination with other monoclonal or chimeric antibodies, or with lymphokines or hematopoietic growth factors (such as, e.g., IL-2, IL-3 and IL-7), for example, which serve to increase the number or activity of effector cells which interact with the antibodies.

[0299] The antibodies of the invention may be administered alone or in combination with other types of treatments (e.g., radiation therapy, chemotherapy, hormonal therapy, immunotherapy and anti-tumor agents). Generally, administration of products of a species origin or species reactivity (in the case of antibodies) that is the same species as that of the patient is preferred. Thus, in a preferred embodiment, human antibodies, fragments derivatives, analogs, or nucleic acids, are administered to a human patient for therapy or prophylaxis.

[0300] It is preferred to use high affinity and/or potent in vivo inhibiting and/or neutralizing antibodies against polypeptides or polynucleotides of the present invention, fragments or regions thereof, for both immunoassays directed to and therapy of disorders related to polynucleotides or polypeptides, including fragments thereof, of the present invention. Such antibodies, fragments, or regions, will preferably have an affinity for polynucleotides or polypeptides of the invention, including fragments thereof. Preferred binding affinities include those with a dissociation constant or Kd less than 5×10⁻² M, 10⁻² M, 5×10⁻³ M, 10⁻³ M, 5×10⁻⁴ M, 10⁻⁴ M, 5×10⁻⁵ M, 10⁻⁵ M, 5×10⁻⁶ M, 10⁻⁶ M, 5×10⁻⁷ M, 10⁻⁷ M, 5×10⁻⁸ M, 10⁻⁸ M, 5×10⁻⁹ M, 10⁻⁹ M, 5×10⁻¹⁰ M, 10⁻¹⁰ M, 5×10⁻¹¹ M, 10⁻¹¹ M, 5×10⁻¹² M, 10⁻¹² M, 5×10⁻¹³ M, 10⁻¹³ M, 5×10⁻¹⁴ M, 10⁻¹⁴ M, 5×10⁻¹⁵ M, and 10⁻¹⁵ M.

[0301] Gene Therapy

[0302] In a specific embodiment, nucleic acids comprising sequences encoding antibodies or functional derivatives thereof, are administered to treat, inhibit or prevent a disease or disorder associated with aberrant expression and/or activity of a polypeptide of the invention, by way of gene therapy. Gene therapy refers to therapy performed by the administration to a subject of an expressed or expressible nucleic acid. In this embodiment of the invention, the nucleic acids produce their encoded protein that mediates a therapeutic effect.

[0303] Any of the methods for gene therapy available in the art can be used according to the present invention. Exemplary methods are described below.

[0304] For general reviews of the methods of gene therapy, see Goldspiel et al., Clinical Pharmacy 12:488-505 (1993); Wu and Wu, Biotherapy 3:87-95 (1991); Tolstoshev, Ann. Rev. Pharmacol. Toxicol. 32:573-596 (1993); Mulligan, Science 260:926-932 (1993); and Morgan and Anderson, Ann. Rev. Biochem. 62:191-217 (1993); May, TIBTECH 11(5):155-215 (1993). Methods commonly known in the art of recombinant DNA technology which can be used are described in Ausubel et al. (eds.), Current Protocols in Molecular Biology, John Wiley & Sons, NY (1993); and Kriegler, Gene Transfer and Expression, A Laboratory Manual, Stockton Press, NY (1990).

[0305] In a preferred embodiment, the compound comprises nucleic acid sequences encoding an antibody, said nucleic acid sequences being part of expression vectors that express the antibody or fragments or chimeric proteins or heavy or light chains thereof in a suitable host. In particular, such nucleic acid sequences have promoters operably linked to the antibody coding region, said promoter being inducible or constitutive, and, optionally, tissue-specific. In another particular embodiment, nucleic acid molecules are used in which the antibody coding sequences and any other desired sequences are flanked by regions that promote homologous recombination at a desired site in the genome, thus providing for intrachromosomal expression of the antibody encoding nucleic acids (Koller and Smithies, Proc. Natl. Acad. Sci. USA 86:8932-8935 (1989); Zijlstra et al., Nature 342:435-438 (1989). In specific embodiments, the expressed antibody molecule is a single chain antibody; alternatively, the nucleic acid sequences include sequences encoding both the heavy and light chains, or fragments thereof, of the antibody.

[0306] Delivery of the nucleic acids into a patient may be either direct, in which case the patient is directly exposed to the nucleic acid or nucleic acid-carrying vectors, or indirect, in which case, cells are first transformed with the nucleic acids in vitro, then transplanted into the patient. These two approaches are known, respectively, as in vivo or ex vivo gene therapy.

[0307] In a specific embodiment, the nucleic acid sequences are directly administered in vivo, where it is expressed to produce the encoded product. This can be accomplished by any of numerous methods known in the art, e.g., by constructing them as part of an appropriate nucleic acid expression vector and administering it so that they become intracellular, e.g., by infection using defective or attenuated retrovirals or other viral vectors (see U.S. Pat. No. 4,980,286), or by direct injection of naked DNA, or by use of microparticle bombardment (e.g., a gene gun; Biolistic, Dupont), or coating with lipids or cell-surface receptors or transfecting agents, encapsulation in liposomes, microparticles, or microcapsules, or by administering them in linkage to a peptide which is known to enter the nucleus, by administering it in linkage to a ligand subject to receptor-mediated endocytosis (see, e.g., Wu and Wu, J. Biol. Chem. 262:4429-4432 (1987)) (which can be used to target cell types specifically expressing the receptors), etc. In another embodiment, nucleic acid-ligand complexes can be formed in which the ligand comprises a fusogenic viral peptide to disrupt endosomes, allowing the nucleic acid to avoid lysosomal degradation. In yet another embodiment, the nucleic acid can be targeted in vivo for cell specific uptake and expression, by targeting a specific receptor (see, e.g., PCT Publications WO 92/06180; WO 92/22635; WO92/20316; WO93/14188, WO 93/20221). Alternatively, the nucleic acid can be introduced intracellularly and incorporated within host cell DNA for expression, by homologous recombination (Koller and Smithies, Proc. Natl. Acad. Sci. USA 86:8932-8935 (1989); Zijlstra et al., Nature 342:435-438 (1989)).

[0308] In a specific embodiment, viral vectors that contains nucleic acid sequences encoding an antibody of the invention are used. For example, a retroviral vector can be used (see Miller et al., Meth. Enzymol. 217:581-599 (1993)). These retroviral vectors contain the components necessary for the correct packaging of the viral genome and integration into the host cell DNA. The nucleic acid sequences encoding the antibody to be used in gene therapy are cloned into one or more vectors, which facilitates delivery of the gene into a patient. More detail about retroviral vectors can be found in Boesen et al., Biotherapy 6:291-302 (1994), which describes the use of a retroviral vector to deliver the mdr1 gene to hematopoietic stem cells in order to make the stem cells more resistant to chemotherapy. Other references illustrating the use of retroviral vectors in gene therapy are: Clowes et al., J. Clin. Invest. 93:644-651 (1994); Kiem et al., Blood 83:1467-1473 (1994); Salmons and Gunzberg, Human Gene Therapy 4:129-141 (1993); and Grossman and Wilson, Curr. Opin. in Genetics and Devel. 3:110-114 (1993).

[0309] Adenoviruses are other viral vectors that can be used in gene therapy. Adenoviruses are especially attractive vehicles for delivering genes to respiratory epithelia. Adenoviruses naturally infect respiratory epithelia where they cause a mild disease. Other targets for adenovirus-based delivery systems are liver, the central nervous system, endothelial cells, and muscle. Adenoviruses have the advantage of being capable of infecting non-dividing cells. Kozarsky and Wilson, Current Opinion in Genetics and Development 3:499-503 (1993) present a review of adenovirus-based gene therapy. Bout et al., Human Gene Therapy 5:3-10 (1994) demonstrated the use of adenovirus vectors to transfer genes to the respiratory epithelia of rhesus monkeys. Other instances of the use of adenoviruses in gene therapy can be found in Rosenfeld et al., Science 252:431-434 (1991); Rosenfeld et al., Cell 68:143-155 (1992); Mastrangeli et al., J. Clin. Invest. 91:225-234 (1993); PCT Publication WO94/12649; and Wang, et al., Gene Therapy 2:775-783 (1995). In a preferred embodiment, adenovirus vectors are used.

[0310] Adeno-associated virus (AAV) has also been proposed for use in gene therapy (Walsh et al., Proc. Soc. Exp. Biol. Med. 204:289-300 (1993); U.S. Pat. No. 5,436,146).

[0311] Another approach to gene therapy involves transferring a gene to cells in tissue culture by such methods as electroporation, lipofection, calcium phosphate mediated transfection, or viral infection. Usually, the method of transfer includes the transfer of a selectable marker to the cells. The cells are then placed under selection to isolate those cells that have taken up and are expressing the transferred gene. Those cells are then delivered to a patient.

[0312] In this embodiment, the nucleic acid is introduced into a cell prior to administration in vivo of the resulting recombinant cell. Such introduction can be carried out by any method known in the art, including but not limited to transfection, electroporation, microinjection, infection with a viral or bacteriophage vector containing the nucleic acid sequences, cell fusion, chromosome-mediated gene transfer, microcell-mediated gene transfer, spheroplast fusion, etc. Numerous techniques are known in the art for the introduction of foreign genes into cells (see, e.g., Loeffler and Behr, Meth. Enzymol. 217:599-618 (1993); Cohen et al., Meth. Enzymol. 217:618-644 (1993); Cline, Pharmac. Ther. 29:69-92m (1985) and may be used in accordance with the present invention, provided that the necessary developmental and physiological functions of the recipient cells are not disrupted. The technique should provide for the stable transfer of the nucleic acid to the cell, so that the nucleic acid is expressible by the cell and preferably heritable and expressible by its cell progeny.

[0313] The resulting recombinant cells can be delivered to a patient by various methods known in the art. Recombinant blood cells (e.g., hematopoietic stem or progenitor cells) are preferably administered intravenously. The amount of cells envisioned for use depends on the desired effect, patient state, etc., and can be determined by one skilled in the art.

[0314] Cells into which a nucleic acid can be introduced for purposes of gene therapy encompass any desired, available cell type, and include but are not limited to epithelial cells, endothelial cells, keratinocytes, fibroblasts, muscle cells, hepatocytes; blood cells such as T lymphocytes, B lymphocytes, monocytes, macrophages, neutrophils, eosinophils, megakaryocytes, granulocytes; various stem or progenitor cells, in particular hematopoietic stem or progenitor cells, e.g., as obtained from bone marrow, umbilical cord blood, peripheral blood, fetal liver, etc.

[0315] In a preferred embodiment, the cell used for gene therapy is autologous to the patient.

[0316] In an embodiment in which recombinant cells are used in gene therapy, nucleic acid sequences encoding an antibody are introduced into the cells such that they are expressible by the cells or their progeny, and the recombinant cells are then administered in vivo for therapeutic effect. In a specific embodiment, stem or progenitor cells are used. Any stem and/or progenitor cells which can be isolated and maintained in vitro can potentially be used in accordance with this embodiment of the present invention (see e.g. PCT Publication WO 94/08598; Stemple and Anderson, Cell 71:973-985 (1992); Rheinwald, Meth. Cell Bio. 21A:229 (1980); and Pittelkow and Scott, Mayo Clinic Proc. 61:771 (1986)).

[0317] In a specific embodiment, the nucleic acid to be introduced for purposes of gene therapy comprises an inducible promoter operably linked to the coding region, such that expression of the nucleic acid is controllable by the presence or absence of an appropriate inducer of transcription.

[0318] Demonstration of Therapeutic or Prophylactic Activity

[0319] The compounds or pharmaceutical compositions of the invention are preferably tested in vitro, and then in vivo for the desired therapeutic or prophylactic activity, prior to use in humans. For example, in vitro assays to demonstrate the therapeutic or prophylactic utility of a compound or pharmaceutical composition include, the effect of a compound on a cell line or a patient tissue sample. The effect of the compound or composition on the cell line and/or tissue sample can be determined utilizing techniques known to those of skill in the art including, but not limited to, rosette formation assays and cell lysis assays. In accordance with the invention, in vitro assays which can be used to determine whether administration of a specific compound is indicated, include in vitro cell culture assays in which a patient tissue sample is grown in culture, and exposed to or otherwise administered a compound, and the effect of such compound upon the tissue sample is observed.

[0320] Therapeutic/Prophylactic Administration and Composition

[0321] The invention provides methods of treatment, inhibition and prophylaxis by administration to a subject of an effective amount of a compound or pharmaceutical composition of the invention, preferably a polypeptide or antibody of the invention. In a preferred embodiment, the compound is substantially purified (e.g., substantially free from substances that limit its effect or produce undesired side-effects). The subject is preferably an animal, including but not limited to animals such as cows, pigs, horses, chickens, cats, dogs, etc., and is preferably a mammal, and most preferably human.

[0322] Formulations and methods of administration that can be employed when the compound comprises a nucleic acid or an immunoglobulin are described above; additional appropriate formulations and routes of administration can be selected from among those described herein below.

[0323] Various delivery systems are known and can be used to administer a compound of the invention, e.g., encapsulation in liposomes, microparticles, microcapsules, recombinant cells capable of expressing the compound, receptor-mediated endocytosis (see, e.g., Wu and Wu, J. Biol. Chem. 262:4429-4432 (1987)), construction of a nucleic acid as part of a retroviral or other vector, etc. Methods of introduction include but are not limited to intradermal, intramuscular, intraperitoneal, intravenous, subcutaneous, intranasal, epidural, and oral routes. The compounds or compositions may be administered by any convenient route, for example by infusion or bolus injection, by absorption through epithelial or mucocutaneous linings (e.g., oral mucosa, rectal and intestinal mucosa, etc.) and may be administered together with other biologically active agents. Administration can be systemic or local. In addition, it may be desirable to introduce the pharmaceutical compounds or compositions of the invention into the central nervous system by any suitable route, including intraventricular and intrathecal injection; intraventricular injection may be facilitated by an intraventricular catheter, for example, attached to a reservoir, such as an Ommaya reservoir. Pulmonary administration can also be employed, e.g., by use of an inhaler or nebulizer, and formulation with an aerosolizing agent.

[0324] In a specific embodiment, it may be desirable to administer the pharmaceutical compounds or compositions of the invention locally to the area in need of treatment; this may be achieved by, for example, and not by way of limitation, local infusion during surgery, topical application, e.g., in conjunction with a wound dressing after surgery, by injection, by means of a catheter, by means of a suppository, or by means of an implant, said implant being of a porous, non-porous, or gelatinous material, including membranes, such as sialastic membranes, or fibers. Preferably, when administering a protein, including an antibody, of the invention, care must be taken to use materials to which the protein does not absorb.

[0325] In another embodiment, the compound or composition can be delivered in a vesicle, in particular a liposome (see Langer, Science 249:1527-1533 (1990); Treat et al., in Liposomes in the Therapy of Infectious Disease and Cancer, Lopez-Berestein and Fidler (eds.), Liss, New York, pp. 353-365 (1989); Lopez-Berestein, ibid., pp. 317-327; see generally ibid.)

[0326] In yet another embodiment, the compound or composition can be delivered in a controlled release system. In one embodiment, a pump may be used (see Langer, supra; Sefton, CRC Crit. Ref. Biomed. Eng. 14:201 (1987); Buchwald et al., Surgery 88:507 (1980); Saudek et al., N. Engl. J. Med. 321:574 (1989)). In another embodiment, polymeric materials can be used (see Medical Applications of Controlled Release, Langer and Wise (eds.), CRC Pres., Boca Raton, Fla. (1974); Controlled Drug Bioavailability, Drug Product Design and Performance, Smolen and Ball (eds.), Wiley, New York (1984); Ranger and Peppas, J., Macromol. Sci. Rev. Macromol. Chem. 23:61 (1983); see also Levy et al., Science 228:190 (1985); During et al., Ann. Neurol. 25:351 (1989); Howard et al., J.Neurosurg. 71:105 (1989)). In yet another embodiment, a controlled release system can be placed in proximity of the therapeutic target, e.g., the brain, thus requiring only a fraction of the systemic dose (see, e.g., Goodson, in Medical Applications of Controlled Release, supra, vol. 2, pp. 115-138 (1984)).

[0327] Other controlled release systems are discussed in the review by Langer (Science 249:1527-1533 (1990)).

[0328] In a specific embodiment where the compound of the invention is a nucleic acid encoding a protein, the nucleic acid can be administered in vivo to promote expression of its encoded protein, by constructing it as part of an appropriate nucleic acid expression vector and administering it so that it becomes intracellular, e.g., by use of a retroviral vector (see U.S. Pat. No. 4,980,286), or by direct injection, or by use of microparticle bombardment (e.g., a gene gun; Biolistic, Dupont), or coating with lipids or cell-surface receptors or transfecting agents, or by administering it in linkage to a homeobox-like peptide which is known to enter the nucleus (see e.g., Joliot et al., Proc. Natl. Acad. Sci. USA 88:1864-1868 (1991)), etc. Alternatively, a nucleic acid can be introduced intracellularly and incorporated within host cell DNA for expression, by homologous recombination.

[0329] The present invention also provides pharmaceutical compositions. Such compositions comprise a therapeutically effective amount of a compound, and a pharmaceutically acceptable carrier. In a specific embodiment, the term “pharmaceutically acceptable” means approved by a regulatory agency of the Federal or a state government or listed in the U.S. Pharmacopeia or other generally recognized pharmacopeia for use in animals, and more particularly in humans. The term “carrier” refers to a diluent, adjuvant, excipient, or vehicle with which the therapeutic is administered. Such pharmaceutical carriers can be sterile liquids, such as water and oils, including those of petroleum, animal, vegetable or synthetic origin, such as peanut oil, soybean oil, mineral oil, sesame oil and the like. Water is a preferred carrier when the pharmaceutical composition is administered intravenously. Saline solutions and aqueous dextrose and glycerol solutions can also be employed as liquid carriers, particularly for injectable solutions. Suitable pharmaceutical excipients include starch, glucose, lactose, sucrose, gelatin, malt, rice, flour, chalk, silica gel, sodium stearate, glycerol monostearate, talc, sodium chloride, dried skim milk, glycerol, propylene, glycol, water, ethanol and the like. The composition, if desired, can also contain minor amounts of wetting or emulsifying agents, or pH buffering agents. These compositions can take the form of solutions, suspensions, emulsion, tablets, pills, capsules, powders, sustained-release formulations and the like. The composition can be formulated as a suppository, with traditional binders and carriers such as triglycerides. Oral formulation can include standard carriers such as pharmaceutical grades of mannitol, lactose, starch, magnesium stearate, sodium saccharine, cellulose, magnesium carbonate, etc. Examples of suitable pharmaceutical carriers are described in “Remington's Pharmaceutical Sciences” by E. W. Martin. Such compositions will contain a therapeutically effective amount of the compound, preferably in purified form, together with a suitable amount of carrier so as to provide the form for proper administration to the patient. The formulation should suit the mode of administration.

[0330] In a preferred embodiment, the composition is formulated in accordance with routine procedures as a pharmaceutical composition adapted for intravenous administration to human beings. Typically, compositions for intravenous administration are solutions in sterile isotonic aqueous buffer. Where necessary, the composition may also include a solubilizing agent and a local anesthetic such as lignocaine to ease pain at the site of the injection. Generally, the ingredients are supplied either separately or mixed together in unit dosage form, for example, as a dry lyophilized powder or water free concentrate in a hermetically sealed container such as an ampoule or sachette indicating the quantity of active agent. Where the composition is to be administered by infusion, it can be dispensed with an infusion bottle containing sterile pharmaceutical grade water or saline. Where the composition is administered by injection, an ampoule of sterile water for injection or saline can be provided so that the ingredients may be mixed prior to administration.

[0331] The compounds of the invention can be formulated as neutral or salt forms. Pharmaceutically acceptable salts include those formed with anions such as those derived from hydrochloric, phosphoric, acetic, oxalic, tartaric acids, etc., and those formed with cations such as those derived from sodium, potassium, ammonium, calcium, ferric hydroxides, isopropylamine, triethylamine, 2-ethylamino ethanol, histidine, procaine, etc.

[0332] The amount of the compound of the invention, which will be effective in the treatment, inhibition and prevention of a disease or disorder associated with aberrant expression and/or activity of a polypeptide of the invention can be determined by standard clinical techniques. In addition, in vitro assays may optionally be employed to help identify optimal dosage ranges. The precise dose to be employed in the formulation will also depend on the route of administration, and the seriousness of the disease or disorder, and should be decided according to the judgment of the practitioner and each patient's circumstances. Effective doses may be extrapolated from dose-response curves derived from in vitro or animal model test systems.

[0333] For antibodies, the dosage administered to a patient is typically 0.1 mg/kg to 100 mg/kg of the patient's body weight. Preferably, the dosage administered to a patient is between 0.1 mg/kg and 20 mg/kg of the patient's body weight, more preferably 1 mg/kg to 10 mg/kg of the patient's body weight. Generally, human antibodies have a longer half-life within the human body than antibodies from other species due to the immune response to the foreign polypeptides. Thus, lower dosages of human antibodies and less frequent administration is often possible. Further, the dosage and frequency of administration of antibodies of the invention may be reduced by enhancing uptake and tissue penetration (e.g., into the brain) of the antibodies by modifications such as, for example, lipidation.

[0334] The invention also provides a pharmaceutical pack or kit comprising one or more containers filled with one or more of the ingredients of the pharmaceutical compositions of the invention. Optionally associated with such container(s) can be a notice in the form prescribed by a governmental agency regulating the manufacture, use or sale of pharmaceuticals or biological products, which notice reflects approval by the agency of manufacture, use or sale for human administration.

[0335] Diagnosis and Imaging

[0336] Labeled antibodies, and derivatives and analogs thereof, which specifically bind to a polypeptide of interest can be used for diagnostic purposes to detect, diagnose, or monitor diseases, disorders, and/or conditions associated with the aberrant expression and/or activity of a polypeptide of the invention. The invention provides for the detection of aberrant expression of a polypeptide of interest, comprising (a) assaying the expression of the polypeptide of interest in cells or body fluid of an individual using one or more antibodies specific to the polypeptide interest and (b) comparing the level of gene expression with a standard gene expression level, whereby an increase or decrease in the assayed polypeptide gene expression level compared to the standard expression level is indicative of aberrant expression.

[0337] The invention provides a diagnostic assay for diagnosing a connective tissue disorder, comprising (a) assaying the expression of the polypeptide of interest in cells or body fluid of an individual using one or more antibodies specific to the polypeptide interest and (b) comparing the level of gene expression with a standard gene expression level, whereby an increase or decrease in the assayed polypeptide gene expression level compared to the standard expression level is indicative of a particular disorder. With respect to cancer, the presence of a relatively high amount of transcript in biopsied tissue from an individual may indicate a predisposition for the development of the disease, or may provide a means for detecting the disease prior to the appearance of actual clinical symptoms. A more definitive diagnosis of this type may allow health professionals to employ preventative measures or aggressive treatment earlier thereby preventing the development or further progression of the cancer.

[0338] Antibodies of the invention can be used to assay protein levels in a biological sample using classical immunohistological methods known to those of skill in the art (e.g., see Jalkanen et al., J. Cell. Biol. 101:976-985 (1985); Jalkanen et al., J. Cell . Biol. 105:3087-3096 (1987)). Other antibody-based methods useful for detecting protein gene expression include immunoassays, such as the enzyme linked immunosorbent assay (ELISA) and the radioimmunoassay (RIA). Suitable antibody assay labels are known in the art and include enzyme labels, such as, glucose oxidase; radioisotopes, such as iodine (125I, 121I), carbon (14C), sulfur (35S), tritium (3H), indium (112In), and technetium (99Tc); luminescent labels, such as luminol; and fluorescent labels, such as fluorescein and rhodamine, and biotin.

[0339] One facet of the invention is the detection and diagnosis of a disease or disorder associated with aberrant expression of a polypeptide of interest in an animal, preferably a mammal and most preferably a human. A preferred embodiment of the invention is the detection and diagnosis of a disease or disorder of connective tissues associated with aberrant expression of a connective tissue antigen in an animal, preferably a mammal and most preferably a human. In one embodiment, diagnosis comprises: a) administering (for example, parenterally, subcutaneously, or intraperitoneally) to a subject an effective amount of a labeled molecule which specifically binds to the polypeptide of interest; b) waiting for a time interval following the administering for permitting the labeled molecule to preferentially concentrate at sites in the subject where the polypeptide is expressed (and for unbound labeled molecule to be cleared to background level); c) determining background level; and d) detecting the labeled molecule in the subject, such that detection of labeled molecule above the background level indicates that the subject has a particular disease or disorder associated with aberrant expression of the polypeptide of interest. Background level can be determined by various methods including, comparing the amount of labeled molecule detected to a standard value previously determined for a particular system.

[0340] It will be understood in the art that the size of the subject and the imaging system used will determine the quantity of imaging moiety needed to produce diagnostic images. In the case of a radioisotope moiety, for a human subject, the quantity of radioactivity injected will normally range from about 5 to 20 millicuries of 99 mTc. The labeled antibody or antibody fragment will then preferentially accumulate at the location of cells which contain the specific protein. In vivo tumor imaging is described in S. W. Burchiel et al., “Immunopharmacokinetics of Radiolabeled Antibodies and Their Fragments.” (Chapter 13 in Tumor Imaging: The Radiochemical Detection of Cancer, S. W. Burchiel and B. A. Rhodes, eds., Masson Publishing Inc. (1982)).

[0341] Depending on several variables, including the type of label used and the mode of administration, the time interval following the administration for permitting the labeled molecule to preferentially concentrate at sites in the subject and for unbound labeled molecule to be cleared to background level is 6 to 48 hours or 6 to 24 hours or 6 to 12 hours. In another embodiment the time interval following administration is 5 to 20 days or 5 to 10 days.

[0342] In an embodiment, monitoring of the disease or disorder is carried out by repeating the method for diagnosing the disease or disorder, for example, one month after initial diagnosis, six months after initial diagnosis, one year after initial diagnosis, etc.

[0343] Presence of the labeled molecule can be detected in the patient using methods known in the art for in vivo scanning. These methods depend upon the type of label used. Skilled artisans will be able to determine the appropriate method for detecting a particular label. Methods and devices that may be used in the diagnostic methods of the invention include, but are not limited to, computed tomography (CT), whole body scan such as position emission tomography (PET), magnetic resonance imaging (MRI), and sonography.

[0344] In a specific embodiment, the molecule is labeled with a radioisotope and is detected in the patient using a radiation responsive surgical instrument (Thurston et al., U.S. Pat. No. 5,441,050). In another embodiment, the molecule is labeled with a fluorescent compound and is detected in the patient using a fluorescence responsive scanning instrument. In another embodiment, the molecule is labeled with a positron emitting metal and is detected in the patent using positron emission-tomography. In yet another embodiment, the molecule is labeled with a paramagnetic label and is detected in a patient using magnetic resonance imaging (MRI).

[0345] Kits

[0346] The present invention provides kits that can be used in the above methods. In one embodiment, a kit comprises an antibody of the invention, preferably a purified antibody, in one or more containers. In a specific embodiment, the kits of the present invention contain a substantially isolated polypeptide comprising an epitope which is specifically immunoreactive with an antibody included in the kit. Preferably, the kits of the present invention further comprise a control antibody which does not react with the polypeptide of interest. In another specific embodiment, the kits of the present invention contain a means for detecting the binding of an antibody to a polypeptide of interest (e.g., the antibody may be conjugated to a detectable substrate such as a fluorescent compound, an enzymatic substrate, a radioactive compound or a luminescent compound, or a second antibody which recognizes the first antibody may be conjugated to a detectable substrate).

[0347] In another specific embodiment of the present invention, the kit is a diagnostic kit for use in screening serum containing antibodies specific against proliferative and/or cancerous polynucleotides and polypeptides. Such a kit may include a control antibody that does not react with the polypeptide of interest. Such a kit may include a substantially isolated polypeptide antigen comprising an epitope, which is specifically immunoreactive with at least one anti-polypeptide antigen antibody. Further, such a kit includes means for detecting the binding of said antibody to the antigen (e.g., the antibody may be conjugated to a fluorescent compound such as fluorescein or rhodamine, which can be detected by flow cytometry). In specific embodiments, the kit may include a recombinantly produced or chemically synthesized polypeptide antigen. The polypeptide antigen of the kit may also be attached to a solid support.

[0348] In a more specific embodiment the detecting means of the above-described kit includes a solid support to which said polypeptide antigen is attached. Such a kit may also include a non-attached reporter-labeled anti-human antibody. In this embodiment, binding of the antibody to the polypeptide antigen can be detected by binding of the said reporter-labeled antibody.

[0349] In an additional embodiment, the invention includes a diagnostic kit for use in screening serum containing antigens of the polypeptide of the invention. The diagnostic kit includes a substantially isolated antibody specifically immunoreactive with polypeptide or polynucleotide antigens, and means for detecting the binding of the polynucleotide or polypeptide antigen to the antibody. In one embodiment, the antibody is attached to a solid support. In a specific embodiment, the antibody may be a monoclonal antibody. The detecting means of the kit may include a second, labeled monoclonal antibody. Alternatively, or in addition, the detecting means may include a labeled, competing antigen.

[0350] In one diagnostic configuration, test serum is reacted with a solid phase reagent having a surface-bound antigen obtained by the methods of the present invention. After binding with specific antigen antibody to the reagent and removing unbound serum components by washing, the reagent is reacted with reporter-labeled anti-human antibody to bind reporter to the reagent in proportion to the amount of bound anti-antigen antibody on the solid support. The reagent is again washed to remove unbound labeled antibody, and the amount of reporter associated with the reagent is determined. Typically, the reporter is an enzyme, which is detected by incubating the solid phase in the presence of a suitable fluorometric, luminescent or calorimetric substrate (Sigma, St. Louis, Mo.).

[0351] The solid surface reagent in the above assay is prepared by known techniques for attaching protein material to solid support material, such as polymeric beads, dip sticks, 96-well plate or filter material. These attachment methods generally include non-specific adsorption of the protein to the support or covalent attachment of the protein, typically through a free amine group, to a chemically reactive group on the solid support, such as an activated carboxyl, hydroxyl, or aldehyde group. Alternatively, streptavidin coated plates can be used in conjunction with biotinylated antigen(s).

[0352] Thus, the invention provides an assay system or kit for carrying out this diagnostic method. The kit generally includes a support with surface-bound recombinant antigens, and a reporter-labeled anti-human antibody for detecting surface-bound anti-antigen antibody.

[0353] Uses of the Polynucleotides

[0354] Each of the polynucleotides identified herein can be used in numerous ways as reagents. The following description should be considered exemplary and utilizes known techniques.

[0355] The polynucleotides of the present invention are useful for chromosome identification. There exists an ongoing need to identify new chromosome markers, since few chromosome marking reagents, based on actual sequence data (repeat polymorphisms), are presently available. Each sequence is specifically targeted to and can hybridize with a particular location on an individual human chromosome, thus each polynucleotide of the present invention can routinely be used as a chromosome marker using techniques known in the art. Table 1A, column 8 provides the chromosome location of some of the polynucleotides of the invention. Briefly, sequences can be mapped to chromosomes by preparing PCR primers (preferably at least 15 bp (e.g., 15-25 bp) from the sequences shown in SEQ ID NO:X. Primers can optionally be selected using computer analysis so that primers do not span more than one predicted exon in the genomic DNA. These primers are then used for PCR screening of somatic cell hybrids containing individual human chromosomes. Only those hybrids containing the human gene corresponding to SEQ ID NO:X will yield an amplified fragment.

[0356] Similarly, somatic hybrids provide a rapid method of PCR mapping the polynucleotides to particular chromosomes. Three or more clones can be assigned per day using a single thermal cycler. Moreover, sublocalization of the polynucleotides can be achieved with panels of specific chromosome fragments. Other gene mapping strategies that can be used include in situ hybridization, prescreening with labeled flow-sorted chromosomes, preselection by hybridization to construct chromosome specific-cDNA libraries, and computer mapping techniques (See, e.g., Shuler, Trends Biotechnol 16:456-459 (1998) which is hereby incorporated by reference in its entirety).

[0357] Precise chromosomal location of the polynucleotides can also be achieved using fluorescence in situ hybridization (FISH) of a metaphase chromosomal spread. This technique uses polynucleotides as short as 500 or 600 bases; however, polynucleotides 2,000-4,000 bp are preferred. For a review of this technique, see Verma et al., “Human Chromosomes: a Manual of Basic Techniques,” Pergamon Press, New York (I 988).

[0358] For chromosome mapping, the polynucleotides can be used individually (to mark a single chromosome or a single site on that chromosome) or in panels (for marking multiple sites and/or multiple chromosomes).

[0359] Thus, the present invention also provides a method for chromosomal localization which involves (a) preparing PCR primers from the polynucleotide sequences in Table 1A and/or Table 2 and SEQ ID NO:X and (b) screening somatic cell hybrids containing individual chromosomes.

[0360] The polynucleotides of the present invention would likewise be useful for radiation hybrid mapping, HAPPY mapping, and long range restriction mapping. For a review of these techniques and others known in the art, see, e.g. Dear, “Genome Mapping: A Practical Approach,” IRL Press at Oxford University Press, London (1997); Aydin, J. Mol. Med. 77:691-694 (1999); Hacia et al., Mol. Psychiatry 3:483-492 (1998); Herrick et al., Chromosome Res. 7:409-423 (1999); Hamilton et al., Methods Cell Biol. 62:265-280 (2000); and/or Ott, J. Hered. 90:68-70 (1999), each of which is hereby incorporated by reference in its entirety.

[0361] Once a polynucleotide has been mapped to a precise chromosomal location, the physical position of the polynucleotide can be used in linkage analysis. Linkage analysis establishes coinheritance between a chromosomal location and presentation of a particular disease. (Disease mapping data are found, for example, in V. McKusick, Mendelian Inheritance in Man (available on line through Johns Hopkins University Welch Medical Library).) Column 9 of Table 1A provides an OMIM reference identification number of diseases associated with the cytologic band disclosed in column 8 of Table 1A, as determined using techniques described herein and by reference to Table 5. Assuming 1 megabase mapping resolution and one gene per 20 kb, a cDNA precisely localized to a chromosomal region associated with the disease could be one of 50-500 potential causative genes.

[0362] Thus, once coinheritance is established, differences in a polynucleotide of the invention and the corresponding gene between affected and unaffected individuals can be examined. First, visible structural alterations in the chromosomes, such as deletions or translocations, are examined in chromosome spreads or by PCR. If no structural alterations exist, the presence of point mutations are ascertained. Mutations observed in some or all affected individuals, but not in normal individuals, indicate that the mutation may cause the disease. However, complete sequencing of the polypeptide and the corresponding gene from several normal individuals is required to distinguish the mutation from a polymorphism. If a new polymorphism is identified, this polymorphic polypeptide can be used for further linkage analysis.

[0363] Furthermore, increased or decreased expression of the gene in affected individuals as compared to unaffected individuals can be assessed using the polynucleotides of the invention. Any of these alterations (altered expression, chromosomal rearrangement, or mutation) can be used as a diagnostic or prognostic marker. Diagnostic and prognostic methods, kits and reagents encompassed by the present invention are briefly described below and more thoroughly elsewhere herein (see e.g., the sections labeled “Antibodies”, “Diagnostic Assays”, and “Methods for Detecting Disease of Connective Tissue, Including Cancer”).

[0364] Thus, the invention also provides a diagnostic method useful during diagnosis of a disorder, involving measuring the expression level of polynucleotides of the present invention in cells or body fluid from an individual and comparing the measured gene expression level with a standard level of polynucleotide expression level, whereby an increase or decrease in the gene expression level compared to the standard is indicative of a disorder. Additional non-limiting examples of diagnostic methods encompassed by the present invention are more thoroughly described elsewhere herein (see, e.g., Example 12).

[0365] In still another embodiment, the invention includes a kit for analyzing samples for the presence of proliferative and/or cancerous polynucleotides derived from a test subject, as further described herein. In a general embodiment, the kit includes at least one polynucleotide probe containing a nucleotide sequence that will specifically hybridize with a polynucleotide of the invention and a suitable container. In a specific embodiment, the kit includes two polynucleotide probes defining an internal region of the polynucleotide of the invention, where each probe has one strand containing a 31′mer-end internal to the region. In a further embodiment, the probes may be useful as primers for polymerase chain reaction amplification.

[0366] Where a diagnosis of a related disorder, including, for example, diagnosis of a tumor, has already been made according to conventional methods, the present invention is useful as a prognostic indicator, whereby patients exhibiting enhanced or depressed polynucleotide of the invention expression will experience a worse clinical outcome relative to patients expressing the gene at a level nearer the standard level.

[0367] By “measuring the expression level of polynucleotides of the invention” is intended qualitatively or quantitatively measuring or estimating the level of the polypeptide of the invention or the level of the mRNA encoding the polypeptide of the invention in a first biological sample either directly (e.g., by determining or estimating absolute protein level or mRNA level) or relatively (e.g., by comparing to the polypeptide level or mRNA level in a second biological sample). Preferably, the polypeptide level or mRNA level in the first biological sample is measured or estimated and compared to a standard polypeptide level or mRNA level, the standard being taken from a second biological sample obtained from an individual not having the related disorder or being determined by averaging levels from a population of individuals not having a related disorder. As will be appreciated in the art, once a standard polypeptide level or mRNA level is known, it can be used repeatedly as a standard for comparison.

[0368] By “biological sample” is intended any biological sample obtained from an individual, body fluid, cell line, tissue culture, or other source which contains polypeptide of the present invention or the corresponding mRNA. As indicated, biological samples include body fluids (such as semen, lymph, vaginal pool, sera, plasma, urine, synovial fluid and spinal fluid) which contain the polypeptide of the present invention, and tissue sources found to express the polypeptide of the present invention. Methods for obtaining tissue biopsies and body fluids from mammals are well known in the art. Where the biological sample is to include mRNA, a tissue biopsy is the preferred source.

[0369] The method(s) provided above may preferably be applied in a diagnostic method and/or kits in which polynucleotides and/or polypeptides of the invention are attached to a solid support. In one exemplary method, the support may be a “gene chip” or a “biological chip” as described in U.S. Pat. Nos. 5,837,832, 5,874,219, and 5,856,174. Further, such a gene chip with polynucleotides of the invention attached may be used to identify polymorphisms between the isolated polynucleotide sequences of the invention, with polynucleotides isolated from a test subject. The knowledge of such polymorphisms (i.e., their location, as well as, their existence) would be beneficial in identifying disease loci for many disorders, such as for example, in neural disorders, immune system disorders, muscular disorders, reproductive disorders, gastrointestinal disorders, pulmonary disorders, digestive disorders, cardiovascular disorders, renal disorders, proliferative disorders, and/or cancerous diseases and conditions. Such a method is

[0370] Reproductive System Disorders

[0371] The polynucleotides or polypeptides, or agonists or antagonists of the invention may be used for the diagnosis, treatment, or prevention of diseases and/or disorders of the reproductive system. Reproductive system disorders that can be treated by the compositions of the invention, include, but are not limited to, reproductive system injuries, infections, neoplastic disorders, congenital defects, and diseases or disorders which result in infertility, complications with pregnancy, labor, or parturition, and postpartum difficulties.

[0372] Reproductive system disorders and/or diseases include diseases and/or disorders of the testes, including, but not limited to, testicular atrophy, testicular feminization, cryptorchism (unilateral and bilateral), anorchia, ectopic testis, epididymitis and orchitis (typically resulting from infections such as, for example, gonorrhea, mumps, tuberculosis, and syphilis), testicular torsion, vasitis nodosa, germ cell tumors (e.g., seminomas, embryonal cell carcinomas, teratocarcinomas, choriocarcinomas, yolk sac tumors, and teratomas), stromal tumors (e.g., Leydig cell tumors), hydrocele, hematocele, varicocele, spermatocele, inguinal hernia, and disorders of sperm production (e.g., immotile cilia syndrome, aspermia, asthenozoospermia, azoospermia, oligospermia, and teratozoospermia).

[0373] Reproductive system disorders also include, but are not limited to, disorders of the prostate gland, such as acute non-bacterial prostatitis, chronic non-bacterial prostatitis, acute bacterial prostatitis, chronic bacterial prostatitis, prostatodystonia, prostatosis, granulomatous prostatitis, malacoplakia, benign prostatic hypertrophy or hyperplasia, and prostate neoplastic disorders, including adenocarcinomas, transitional cell carcinomas, ductal carcinomas, and squamous cell carcinomas.

[0374] Additionally, the compositions of the invention may be useful in the diagnosis, treatment, and/or prevention of disorders or diseases of the penis and urethra, including, but not limited to, inflammatory disorders, such as balanoposthitis, balanitis xerotica obliterans, phimosis, paraphimosis, syphilis, herpes simplex virus, gonorrhea, non-gonococcal urethritis, chlamydia, mycoplasma, trichomonas, HIV, AIDS, Reiter's syndrome, condyloma acuminatum, condyloma latum, and pearly penile papules; urethral abnormalities, such as hypospadias, epispadias, and phimosis; premalignant lesions, including Erythroplasia of Queyrat, Bowen's disease, Bowenoid paplosis, giant condyloma of Buscke-Lowenstein, and varrucous carcinoma; penile cancers, including squamous cell carcinomas, carcinoma in situ, verrucous carcinoma, and disseminated penile carcinoma; urethral neoplastic disorders, including penile urethral carcinoma, bulbomembranous urethral carcinoma, and prostatic urethral carcinoma; and erectile disorders, such as priapism, Peyronie's disease, erectile dysfunction, and impotence.

[0375] Moreover, diseases and/or disorders of the vas deferens include, but are not limited to, vasculititis and CBAVD (congenital bilateral absence of the vas deferens); additionally, the polynucleotides, polypeptides, and agonists or antagonists of the present invention may be used in the diagnosis, treatment, and/or prevention of diseases and/or disorders of the seminal vesicles, including but not limited to, hydatid disease, congenital chloride diarrhea, and polycystic kidney disease.

[0376] Other disorders and/or diseases of the male reproductive system that may be diagnosed, treated, and/or prevented with the compositions of the invention include, but are not limited to, Klinefelter's syndrome, Young's syndrome, premature ejaculation, diabetes mellitus, cystic fibrosis, Kartagener's syndrome, high fever, multiple sclerosis, and gynecomastia.

[0377] Further, the polynucleotides, polypeptides, and agonists or antagonists of the present invention may be used in the diagnosis, treatment, and/or prevention of diseases and/or disorders of the vagina and vulva, including, but not limited to, bacterial vaginosis, candida vaginitis, herpes simplex virus, chancroid, granuloma inguinale, lymphogranuloma venereum, scabies, human papillomavirus, vaginal trauma, vulvar trauma, adenosis, chlamydia vaginitis, gonorrhea, trichomonas vaginitis, condyloma acuminatum, syphilis, molluscum contagiosum, atrophic vaginitis, Paget's disease, lichen sclerosus, lichen planus, vulvodynia, toxic shock syndrome, vaginismus, vulvovaginitis, vulvar vestibulitis, and neoplastic disorders, such as squamous cell hyperplasia, clear cell carcinoma, basal cell carcinoma, melanomas, cancer of Bartholin's gland, and vulvar intraepithelial neoplasia.

[0378] Disorders and/or diseases of the uterus that may be diagnosed, treated, and/or prevented with the compositions of the invention include, but are not limited to, dysmenorrhea, retroverted uterus, endometriosis, fibroids, adenomyosis, anovulatory bleeding, amenorrhea, Cushing's syndrome, hydatidiform moles, Asherman's syndrome, premature menopause, precocious puberty, uterine polyps, dysfunctional uterine bleeding (e.g., due to aberrant hormonal signals), and neoplastic disorders, such as adenocarcinomas, keiomyosarcomas, and sarcomas. Additionally, the polypeptides, polynucleotides, or agonists or antagonists of the invention may be useful as a marker or detector of, as well as in the diagnosis, treatment, and/or prevention of congenital uterine abnormalities, such as bicornuate uterus, septate uterus, simple unicornuate uterus, unicornuate uterus with a noncavitary rudimentary horn, unicomuate uterus with a non-communicating cavitary rudimentary horn, unicornuate uterus with a communicating cavitary horn, arcuate uterus, uterine didelfus, and T-shaped uterus.

[0379] Ovarian diseases and/or disorders that may be diagnosed, treated, and/or prevented with the compositions of the invention include, but are not limited to, anovulation, polycystic ovary syndrome (Stein-Leventhal syndrome), ovarian cysts, ovarian hypofunction, ovarian insensitivity to gonadotropins, ovarian overproduction of androgens, right ovarian vein syndrome, amenorrhea, hirutism, and ovarian cancer (including, but not limited to, primary and secondary cancerous growth, Sertoli-Leydig tumors, endometriod carcinoma of the ovary, ovarian papillary serous adenocarcinoma, ovarian mucinous adenocarcinoma, and Ovarian Krukenberg tumors).

[0380] Cervical diseases and/or disorders that may be diagnosed, treated, and/or prevented with the compositions of the invention include, but are not limited to, cervicitis, chronic cervicitis, mucopurulent cervicitis, cervical dysplasia, cervical polyps, Nabothian cysts, cervical erosion, cervical incompetence, and cervical neoplasms (including, for example, cervical carcinoma, squamous metaplasia, squamous cell carcinoma, adenosquamous cell neoplasia, and columnar cell neoplasia).

[0381] Additionally, diseases and/or disorders of the reproductive system that may be diagnosed, treated, and/or prevented with the compositions of the invention include, but are not limited to, disorders and/or diseases of pregnancy, including miscarriage and stillbirth, such as early abortion, late abortion, spontaneous abortion, induced abortion, therapeutic abortion, threatened abortion, missed abortion, incomplete abortion, complete abortion, habitual abortion, missed abortion, and septic abortion; ectopic pregnancy, anemia, Rh incompatibility, vaginal bleeding during pregnancy, gestational diabetes, intrauterine growth retardation, polyhydramnios, HELLP syndrome, abruptio placentae, placenta previa, hyperemesis, preeclampsia, eclampsia, herpes gestationis, and urticaria of pregnancy. Additionally, the polynucleotides, polypeptides, and agonists or antagonists of the present invention may be used in the diagnosis, treatment, and/or prevention of diseases that can complicate pregnancy, including heart disease, heart failure, rheumatic heart disease, congenital heart disease, mitral valve prolapse, high blood pressure, anemia, kidney disease, infectious disease (e.g., rubella, cytomegalovirus, toxoplasmosis, infectious hepatitis, chlamydia, HIV, AIDS, and genital herpes), diabetes mellitus, Graves' disease, thyroiditis, hypothyroidism, Hashimoto's thyroiditis, chronic active hepatitis, cirrhosis of the liver, primary biliary cirrhosis, asthma, systemic lupus eryematosis, rheumatoid arthritis, myasthenia gravis, idiopathic thrombocytopenic purpura, appendicitis, ovarian cysts, gallbladder disorders, and obstruction of the intestine.

[0382] Complications associated with labor and parturition that may be diagnosed, treated, and/or prevented with the compositions of the invention include, but are not limited to, premature rupture of the membranes, pre-term labor, post-term pregnancy, postmaturity, labor that progresses too slowly, fetal distress (e.g., abnormal heart rate (fetal or maternal), breathing problems, and abnormal fetal position), shoulder dystocia, prolapsed umbilical cord, amniotic fluid embolism, and aberrant uterine bleeding.

[0383] Further, diseases and/or disorders of the postdelivery period, that may be diagnosed, treated, and/or prevented with the compositions of the invention, include, but are not limited to, endometritis, myometritis, parametritis, peritonitis, pelvic thrombophlebitis, pulmonary embolism, endotoxemia, pyelonephritis, saphenous thrombophlebitis, mastitis, cystitis, postpartum hemorrhage, and inverted uterus.

[0384] Other disorders and/or diseases of the female reproductive system that may be diagnosed, treated, and/or prevented by the polynucleotides, polypeptides, and agonists or antagonists of the present invention include, but are not limited to, Turner's syndrome, pseudohermaphroditism, premenstrual syndrome, pelvic inflammatory disease, pelvic congestion (vascular engorgement), frigidity, anorgasmia, dyspareunia, ruptured fallopian tube, and Mittelschmerz.

[0385] Developmental and Inherited Disorders

[0386] Polynuceotides or polypeptides, or agonists or antagonists of the present invention may be used to treat, prevent, diagnose, and/or prognose diseases associated with mixed fetal tissues, including, but not limited to, developmental and inherited disorders or defects of the nervous system, musculoskelelal system, execretory system, cardiovascular system, hematopoietic system, gastrointestinal system, reproductive system, and respiratory system. Compositions of the present invention may also be used to treat, prevent, diagnose, and/or prognose developmental and inherited disorders or defects associated with, but not limited to, skin, hair, visual, and auditory tissues, metabolism. Additionally, the compositions of the invention may be useful in the diagnosis, treatment, and/or prevention of disorders or diseases associated with, but not limited to, chromosomal or genetic abnormalities and hyperproliferation or neoplasia.

[0387] Disorders or defects of the nervous system associated with developmental or inherited abnormalities that may be diagnosed, treated, and/or prevented with the compostions of the invention include, but are not limited to, adrenoleukodystrophy, agenesis of corpus callosum, Alexander disease, anencephaly, Angelman syndrome, Arnold-Chiari deformity, Batten disease, Canavan disease, cephalic disorders, Charcot-Marie-Tooth disease, encephalocele, Friedreich's ataxia, Gaucher's disease, Gorlin syndrome, Hallervorden-Spatz disease, hereditary spastic paraplegia, Huntington disease, hydranencephaly, hydrocephalus, Joubert syndrome, Lesch-Nyhan syndrome, leukodystrophy, Menkes disease, microcephaly, Niemann-Pick Type C1, neurofibromatosis, porencephaly, progeria, proteus syndrome, Refsum disease, spina bifida, Sturge-Weber syndrome, Tay-Sachs disease, tuberous sclerosis, and von Hippel-Lindau disease.

[0388] Developmental and inherited disorders resulting in disorders or defects of the musculoskeletal system that may be diagnosed, treated, and/or prevented with the compositions of the invention -include, but are not limited to, achondroplasia, atlanto-occipital fusion, arthrogryposis mulitplex congenita, autosomal recessive muscular dystrophy, Becker's muscular dystrophy, cerebral palsy, choanal atresia, cleft lip, cleft palate, clubfoot, congenital amputation, congenital dislocation of the hip, congenital torticollis, congenital scoliosis, dopa-repsonsive dystonia, Duchenne muscular dystrophy, early-onset generalized dystonia, femoral torsion, Gorlin syndrome, hypophosphatasia, Klippel-Feil syndrome, knee dislocation, myoclonic dystonia, myotonic dystrophy, nail-patella syndrome, osteogenesis imperfecta, paroxysmal dystonia, progeria, prune-belly syndrome, rapid-onset dystonia parkinsonism, scolosis, syndactyly, Treacher Collins' syndrome, velocardiofacial syndrome, and X-linked dystonia-parkinsonism.

[0389] Developmental or hereditary disorders or defects of the excretory system that may be diagnosed, treated, and/or prevented with the compositions of the invention include, but are not limited to, Alport's syndrome, Bartter's syndrome, bladder diverticula, bladder exstrophy, cystinuria, epispadias, Fanconi's syndrome, Hartnup disease, horseshoe kidney, hypospadias, kidney agenesis, kidney ectopia, kidney malrotation, Liddle's syndrome, medullary cystic disease, medullary sponge, multicystic kidney, kidney polycystic kidney disease, nail-patella syndrome, Potter's syndrome, urinary tract flow obstruction, vitamin D-resistant rickets, and Wilm's tumor.

[0390] Cardiovascular disorders or defects of developmental or hereditary origin that may be diagnosed, treated, and/or prevented with the compositions of the inventtion include, but are not limited to, aortic valve stenosis, atrial septal defects, artioventricular (A-V) canal defect, bicuspid aortic valve, coarctation or the aorta, dextrocardia, Ebstein's anomaly, Eisenmenger's complex, hypoplastic left heart syndrome, Marfan syndrome, patent ductus arteriosus, progeria, pulmonary atresia, pulmonary valve stenosis, subaortic stenosis, tetralogy of fallot, total anomalous pulmonary venous (P-V) connection, transposition of the great arteries, tricuspid atresia, truncus arteriosus, ventricular septal defects. Developmental or inherited disorders resulting in disorders involving the hematopoietic system that may be diagnosed, treated, and/or prevented with the compositions of the invention include, but not limited to, Bernard-Soulier syndrome, Chédiak-Higashi syndrome, hemophilia, Hermansky-Pudlak syndrome, sickle cell anemia, storage pool disease, thromboxane A2 dysfunction, thrombasthenia, and von Willebrand's disease.

[0391] The compositions of the invention may also be used to diagnose, treat, and/or prevent developmental and inherited disorders resulting in disorders or defects of the gastrointestinal system, including, but not limited to, anal atresia, biliary atresia, esophageal atresia, diaphragmatic hernia, Hirschsprung's disease, Meckel's diverticulum, oligohydramnios, omphalocele, polyhydramnios, porphyria, situs inversus viscera. Developmental or inherited disorders resulting in metabolic disorders that may be diagnosed, treated, and/or prevented with the compositions of the invention include, but are not limited to, alpha-i antitrypsin deficiency, cystic fibrosis, hemochromatosis, lysosomal storage disease, phenylketonuria, Wilson's disease, and Zellweger syndrome.

[0392] Disorders of the reproductive system that are developmentally or hereditary related that may also be diagnosed, treated, and/or prevented with the compositions of the invention include, but are not limited to, androgen insensitivity syndrome, ambiguous genitalia, autosomal sex reversal, congenital adreneal hyperplasia, gonadoblastoma, ovarian germ cell cancer, pseudohermphroditism, true hermaphroditism, undescended testis, XX male syndrome, and XY female type gonadal dysgenesis. The compositions of the invention may also be used to diagnose, treat, and/or prevent developmental or inherited respiratory defects including, but not limited to, askin tumor, azygos lobe, congenital diaphragmatic hernia, congenital lobar emphysema, cystic adenomatoid malformation, lobar emphysema, hyaline membrane disease, and pectus excavatum.

[0393] Developmental or inherited disorders may also result from chromosomal or genetic aberration that may be diagnosed, treated, and/or prevented with the compositions of the invention including, but not limited to, 4p− syndrome, cri du chat syndrome, Digeorge syndrome, Down's syndrome, Edward's syndrome, fragile X syndrome, Klinefelter's syndrome, Patau's syndrome, Prader-Willi syndrome, progeria, Turner's syndrome, triple X syndrome, and XYY syndrome. Other developmental disorders that can be diagnosed, treated, and/or prevented with the compositions of the invention, include, but are not limited to, fetal alcohol syndrome, and can be caused by environmental factors surrounding the developing fetus.

[0394] The compositions of the invention may further be able to be used to diagnose, treat, and/or prevent errors in development or a genetic disposition that may result in hyperproliferative disorders or neoplasms, including, but not limited to, acute childhood lymphoblastic leukemia, askin tumor, Beckwith-Wiedemann syndrome, childhood acute myeloid leukemia, childhood brain stem glioma, childhood cerebellar astrocytoma, childhood extracranial germ cell tumors childhood (primary), gonadoblastoma, hepatocellular cancer, childhood Hodgkin's disease, childhood Hodgkin's lymphoma, childhood hypothalamic and visual pathway glioma, childhood (primary) liver cancer, childhood lymphoblastic leukemia, childhood medulloblastoma, childhood non-Hodgkin's lymphoma, childhood pineal and supratentorial primitive neuroectodermal tumors, childhood primary liver cancer, childhood rhabdomyosarcoma, childhood soft tissue sarcoma, Gorlin syndrome, familial multiple endrocrine neoplasia type I, neuroblastoma, ovarian germ cell cancer, pheochromocytoma, retinoblastoma, and Wilm's tumor.

[0395] Polypeptides may be administered using any method known in the art, including, but not limited to, direct needle injection at the delivery site, intravenous injection, topical administration, catheter infusion, biolistic injectors, particle accelerators, gelfoam sponge depots, other commercially available depot materials, osmotic pumps, oral or suppositorial solid pharmaceutical formulations, decanting or topical applications during surgery, aerosol delivery. Such methods are known in the art. Polypeptides may be administered as part of a Therapeutic, described in more detail below. Methods of delivering polynucleotides are described in more detail herein.

[0396] Diseases at the Cellular Level

[0397] Diseases associated with increased cell survival or the inhibition of apoptosis that could be treated, prevented, diagnosed and/or prognosed using polynucleotides or polypeptides, as well as antagonists or agonists of the present invention, include cancers (such as follicular lymphomas, carcinomas with p53 mutations, and hormone-dependent tumors, including, but not limited to colon cancer, cardiac tumors, pancreatic cancer, melanoma, retinoblastoma, glioblastoma, lung cancer, intestinal cancer, testicular cancer, stomach cancer, neuroblastoma, myxoma, myoma, lymphoma, endothelioma, osteoblastoma, osteoclastoma, osteosarcoma, chondrosarcoma, adenoma, breast cancer, prostate cancer, Kaposi's sarcoma and ovarian cancer); autoimmune disorders (such as, multiple sclerosis, Sjogren's syndrome, Hashimoto's thyroiditis, biliary cirrhosis, Behcet's disease, Crohn's disease, polymyositis, systemic lupus erythematosus and immune-related glomerulonephritis and rheumatoid arthritis) and viral infections (such as herpes viruses, pox viruses and adenoviruses), inflammation, graft v. host disease, acute graft rejection, and chronic graft rejection.

[0398] In preferred embodiments, polynucleotides, polypeptides, and/or antagonists of the invention are used to inhibit growth, progression, and/or metastasis of cancers, in particular those [listed above] involving connective tissue.

[0399] Additional diseases or conditions associated with increased cell survival that could be treated or detected by polynucleotides or polypeptides, or agonists or antagonists of the present invention include, but are not limited to, progression, and/or metastases of malignancies and related disorders such as leukemia (including acute leukemias (e.g., acute lymphocytic leukemia, acute myelocytic leukemia (including myeloblastic, promyelocytic, myelomonocytic, monocytic, and erythroleukemia)) and chronic leukemias (e.g., chronic myelocytic (granulocytic) leukemia and chronic lymphocytic leukemia)), polycythemia vera, lymphomas (e.g., Hodgkin's disease and non-Hodgkin's disease), multiple myeloma, Waldenstrom's macroglobulinemia, heavy chain disease, and solid tumors including, but not limited to, sarcomas and carcinomas such as fibrosarcoma, myxosarcoma, liposarcoma, chondrosarcoma, osteogenic sarcoma, chordoma, angiosarcoma, endotheliosarcoma, lymphangiosarcoma, lymphangioendotheliosarcoma, synovioma, mesothelioma, Ewing's tumor, leiomyosarcoma, rhabdomyosarcoma, colon carcinoma, pancreatic cancer, breast cancer, ovarian cancer, prostate cancer, squamous cell carcinoma, basal cell carcinoma, adenocarcinoma, sweat gland carcinoma, sebaceous gland carcinoma, papillary carcinoma, papillary adenocarcinomas, cystadenocarcinoma, medullary carcinoma, bronchogenic carcinoma, renal cell carcinoma, hepatoma, bile duct carcinoma, choriocarcinoma, seminoma, embryonal carcinoma, Wilm's tumor, cervical cancer, testicular tumor, lung carcinoma, small cell lung carcinoma, bladder carcinoma, epithelial carcinoma, glioma, astrocytoma, medulloblastoma, craniopharyngioma, ependymoma, pinealoma, hemangioblastoma, acoustic neuroma, oligodendroglioma, menangioma, melanoma, neuroblastoma, and retinoblastoma.

[0400] Diseases associated with increased apoptosis that could be treated, prevented, diagnosted, and/or prognosed using polynucleotides or polypeptides, as well as agonists or antagonists of the present invention, include, but are not limited to, AIDS; neurodegenerative disorders (such as Alzheimer's disease, Parkinson's disease, Amyotrophic lateral sclerosis, Retinitis pigmentosa, Cerebellar degeneration and brain tumor or prior associated disease); autoimmune disorders (such as, multiple sclerosis, Sjogren's syndrome, Hashimoto's thyroiditis, biliary cirrhosis, Behcet's disease, Crohn's disease, polymyositis, systemic lupus erythematosus and immune-related glomerulonephritis and rheumatoid arthritis) myelodysplastic syndromes (such as aplastic anemia), graft v. host disease, ischemic injury (such as that caused by myocardial infarction, stroke and reperfusion injury), liver injury (e.g., hepatitis related liver injury, ischemia/reperfusion injury, cholestosis (bile duct injury) and liver cancer); toxin-induced liver disease (such as that caused by alcohol), septic shock, cachexia and anorexia.

[0401] Wound Healing and Epithelial Cell Proliferation

[0402] In accordance with yet a further aspect of the present invention, there is provided a process for utilizing polynucleotides or polypeptides, as well as agonists or antagonists of the present invention, for therapeutic purposes, for example, to stimulate epithelial cell proliferation and basal keratinocytes for the purpose of wound healing, and to stimulate hair follicle production and healing of dermal wounds. Polynucleotides or polypeptides, as well as agonists or antagonists of the present invention, may be clinically useful in stimulating wound healing including surgical wounds, excisional wounds, deep wounds involving damage of the dermis and epidermis, eye tissue wounds, dental tissue wounds, oral cavity wounds, diabetic ulcers, dermal ulcers, cubitus ulcers, arterial ulcers, venous stasis ulcers, bums resulting from heat exposure or chemicals, and other abnormal wound healing conditions such as uremia, malnutrition, vitamin deficiencies and complications associated with systemic treatment with steroids, radiation therapy and antineoplastic drugs and antimetabolites. Polynucleotides or polypeptides, as well as agonists or antagonists of the present invention, could be used to promote dermal reestablishment subsequent to dermal loss.

[0403] Polynucleotides or polypeptides, as well as agonists or antagonists of the present invention, could be used to increase the adherence of skin grafts to a wound bed and to stimulate re-epithelialization from the wound bed. The following are types of grafts that polynucleotides or polypeptides, agonists or antagonists of the present invention, could be used to increase adherence to a wound bed: autografts, artificial skin, allografts, autodernic graft, autoepdennic grafts, avacular grafts, Blair-Brown grafts, bone graft, brephoplastic grafts, cutis graft, delayed graft, dermic graft, epidermic graft, fascia graft, full thickness graft, heterologous graft, xenograft, homologous graft, hyperplastic graft, lamellar graft, mesh graft, mucosal graft, Ollier-Thiersch graft, omenpal graft, patch graft, pedicle graft, penetrating graft, split skin graft, thick split graft. Polynucleotides or polypeptides, as well as agonists or antagonists of the present invention, can be used to promote skin strength and to improve the appearance of aged skin.

[0404] It is believed that polynucleotides or polypeptides, as well as agonists or antagonists of the present invention, will also produce changes in hepatocyte proliferation, and epithelial cell proliferation in the lung, breast, pancreas, stomach, small intestine, and large intestine. Polynucleotides or polypeptides, as well as agonists or antagonists of the present invention, could promote proliferation of epithelial cells such as sebocytes, hair follicles, hepatocytes, type II pneumocytes, mucin-producing goblet cells, and other epithelial cells and their progenitors contained within the skin, lung, liver, and gastrointestinal tract. Polynucleotides or polypeptides, agonists or antagonists of the present invention, may promote proliferation of endothelial cells, keratinocytes, and basal keratinocytes.

[0405] Polynucleotides or polypeptides, as well as agonists or antagonists of the present invention, could also be used to reduce the side effects of gut toxicity that result from radiation, chemotherapy treatments or viral infections. Polynucleotides or polypeptides, as well as agonists or antagonists of the present invention, may have a cytoprotective effect on the small intestine mucosa. Polynucleotides or polypeptides, as well as agonists or antagonists of the present invention, may also stimulate healing of mucositis (mouth ulcers) that result from chemotherapy and viral infections.

[0406] Polynucleotides or polypeptides, as well as agonists or antagonists of the present invention, could further be used in full regeneration of skin in full and partial thickness skin defects, including bums, (i.e., repopulation of hair follicles, sweat glands, and sebaceous glands), treatment of other skin defects such as psoriasis. Polynucleotides or polypeptides, as well as agonists or antagonists of the present invention, could be used to treat epidermolysis bullosa, a defect in adherence of the epidermis to the underlying dermis which results in frequent, open and painful blisters by accelerating reepithelialization of these lesions. Polynucleotides or polypeptides, as well as agonists or antagonists of the present invention, could also be used to treat gastric and doudenal ulcers and help heal by scar formation of the mucosal lining and regeneration of glandular mucosa and duodenal mucosal lining more rapidly. Inflammatory bowel diseases, such as Crohn's disease and ulcerative colitis, are diseases, which result in destruction of the mucosal surface of the small or large intestine, respectively. Thus, polynucleotides or polypeptides, as well as agonists or antagonists of the present invention, could be used to promote the resurfacing of the mucosal surface to aid more rapid healing and to prevent progression of inflammatory bowel disease. Treatment with polynucleotides or polypeptides, agonists or antagonists of the present invention, is expected to have a significant effect on the production of mucus throughout the gastrointestinal tract and could be used to protect the intestinal mucosa from injurious substances that are ingested or following surgery. Polynucleotides or polypeptides, as well as agonists or antagonists of the present invention, could be used to treat diseases associate with the under expression.

[0407] Moreover, polynucleotides or polypeptides, as well as agonists or antagonists of the present invention, could be used to prevent and heal damage to the lungs due to various pathological states. Polynucleotides or polypeptides, as well as agonists or antagonists of the present invention, could stimulate proliferation and differentiation and promote the repair of alveoli and brochiolar epithelium to prevent or treat acute or chronic lung damage. For example, emphysema, which results in the progressive loss of aveoli, and inhalation injuries, i.e., resulting from smoke inhalation and bums, that cause necrosis of the bronchiolar epithelium and alveoli could be effectively treated using polynucleotides or polypeptides, agonists or antagonists of the present invention. Also, polynucleotides or polypeptides, as well as agonists or antagonists of the present invention, could be used to stimulate the proliferation of and differentiation of type II pneumocytes, which may help treat or prevent disease such as hyaline membrane diseases, such as infant respiratory distress syndrome and bronchopulmonary displasia, in premature infants.

[0408] Polynucleotides or polypeptides, as well as agonists or antagonists of the present invention, could stimulate the proliferation and differentiation of hepatocytes and, thus, could be used to alleviate or treat liver diseases and pathologies such as fulminant liver failure caused by cirrhosis, liver damage caused by viral hepatitis and toxic substances (i.e., acetaminophen, carbon tetraholoride and other hepatotoxins known in the art).

[0409] In addition, polynucleotides or polypeptides, as well as agonists or antagonists of the present invention, could be used treat or prevent the onset of diabetes mellitus. In patients with newly diagnosed Types I and II diabetes, where some islet cell function remains, polynucleotides or polypeptides, as well as agonists or antagonists of the present invention, could be used to maintain the islet function so as to alleviate, delay or prevent permanent manifestation of the disease. Also, polynucleotides or polypeptides, as well as agonists or antagonists of the present invention, could be used as an auxiliary in islet cell transplantation to improve or promote islet cell function.

[0410] Infectious Disease

[0411] Polynucleotides or polypeptides, as well as agonists or antagonists of the present invention can be used to treat or detect infectious agents. For example, by increasing the immune response, particularly increasing the proliferation and differentiation of B and/or T cells, infectious diseases may be treated. The immune response may be increased by either enhancing an existing immune response, or by initiating a new immune response. Alternatively, polynucleotides or polypeptides, as well as agonists or antagonists of the present invention may also directly inhibit the infectious agent, without necessarily eliciting an immune response.

[0412] Viruses are one example of an infectious agent that can cause disease or symptoms that can be treated or detected by a polynucleotide or polypeptide and/or agonist or antagonist of the present invention. Examples of viruses, include, but are not limited to Examples of viruses, include, but are not limited to the following DNA and RNA viruses and viral families: Arbovirus, Adenoviridae, Arenaviridae, Arterivirus, Birnaviridae, Bunyaviridae, Caliciviridae, Circoviridae, Coronaviridae, Dengue, EBV, HIV, Flaviviridae, Hepadnaviridae (Hepatitis), Herpesviridae (such as, Cytomegalovirus, Herpes Simplex, Herpes Zoster), Mononegavirus (e.g., Paramyxoviridae, Morbillivirus, Rhabdoviridae), Orthomyxoviridae (e.g., Influenza A, Influenza B, and parainfluenza), Papiloma virus, Papovaviridae, Parvoviridae, Picomaviridae, Poxyiridae (such as Smallpox or Vaccinia), Reoviridae (e.g., Rotavirus), Retroviridae (HTLV-I, HTLV-II, Lentivirus), and Togaviridae (e.g., Rubivirus). Viruses falling within these families can cause a variety of diseases or symptoms, including, but not limited to: arthritis, bronchiollitis, respiratory syncytial virus, encephalitis, eye infections (e.g., conjunctivitis, keratitis), chronic fatigue syndrome, hepatitis (A, B, C, E, Chronic Active, Delta), Japanese B encephalitis, Junin, Chikungunya, Rift Valley fever, yellow fever, meningitis, opportunistic infections (e.g., AIDS), pneumonia, Burkitt's Lymphoma, chickenpox, hemorrhagic fever, Measles, Mumps, Parainfluenza, Rabies, the common cold, Polio, leukemia, Rubella, sexually transmitted diseases, skin diseases (e.g., Kaposi's, warts), and viremia. polynucleotides or polypeptides, or agonists or antagonists of the invention, can be used to treat or detect any of these symptoms or diseases. In specific embodiments, polynucleotides, polypeptides, or agonists or antagonists of the invention are used to treat: meningitis, Dengue, EBV, and/or hepatitis (e.g., hepatitis B). In an additional specific embodiment polynucleotides, polypeptides, or agonists or antagonists of the invention are used to treat patients nonresponsive to one or more other commercially available hepatitis vaccines. In a further specific embodiment polynucleotides, polypeptides, or agonists or antagonists of the invention are used to treat AIDS.

[0413] Similarly, bacterial or fungal agents that can cause disease or symptoms and that can be treated or detected by a polynucleotide or polypeptide and/or agonist or antagonist of the present invention include, but not limited to, include, but not limited to, the following Gram-Negative and Gram-positive bacteria and bacterial families and fungi: Actinomycetales (e.g., Corynebacterium, Mycobacterium, Norcardia), Cryptococcus neoformans, Aspergillosis, Bacillaceae (e.g., Anthrax, Clostridium), Bacteroidaceae, Blastomycosis, Bordetella, Borrelia (e.g., Borrelia burgdorferi, Brucellosis, Candidiasis, Campylobacter, Coccidioidomycosis, Cryptococcosis, Dermatocycoses, E. coli (e.g., Enterotoxigenic E. coli and Enterohemorrhagic E. coli), Enterobacteriaceae (Klebsiella, Salmonella (e.g., Salmonella typhi, and Salmonella paratyphi), Serratia, Yersinia), Erysipelothrix, Helicobacter, Legionellosis, Leptospirosis, Listeria, Mycoplasmatales, Mycobacterium leprae, Vibrio cholerae, Neisseriaceae (e.g., Acinetobacter, Gonorrhea, Menigococcal), Meisseria meningitidis, Pasteurellacea Infections (e.g., Actinobacillus, Heamophilus (e.g., Heamophilus influenza type B), Pasteurella), Pseudomonas, Rickettsiaceae, Chlamydiaceae, Treponema spp., Leptospira spp., Shigella spp., Staphylococcal, Meningiococcal, Pneumococcal and Streptococcal (e.g., Streptococcus pneumoniae and Group B Streptococcus). These bacterial or fungal families can cause the following diseases or symptoms, including, but not limited to: bacteremia, endocarditis, eye infections (conjunctivitis, tuberculosis, uveitis), gingivitis, opportunistic infections (e.g., AIDS related infections), paronychia, prosthesis-related infections, Reiter's Disease, respiratory tract infections, such as Whooping Cough or Empyema, sepsis, Lyme Disease, Cat-Scratch Disease, Dysentery, Paratyphoid Fever, food poisoning, Typhoid, pneumonia, Gonorrhea, meningitis (e.g., mengitis types A and B), Chlamydia, Syphilis, Diphtheria, Leprosy, Paratuberculosis, Tuberculosis, Lupus, Botulism, gangrene, tetanus, impetigo, Rheumatic Fever, Scarlet Fever, sexually transmitted diseases, skin diseases (e.g., cellulitis, dermatocycoses), toxemia, urinary tract infections, wound infections. Polynucleotides or polypeptides, agonists or antagonists of the invention, can be used to treat or detect any of these symptoms or diseases. In specific embodiments, Ppolynucleotides, polypeptides, agonists or antagonists of the invention are used to treat: tetanus, Diptheria, botulism, and/or meningitis type B.

[0414] Moreover, parasitic agents causing disease or symptoms that can be treated or detected by a polynucleotide or polypeptide and/or agonist or antagonist of the present invention include, but not limited to, the following families or class: Amebiasis, Babesiosis, Coccidiosis, Cryptosporidiosis, Dientamoebiasis, Dourine, Ectoparasitic, Giardiasis, Helminthiasis, Leishmaniasis, Theileriasis, Toxoplasmosis, Trypanosomiasis, and Trichomonas and Sporozoans (e.g., Plasmodium virax, Plasmodium falciparium, Plasmodium malariae and Plasmodium ovale). These parasites can cause a variety of diseases or symptoms, including, but not limited to: Scabies, Trombiculiasis, eye infections, intestinal disease (e.g., dysentery, giardiasis), liver disease, lung disease, opportunistic infections (e.g., AIDS related), malaria, pregnancy complications, and toxoplasmosis, polynucleotides or polypeptides, or agonists or antagonists of the invention, can be used to treat or detect any of these symptoms or diseases.

[0415] Polynucleotides or polypeptides, as well as agonists or antagonists of the present invention of the present invention could either be by administering an effective amount of a polypeptide to the patient, or by removing cells from the patient, supplying the cells with a polynucleotide of the present invention, and returning the engineered cells to the patient (ex vivo therapy). Moreover, the polypeptide or polynucleotide of the present invention can be used as an antigen in a vaccine to raise an immune response against infectious disease.

[0416] Regeneration

[0417] Polynucleotides or polypeptides, as well as agonists or antagonists of the present invention can be used to differentiate, proliferate, and attract cells, leading to the regeneration of tissues. (See, Science 276:59-87 (1997).) The regeneration of tissues could be used to repair, replace, or protect tissue damaged by congenital defects, trauma (wounds, bums, incisions, or ulcers), age, disease (e.g. osteoporosis, osteocarthritis, periodontal disease, liver failure), surgery, including cosmetic plastic surgery, fibrosis, reperfusion injury, or systemic cytokine damage.

[0418] Tissues that could be regenerated using the present invention include organs (e.g., pancreas, liver, intestine, kidney, skin, endothelium), muscle (smooth, skeletal or cardiac), vasculature (including vascular and lymphatics), nervous, hematopoietic, and skeletal (bone, cartilage, tendon, and ligament) tissue. Preferably, regeneration occurs without or decreased scarring. Regeneration also may include angiogenesis.

[0419] Moreover, polynucleotides or polypeptides, as well as agonists or antagonists of the present invention, may increase regeneration of tissues difficult to heal. For example, increased tendon/ligament regeneration would quicken recovery time after damage. Polynucleotides or polypeptides, as well as agonists or antagonists of the present invention could also be used prophylactically in an effort to avoid damage. Specific diseases that could be treated include of tendinitis, carpal tunnel syndrome, and other tendon or ligament defects. A further example of tissue regeneration of non-healing wounds includes pressure ulcers, ulcers associated with vascular insufficiency, surgical, and traumatic wounds.

[0420] Similarly, nerve and brain tissue could also be regenerated by using polynucleotides or polypeptides, as well as agonists or antagonists of the present invention, to proliferate and differentiate nerve cells. Diseases that could be treated using this method include central and peripheral nervous system diseases, neuropathies, or mechanical and traumatic disorders (e.g., spinal cord disorders, head trauma, cerebrovascular disease, and stoke). Specifically, diseases associated with peripheral nerve injuries, peripheral neuropathy (e.g., resulting from chemotherapy or other medical therapies), localized neuropathies, and central nervous system diseases (e.g., Alzheimer's disease, Parkinson's disease, Huntington's disease, amyotrophic lateral sclerosis, and Shy-Drager syndrome), could all be treated using the polynucleotides or polypeptides, as well as agonists or antagonists of the present invention.

[0421] Chemotaxis

[0422] Polynucleotides or polypeptides, as well as agonists or antagonists of the present invention may have chemotaxis activity. A chemotaxic molecule attracts or mobilizes cells (e.g., monocytes, fibroblasts, neutrophils, T-cells, mast cells, eosinophils, epithelial and/or endothelial cells) to a particular site in the body, such as inflammation, infection, or site of hyperproliferation. The mobilized cells can then fight off and/or heal the particular trauma or abnormality.

[0423] Polynucleotides or polypeptides, as well as agonists or antagonists of the present invention may increase chemotaxic activity of particular cells. These chemotactic molecules can then be used to treat inflammation, infection, hyperproliferative disorders, or any immune system disorder by increasing the number of cells targeted to a particular location in the body. For example, chemotaxic molecules can be used to treat wounds and other trauma to tissues by attracting immune cells to the injured location. Chemotactic molecules of the present invention can also attract fibroblasts, which can be used to treat wounds.

[0424] It is also contemplated that polynucleotides or polypeptides, as well as agonists or antagonists of the present invention may inhibit chemotactic activity. These molecules could also be used to treat disorders. Thus, polynucleotides or polypeptides, as well as agonists or antagonists of the present invention could be used as an inhibitor of chemotaxis.

[0425] Binding Activity

[0426] A polypeptide of the present invention may be used to screen for molecules that bind to the polypeptide or for molecules to which the polypeptide binds. The binding of the polypeptide and the molecule may activate (agonist), increase, inhibit (antagonist), or decrease activity of the polypeptide or the molecule bound. Examples of such molecules include antibodies, oligonucleotides, proteins (e.g., receptors), or small molecules.

[0427] Preferably, the molecule is closely related to the natural ligand of the polypeptide, e.g., a fragment of the ligand, or a natural substrate, a ligand, a structural or functional mimetic. (See, Coligan et al., Current Protocols in Immunology 1(2):Chapter 5 (1991).) Similarly, the molecule can be closely related to the natural receptor to which the polypeptide binds, or at least, a fragment of the receptor capable of being bound by the polypeptide (e.g., active site). In either case, the molecule can be rationally designed using known techniques.

[0428] Preferably, the screening for these molecules involves producing appropriate cells, which express the polypeptide. Preferred cells include cells from mammals, yeast, Drosophila, or E. Coli. Cells expressing the polypeptide (or cell membrane containing the expressed polypeptide) are then preferably contacted with a test compound potentially containing the molecule to observe binding, stimulation, or inhibition of activity of either the polypeptide or the molecule.

[0429] The assay may simply test binding of a candidate compound to the polypeptide, wherein binding is detected by a label, or in an assay involving competition with a labeled competitor. Further, the assay may test whether the candidate compound results in a signal generated by binding to the polypeptide.

[0430] Alternatively, the assay can be carried out using cell-free preparations, polypeptide/molecule affixed to a solid support, chemical libraries, or natural product mixtures. The assay may also simply comprise the steps of mixing a candidate compound with a solution containing a polypeptide, measuring polypeptide/molecule activity or binding, and comparing the polypeptidelmolecule activity or binding to a standard.

[0431] Preferably, an ELISA assay can measure polypeptide level or activity in a sample (e.g., biological sample) using a monoclonal or polyclonal antibody. The antibody can measure polypeptide level or activity by either binding, directly or indirectly, to the polypeptide or by competing with the polypeptide for a substrate.

[0432] Additionally, the receptor to which the polypeptide of the present invention binds can be identified by numerous methods known to those of skill in the art, for example, ligand panning and FACS sorting (Coligan, et al., Current Protocols in Immun., 1(2), Chapter 5, (1991)). For example, expression cloning is employed wherein polyadenylated RNA is prepared from a cell responsive to the polypeptides, for example, NIH3T3 cells which are known to contain multiple receptors for the FGF family proteins, and SC-3 cells, and a cDNA library created from this RNA is divided into pools and used to transfect COS cells or other cells that are not responsive to the polypeptides. Transfected cells which are grown on glass slides are exposed to the polypeptide of the present invention, after they have been labeled. The polypeptides can be labeled by a variety of means including iodination or inclusion of a recognition site for a site-specific protein kinase.

[0433] Following fixation and incubation, the slides are subjected to auto-radiographic analysis. Positive pools are identified and sub-pools are prepared and re-transfected using an iterative sub-pooling and re-screening process, eventually yielding a single clones that encodes the putative receptor.

[0434] As an alternative approach for receptor identification, the labeled polypeptides can be photoaffinity linked with cell membrane or extract preparations that express the receptor molecule. Cross-linked material is resolved by PAGE analysis and exposed to X-ray film. The labeled complex containing the receptors of the polypeptides can be excised, resolved into peptide fragments, and subjected to protein microsequencing. The amino acid sequence obtained from microsequencing would be used to design a set of degenerate oligonucleotide probes to screen a cDNA library to identify the genes encoding the putative receptors.

[0435] Moreover, the techniques of gene-shuffling, motif-shuffling, exon-shuffling, and/or codon-shuffling (collectively referred to as “DNA shuffling”) may be employed to modulate the activities of the polypeptide of the present invention thereby effectively generating agonists and antagonists of the polypeptide of the present invention. See generally, U.S. Pat. Nos. 5,605,793, 5,811,238, 5,830,721, 5,834,252, and 5,837,458, and Patten, P. A., et al., Curr. Opinion Biotechnol. 8:724-33 (1-997); Harayama, S. Trends Biotechnol. 16(2):76-82 (1998); Hansson L. O., et al., J. Mol. Biol. 287:265-76 (1999); and Lorenzo, M. M. and Blasco, R. Biotechniques 24(2):308-13 (1998); each of these patents and publications are hereby incorporated by reference). In one embodiment, alteration of polynucleotides and corresponding polypeptides may be achieved by DNA shuffling. DNA shuffling involves the assembly of two or more DNA segments into a desired molecule by homologous, or site-specific, recombination. In another embodiment, polynucleotides and corresponding polypeptides may be altered by being subjected to random mutagenesis by error-prone PCR, random nucleotide insertion or other methods prior to recombination. In another embodiment, one or more components, motifs, sections, parts, domains, fragments, etc., of the polypeptide of the present invention may be recombined with one or more components, motifs, sections, parts, domains, fragments, etc. of one or more heterologous molecules. In preferred embodiments, the heterologous molecules are family members. In further preferred embodiments, the heterologous molecule is a growth factor such as, for example, platelet-derived growth factor (PDGF), insulin-like growth factor (IGF-I), transforming growth factor (TGF)-alpha, epidermal growth factor (EGF), fibroblast growth factor (FGF), TGF-beta, bone morphogenetic protein (BMP)-2, BMP-4, BMP-5, BMP-6, BMP-7, activins A and B, decapentaplegic(dpp), 60A, OP-2, dorsalin, growth differentiation factors (GDFs), nodal, MIS, inhibin-alpha, TGF-betal, TGF-beta2, TGF-beta3, TGF-beta5, and glial-derived neurotrophic factor (GDNF).

[0436] Other preferred fragments are biologically active fragments of the polypeptide of the present invention. Biologically active fragments are those exhibiting activity similar, but not necessarily identical, to an activity of the polypeptide of the present invention. The biological activity of the fragments may include an improved desired activity, or a decreased undesirable activity.

[0437] Additionally, this invention provides a method of screening compounds to identify those, which modulate the action of the polypeptide of the present invention. An example of such an assay comprises combining a mammalian fibroblast cell, the polypeptide of the present invention, the compound to be screened and ³[H] thymidine under cell culture conditions where the fibroblast cell would normally proliferate. A control assay may be performed in the absence of-the compound to be screened and compared to the amount of fibroblast proliferation in the presence of the compound to determine if the compound stimulates proliferation by determining the uptake of ³[H] thymidine in each case. The amount of fibroblast cell proliferation is measured by liquid scintillation chromatography, which measures the incorporation of ³[H] thymidine. Both agonist and antagonist compounds may be identified by this procedure.

[0438] In another method, a mammalian cell or membrane preparation expressing a receptor for a polypeptide of the present invention is incubated with a labeled polypeptide of the present invention in the presence of the compound. The ability of the compound to enhance or block this interaction could then be measured. Alternatively, the response of a known second messenger system following interaction of a compound to be screened and the receptor is measured and the ability of the compound to bind to the receptor and elicit a second messenger response is measured to determine if the compound is a potential agonist or antagonist. Such second messenger systems include but are not limited to, cAMP guanylate cyclase, ion channels or phosphoinositide hydrolysis.

[0439] All of these above assays can be used as diagnostic or prognostic markers. The molecules discovered using these assays can be used to treat disease or to bring about a particular result in a patient (e.g., blood vessel growth) by activating or inhibiting the polypeptide/molecule. Moreover, the assays can discover agents which may inhibit or enhance the production of the polypeptides of the invention from suitably manipulated cells or tissues.

[0440] Therefore, the invention includes a method of identifying compounds which bind to a polypeptide of the invention comprising the steps of: (a) incubating a candidate binding compound with a polypeptide of the present invention; and (b) determining if binding has occurred. Moreover, the invention includes a method of identifying agonists/antagonists comprising the steps of: (a) incubating a candidate compound with a polypeptide of the present invention, (b) assaying a biological activity, and (b) determining if a biological activity of the polypeptide has been altered.

[0441] Targeted Delivery

[0442] In another embodiment, the invention provides a method of delivering compositions to targeted cells expressing a receptor for a polypeptide of the invention, or cells expressing a cell bound form of a polypeptide of the invention.

[0443] As discussed herein, polypeptides or antibodies of the invention may be associated with heterologous polypeptides, heterologous nucleic acids, toxins, or prodrugs via hydrophobic, hydrophilic, ionic and/or covalent interactions. In one embodiment, the invention provides a method for the specific delivery of compositions of the invention to cells by administering polypeptides of the invention (including antibodies) that are associated with heterologous polypeptides or nucleic acids. In one example, the invention provides a method for delivering a therapeutic protein into the targeted cell. In another example, the invention provides a method for delivering a single stranded nucleic acid (e.g., antisense or ribozymes) or double stranded nucleic acid (e.g., DNA that can integrate into the cell's genome or replicate episomally and that can be transcribed) into the targeted cell.

[0444] In another embodiment, the invention provides a method for the specific destruction of cells (e.g., the destruction of tumor cells) by administering polypeptides of the invention (e.g., polypeptides of the invention or antibodies of the invention) in association with toxins or cytotoxic prodrugs.

[0445] By “toxin” is meant compounds that bind and activate endogenous cytotoxic effector systems, radioisotopes, holotoxins, modified toxins, catalytic subunits of toxins, or any molecules or enzymes not normally present in or on the surface of a cell that under defined conditions cause the cell's death. Toxins that may be used according to the methods of the invention include, but are not limited to, radioisotopes known in the art, compounds such as, for example, antibodies (or complement fixing containing portions thereof) that bind an inherent or induced endogenous cytotoxic effector system, thymidine kinase, endonuclease, RNAse, alpha toxin, ricin, abrin, Pseudomonas exotoxin A, diphtheria toxin, saporin, momordin, gelonin, pokeweed antiviral protein, alpha-sarcin and cholera toxin. By “cytotoxic prodrug” is meant a non-toxic compound that is converted by an enzyme, normally present in the cell, into a cytotoxic compound. Cytotoxic prodrugs that may be used according to the methods of the invention include, but are not limited to, glutamyl derivatives of benzoic acid mustard alkylating agent, phosphate derivatives of etoposide or mitomycin C, cytosine arabinoside, daunorubisin, and phenoxyacetamide derivatives of doxorubicin.

[0446] Drug Screening

[0447] Further contemplated is the use of the polypeptides of the present invention, or the polynucleotides encoding these polypeptides, to screen for molecules, which modify the activities of the polypeptides of the present invention. Such a method would include contacting the polypeptide of the present invention with a selected compound(s) suspected of having antagonist or agonist activity, and assaying the activity of these polypeptides following binding.

[0448] This invention is particularly useful for screening therapeutic compounds by using the polypeptides of the present invention, or binding fragments thereof, in any of a variety of drug screening techniques. The polypeptide or fragment employed in such a test may be affixed to a solid support, expressed on a cell surface, free in solution, or located intracellularly. One method of drug screening utilizes eukaryotic or prokaryotic host cells which are stably transformed with recombinant nucleic acids expressing the polypeptide or fragment. Drugs are screened against such transformed cells in competitive binding assays. One may measure, for example, the formulation of complexes between the agent being tested and a polypeptide of the present invention.

[0449] Thus, the present invention provides methods of screening for drugs or any other agents, which affect activities mediated by the polypeptides of the present invention. These methods comprise contacting such an agent with a polypeptide of the present invention or a fragment thereof and assaying for the presence of a complex between the agent and the polypeptide or a fragment thereof, by methods well known in the art. In such a competitive binding assay, the agents to screen are typically labeled. Following incubation, free agent is separated from that present in bound form, and the amount of free or uncomplexed label is a measure of the ability of a particular agent to bind to the polypeptides of the present invention.

[0450] Another technique for drug screening provides high throughput screening for compounds having suitable binding affinity to the polypeptides of the present invention, and is described in great detail in European Patent Application 84/03564, published on Sep. 13, 1984, which is incorporated herein by reference herein. Briefly stated, large numbers of different small peptide test compounds are synthesized on a solid substrate, such as plastic pins or some other surface. The peptide test compounds are reacted with polypeptides of the present invention and washed. Bound polypeptides are then detected by methods well known in the art. Purified polypeptides are coated directly onto plates for use in the aforementioned drug screening techniques. In addition, non-neutralizing antibodies may be used to capture the peptide and immobilize it on the solid support.

[0451] This invention also contemplates the use of competitive drug screening assays in which neutralizing antibodies capable of binding polypeptides of the present invention specifically compete with a test compound for binding to the polypeptides or fragments thereof. In this manner, the antibodies are used to detect the presence of any peptide which shares one or more antigenic epitopes with a polypeptide of the invention.

[0452] Antisense and Ribozyme (Antagonists)

[0453] In specific embodiments, antagonists according to the present invention are nucleic acids corresponding to the sequences contained in SEQ ID NO:X, or the complementary strand thereof, and/or to cDNA sequences contained in cDNA Clone ID NO:Z identified for example, in Table 1A. In one embodiment, antisense sequence is generated internally, by the organism, in another embodiment, the antisense sequence is separately administered (see, for example, O'Connor, J., Neurochem. 56:560 (1991). Oligodeoxynucleotides as Antisense Inhibitors of Gene Expression, CRC Press, Boca Raton, Fla. (1988). Antisense technology can be used to control gene expression through antisense DNA or RNA, or through triple-helix formation. Antisense techniques are discussed for example, in Okano, J., Neurochem. 56:560 (1991); Oligodeoxynucleotides as Antisense Inhibitors of Gene Expression, CRC Press, Boca Raton, Fla. (1988). Triple helix formation is discussed in, for instance, Lee et al., Nucleic Acids Research 6:3073 (1979); Cooney et al., Science 241:456 (1988); and Dervan et al., Science 251:1300 (1991). The methods are based on binding of a polynucleotide to a complementary DNA or RNA.

[0454] For example, the use of c-myc and c-myb antisense RNA constructs to inhibit the growth of the non-lymphocytic leukemia cell line HL-60 and other cell lines was previously described. (Wickstrom et al. (1988); Anfossi et al. (1989)). These experiments were performed in vitro by incubating cells with the oligoribonucleotide. A similar procedure for in vivo use is described in WO 91/15580. Briefly, a pair of oligonucleotides for a given antisense RNA is produced as follows: A sequence complimentary to the first 15 bases of the open reading frame is flanked by an EcoR1 site on the 5′ end and a HindIII site on the 3′ end. Next, the pair of oligonucleotides is heated at 90° C. for one minute and then annealed in 2× ligation buffer (20 mM TRIS HCl pH 7.5, 10 mM MgCl2, 10 MM dithiothreitol (DTT) and 0.2 mM ATP) and then ligated to the EcoR1/Hind III site of the retroviral vector PMV7 (WO 91/15580).

[0455] For example, the 5′ coding portion of a polynucleotide that encodes the polypeptide of the present invention may be used to design an antisense RNA oligonucleotide of from about 10 to 40 base pairs in length. A DNA oligonucleotide is designed to be complementary to a region of the gene involved in transcription thereby preventing transcription and the production of the receptor. The antisense RNA oligonucleotide hybridizes to the mRNA in vivo and blocks translation of the mRNA molecule into receptor polypeptide.

[0456] In one embodiment, the antisense nucleic acid of the invention is produced intracellularly by transcription from an exogenous sequence. For example, a vector or a portion thereof, is transcribed, producing an antisense nucleic acid (RNA) of the invention. Such a vector would contain a sequence encoding the antisense nucleic acid. Such a vector can remain episomal or become chromosomally integrated, as long as it can be transcribed to produce the desired antisense RNA. Such vectors can be constructed by recombinant DNA technology methods standard in the art. Vectors can be plasmid, viral, or others known in the art, used for replication and expression in vertebrate cells. Expression of the sequence encoding the polypeptide of the present invention or fragments thereof, can be by any promoter known in the art to act in vertebrate, preferably human cells. Such promoters can be inducible or constitutive. Such promoters include, but are not limited to, the SV40 early promotet region (Bernoist and Chambon, Nature 29:304-310 (1981), the promoter contained in the 3′ long terminal repeat of Rous sarcoma virus (Yamamoto et al., Cell 22:787-797 (1980), the herpes thymidine promoter (Wagner et al., Proc. Natl. Acad. Sci. U.S.A. 78:1441-1445 (1981), the regulatory sequences of the metallothionein gene (Brinster, et al., Nature 296:39-42 (1982)), etc.

[0457] The antisense nucleic acids of the invention comprise a sequence complementary to at least a portion of an RNA transcript of a gene of the present invention. However, absolute complementarity, although preferred, is not required. A sequence “complementary to at least a portion of an RNA,” referred to herein, means a sequence having sufficient complementarity to be able to hybridize with the RNA, forming a stable duplex; in the case of double stranded antisense nucleic acids, a single strand of the duplex DNA may thus be tested, or triplex formation may be assayed. The ability to hybridize will depend on both the degree of complementarity and the length of the antisense nucleic acid. Generally, the larger the hybridizing nucleic acid, the more base mismatches with a RNA it may contain and still form a stable duplex (or triplex as the case may be). One skilled in the art can ascertain a tolerable degree of mismatch by use of standard procedures to determine the melting point of the hybridized complex.

[0458] Oligonucleotides that are complementary to the 5′ end of the message, e.g., the 5′ untranslated sequence up to and including the AUG initiation codon, should work most efficiently at inhibiting translation. However, sequences complementary to the 3′ untranslated sequences of mRNAs have been shown to be effective at inhibiting translation of mRNAs as well. See generally, Wagner, R., 1994, Nature 372:333-335. Thus, oligonucleotides complementary to either the 5′- or 3′-non-translated, non-coding regions of polynucleotide sequences described herein could be used in an antisense approach to inhibit translation of endogenous mRNA. Oligonucleotides complementary to the 5′ untranslated region of the mRNA should include the complement of the AUG start codon. Antisense oligonucleotides complementary to mRNA coding regions are less efficient inhibitors of translation but could be used in accordance with the invention. Whether designed to hybridize to the 5′-, 3′- or coding region of mRNA of the present invention, antisense nucleic acids should be at least six nucleotides in length, and are preferably oligonucleotides ranging from 6 to about 50 nucleotides in length. In specific aspects the oligonucleotide is at least 10 nucleotides, at least 17 nucleotides, at least 25 nucleotides or at least 50 nucleotides.

[0459] The polynucleotides of the invention can be DNA or RNA or chimeric mixtures or derivatives or modified versions thereof, single-stranded or double-stranded. The oligonucleotide can be modified at the base moiety, sugar moiety, or phosphate backbone, for example, to improve stability of the molecule, hybridization, etc. The oligonucleotide may include other appended groups such as peptides (e.g., for targeting host cell receptors in vivo), or agents facilitating transport across the cell membrane (see, e.g., Letsinger et al., 1989, Proc. Natl. Acad. Sci. U.S.A. 86:6553-6556; Lemaitre et al., 1987, Proc. Natl. Acad. Sci. 84:648-652; PCT Publication No. WO88/09810, published Dec. 15, 1988) or the blood-brain barrier (see, e.g., PCT Publication No. WO89/10134, published Apr. 25, 1988), hybridization-triggered cleavage agents. (See, e.g., Krol et al., 1988, BioTechniques 6:958-976) or intercalating agents. (See, e.g., Zon, 1988, Pharm. Res. 5:539-549). To this end, the oligonucleotide may be conjugated to another molecule, e.g., a peptide, hybridization triggered cross-linking agent, transport agent, hybridization-triggered cleavage agent, etc.

[0460] The antisense oligonucleotide may comprise at least one modified base moiety which is selected from the group including, but not limited to, 5-fluorouracil, 5-bromouracil, 5-chlorouracil, 5-iodouracil, hypoxanthine, xantine, 4-acetylcytosine, 5-(carboxyhydroxylmethyl) uracil, 5-carboxymethylaminomethyl-2-thiouridine, 5-carboxymethylaminomethyluracil, dihydrouracil, beta-D-galactosylqueosine, inosine, N6-isopentenyladenine, 1-methylguanine, 1-methylinosine, 2,2-dimethylguanine, 2-methyladenine, 2-methylguanine, 3-methylcytosine, 5-methylcytosine, N6-adenine, 7-methylguanine, 5-methylaminomethyluracil, 5-methoxyaminomethyl-2-thiouracil, beta-D-mannosylqueosine, 5′-methoxycarboxymethyluracil, 5-methoxyuracil, 2-methylthio-N6-isopentenyladenine, uracil-5-oxyacetic acid (v), wybutoxosine, pseudouracil, queosine, 2-thiocytosine, 5-methyl-2-thiouracil, 2-thiouracil, 4-thiouracil, 5-methyluracil, uracil-5-oxyacetic acid methylester, uracil-5-oxyacetic acid (v), 5-methyl-2-thiouracil, 3-(3-amino-3-N-2-carboxypropyl) uracil, (acp3)w, and 2,6-diaminopurine.

[0461] The antisense oligonucleotide may also comprise at least one modified sugar moiety selected from the group including, but not limited to, arabinose, 2-fluoroarabinose, xylulose, and hexose.

[0462] In yet another embodiment, the antisense oligonucleotide comprises at least one modified phosphate backbone selected from the group including, but not limited to, a phosphorothioate, a phosphorodithioate, a phosphoramidothioate, a phosphoramidate, a phosphordiamidate, a methylphosphonate, an alkyl phosphotriester, and a formacetal or analog thereof.

[0463] In yet another embodiment, the antisense oligonucleotide is an a-anomeric oligonucleotide. An a-anomeric oligonucleotide forms specific double-stranded hybrids with complementary RNA in which, contrary to the usual b-units, the strands run parallel to each other (Gautier et al., 1987, Nucl. Acids Res. 15:6625-6641). The oligonucleotide is a 2′-0-methylribonucleotide (Inoue et al., 1987, Nucl. Acids Res. 15:6131-6148), or a chimeric RNA-DNA analogue (Inoue et al., 1987, FEBS Lett. 215:327-330).

[0464] Polynucleotides of the invention may be synthesized by standard methods known in the art, e.g. by use of an automated DNA synthesizer (such as are commercially available from Biosearch, Applied Biosystems, etc.). As examples, phosphorothioate oligonucleotides may be synthesized by the method of Stein et al. (1988, Nucl. Acids Res. 16:3209), methylphosphonate oligonucleotides can be prepared by use of controlled pore glass polymer supports (Sarin et al., 1988, Proc. Natl. Acad. Sci. U.S.A. 85:7448-7451), etc.

[0465] While antisense nucleotides complementary to the coding region sequence could be used, those complementary to the transcribed untranslated region are most preferred.

[0466] Potential antagonists according to the invention also include catalytic RNA, or a ribozyme (See, e.g., PCT International Publication WO 90/11364, published Oct. 4, 1990; Sarver et al, Science 247:1222-1225 (1990). While ribozymes that cleave mRNA at site specific recognition sequences can be used to destroy mRNAs, the use of hammerhead ribozymes is preferred. Hammerhead ribozymes cleave mRNAs at locations dictated by flanking regions that form complementary base pairs with the target mRNA. The sole requirement is that the target mRNA have the following sequence of two bases: 5′-UG-3′. The construction and production of hammerhead ribozymes is well known in the art and is described more fully in Haseloff and Gerlach, Nature 334:585-591 (1988). There are numerous potential hammerhead ribozyme cleavage sites within the nucleotide sequence of SEQ ID NO:X. Preferably, the ribozyme is engineered so that the cleavage recognition site is located near the 5′ end of the mRNA; i.e., to increase efficiency and minimize the intracellular accumulation of non-functional mRNA transcripts.

[0467] As in the antisense approach, the ribozymes of the invention can be composed of modified oligonucleotides (e.g. for improved stability, targeting, etc.) and should be delivered to cells which express in vivo. DNA constructs encoding the ribozyme may be introduced into the cell in the same manner as described above for the introduction of antisense encoding DNA. A preferred method of delivery involves using a DNA construct “encoding” the ribozyme under the control of a strong constitutive promoter, such as, for example, pol III or pol II promoter, so that transfected cells will produce sufficient quantities of the ribozyme to destroy endogenous messages and inhibit translation. Since ribozymes unlike antisense molecules, are catalytic, a lower intracellular concentration is required for efficiency.

[0468] Antagonist/agonist compounds may be employed to inhibit the cell growth and proliferation effects of the polypeptides of the present invention on neoplastic cells and tissues, i.e. stimulation of angiogenesis of tumors, and, therefore, retard or prevent abnormal cellular growth and proliferation, for example, in tumor formation or growth.

[0469] The antagonist/agonist may also be employed to prevent hyper-vascular diseases, and prevent the proliferation of epithelial lens cells after extracapsular cataract surgery. Prevention of the mitogenic activity of the polypeptides of the present invention may also be desirous in cases such as restenosis after balloon angioplasty.

[0470] The antagonist/agonist may also be employed to prevent the growth of scar tissue during wound healing.

[0471] The antagonist/agonist may also be employed to treat the diseases described herein.

[0472] Thus, the invention provides a method of treating disorders or diseases, including but not limited to the disorders or diseases listed throughout this application, associated with overexpression of a polynucleotide of the present invention by administering to a patient (a) an antisense molecule directed to the polynucleotide of the present invention, and/or (b) a ribozyme directed to the polynucleotide of the present invention.

[0473] Binding Peptides and Other Molecules

[0474] The invention also encompasses screening methods for identifying polypeptides and nonpolypeptides that bind connective tissue antigen polypeptides, and the connective tissue antigen binding molecules identified thereby. These binding molecules are useful, for example, as agonists and antagonists of the connective tissue antigen polypeptides. Such agonists and antagonists can be used, in accordance with the invention, in the therapeutic embodiments described in detail, below.

[0475] This method comprises the steps of:

[0476] contacting connective tissue antigen polypeptides or connective tissue antigen-like polypeptides with a plurality of molecules; and

[0477] identifying a molecule that binds the connective tissue antigen polypeptides or connective tissue antigen-like polypeptides.

[0478] The step of contacting the connective tissue antigen polypeptides or connective tissue antigen-like polypeptides with the plurality of molecules may be effected in a number of ways. For example, one may contemplate immobilizing the connective tissue antigen polypeptides or connective tissue antigen-like polypeptides on a solid support and bringing a solution of the plurality of molecules in contact with the immobilized connective tissue antigen polypeptides or connective tissue antigen-like polypeptides. Such a procedure would be akin to an affinity chromatographic process, with the affinity matrix being comprised of the immobilized connective tissue antigen polypeptides or connective tissue antigen-like polypeptides. The molecules having a selective affinity for the connective tissue antigen polypeptides or connective tissue antigen-like polypeptides can then be purified by affinity selection. -The nature of the solid support, process for attachment of the connective tissue antigen polypeptides or connective tissue antigen-like polypeptides to the solid support, solvent, and conditions of the affinity isolation or selection are largely conventional and well known to those of ordinary skill in the art.

[0479] Alternatively, one may also separate a plurality of polypeptides into substantially separate fractions comprising a subset of or individual polypeptides. For instance, one can separate the plurality of polypeptides by gel electrophoresis, column chromatography, or like method known to those of ordinary skill for the separation of polypeptides. The individual polypeptides can also be produced by a transformed host cell in such a way as to be expressed on or about its outer surface (e.g., a recombinant phage). Individual isolates can then be “probed” by the connective tissue antigen polypeptides or connective tissue antigen-like polypeptides, optionally in the presence of an inducer should one be required for expression, to determine if any selective affinity interaction takes place between the connective tissue antigen polypeptides or connective tissue antigen-like polypeptides and the individual clone. Prior to contacting the connective tissue antigen polypeptides or connective tissue antigen-like polypeptides with each fraction comprising individual polypeptides, the polypeptides could first be transferred to a solid support for additional convenience. Such a solid support may simply be a piece of filter membrane, such as one made of nitrocellulose or nylon. In this manner, positive clones could be identified from a collection of transformed host cells of an expression library, which harbor a DNA construct encoding a polypeptide having a selective affinity for connective tissue antigen polypeptides or connective tissue antigen-like polypeptides. Furthermore, the amino acid sequence of the polypeptide having a selective affinity for the connective tissue antigen polypeptides or connective tissue antigen-like polypeptides can be determined directly by conventional means or the coding sequence of the DNA encoding the polypeptide can frequently be determined more conveniently. The primary sequence can then be deduced from the corresponding DNA sequence. If the amino acid sequence is to be determined from the polypeptide itself, one may use microsequencing techniques. The sequencing technique may include mass spectroscopy.

[0480] In certain situations, it may be desirable to wash away any unbound connective tissue antigen polypeptides or connective tissue antigen-like polypeptides, or alternatively, unbound polypeptides, from a mixture of the connective tissue antigen polypeptides or connective tissue antigen-like polypeptides and the plurality of polypeptides prior to attempting to determine or to detect the presence of a selective affinity interaction. Such a wash step may be particularly desirable when the connective tissue antigen polypeptides or connective tissue antigen-like polypeptides or the plurality of polypeptides is bound to a solid support.

[0481] The plurality of molecules provided according to this method may be provided by way of diversity libraries, such as random or combinatorial peptide or nonpeptide libraries which can be screened for molecules that specifically bind connective tissue antigen polypeptides. Many libraries are known in the art that can be used, e.g., chemically synthesized libraries, recombinant (e.g., phage display libraries), and in vitro translation-based libraries. Examples of chemically synthesized libraries are described in Fodor et al., 1991, Science 251:767-773; Houghten et al., 1991, Nature 354:84-86; Lam et al., 1991, Nature 354:82-84; Medynski, 1994, Bio/Technology 12:709-710;Gallop et al., 1994, J. Medicinal Chemistry 37(9):1233-1251; Ohlmeyer et al., 1993, Proc. Natl. Acad. Sci. USA 90:10922-10926; Erb et al., 1994, Proc. Natl. Acad. Sci. USA 91:11422-11426; Houghten et al., 1992, Biotechniques 13:412; Jayawickreme et al., 1994, Proc. Natl. Acad. Sci. USA 91:1614-1618; Salmon et al., 1993, Proc. Natl. Acad. Sci. USA 90:11708-11712; PCT Publication No. WO 93/20242; and Brenner and Lerner, 1992, Proc. Natl. Acad. Sci. USA 89:5381-5383.

[0482] Examples of phage display libraries are described in Scott and Smith, 1990, Science 249:386-390; Devlin et al., 1990, Science, 249:404-406; Christian, R. B., et al., 1992, J. Mol. Biol. 227:711-718); Lenstra, 1992, J. Immunol. Meth. 152:149-157; Kay et al., 1993, Gene 128:59-65; and PCT Publication No. WO 94/18318 dated Aug. 18, 1994.

[0483] In vitro translation-based libraries include but are not limited to those described in PCT Publication No. WO 91/05058 dated Apr. 18, 1991; and Mattheakis et al., 1994, Proc. Natl. Acad. Sci. USA 91:9022-9026.

[0484] By way of examples of nonpeptide libraries, a benzodiazepine library (see e.g., Bunin et al., 1994, Proc. Natl. Acad. Sci. USA 91:4708-4712) can be adapted for use. Peptoid libraries (Simon et al., 1992, Proc. Natl. Acad. Sci. USA 89:9367-9371) can also be used. Another example of a library that can be used, in which the amide functionalities in peptides have been permethylated to generate a chemically transformed combinatorial library, is described by Ostresh et al. (1994, Proc. Natl. Acad. Sci. USA 91:11138-11142).

[0485] The variety of non-peptide libraries that are useful in the present invention is great. For example, Ecker and Crooke, 1995, Bio/Technology 13:351-360 list benzodiazepines, hydantoins, piperazinediones, biphenyls, sugar analogs, beta-mercaptoketones, arylacetic acids, acylpiperdines, benzopyrans, cubanes, xanthines, aminimides, and oxazolones as among the chemical species that form the basis of various libraries.

[0486] Non-peptide libraries can be classified broadly into two types: decorated monomers and oligomers. Decorated monomer libraries employ a relatively simple scaffold structure upon which a variety functional groups is added. Often the scaffold will be a molecule with a known useful pharmacological activity. For example, the scaffold might be the benzodiazepine structure.

[0487] Non-peptide oligomer libraries utilize a large number of monomers that are assembled together in ways that create new shapes that depend on the order of the monomers. Among the monomer units that have been used are carbamates, pyrrolinones, and morpholinos. Peptoids, peptide-like oligomers in which the side chain is attached to the alpha amino group rather than the alpha carbon, form the basis of another version of non-peptide oligomer libraries. The first non-peptide oligomer libraries utilized a single type of monomer and thus contained a repeating backbone. Recent libraries have utilized more than one monomer, giving the libraries added flexibility.

[0488] Screening the libraries can be accomplished by any of a variety of commonly known methods. See, e.g., the following references, which disclose screening of peptide libraries: Parmley and Smith, 1989, Adv. Exp. Med. Biol. 251:215-218; Scott and Smith, 1990, Science 249:386-390; Fowlkes et al., 1992; BioTechniques 13:422-427; Oldenburg et al., 1992, Proc. Natl. Acad. Sci. USA 89:5393-5397; Yu et al., 1994, Cell 76:933-945; Staudt et al., 1988, Science 241:577-580; Bock et al., 1992, Nature 355:564-566; Tuerk et al., 1992, Proc. Natl. Acad. Sci. USA 89:6988-6992; Ellington et al., 1992, Nature 355:850-852; U.S. Pat. No. 5,096,815, U.S. Pat. No. 5,223,409, and U.S. Pat. No. 5,198,346, all to Ladner et al.; Rebar and Pabo, 1993, Science 263:671-673; and CT Publication No. WO 94/18318.

[0489] In a specific embodiment, screening to identify a molecule that binds connective tissue antigen polypeptides can be carried out by contacting the library members with a connective tissue antigen polypeptides or connective tissue antigen-like polypeptides immobilized on a solid phase and harvesting those library members that bind to the connective tissue antigen polypeptides or connective tissue antigen-like polypeptides. Examples of such screening methods, termed “panning” techniques are described by way of example in Parmley and Smith, 1988, Gene 73:305-318; Fowlkes et al., 1992, BioTechniques 13:422-427; International Publication No. WO 94/18318; and in references cited herein.

[0490] In another embodiment, the two-hybrid system for selecting interacting proteins in yeast (Fields and Song, 1989, Nature 340:245-246; Chien et al., 1991, Proc. Natl. Acad. Sci. USA 88:9578-9582) can be used to identify molecules that specifically bind to connective tissue antigen polypeptides or connective tissue antigen-like polypeptides.

[0491] Where the connective tissue antigen binding molecule is a polypeptide, the polypeptide can be conveniently selected from any peptide library, including random peptide libraries, combinatorial peptide libraries, or biased peptide libraries. The term “biased” is used herein to mean that the method of generating the library is manipulated so as to restrict one or more parameters that govern the diversity of the resulting collection of molecules, in this case peptides.

[0492] Thus, a truly random peptide library would generate a collection of peptides in which the probability of finding a particular amino acid at a given position of the peptide is the same for all 20 amino acids. A bias can be introduced into the library, however, by specifying, for example, that a lysine occurs every fifth amino acid or that positions 4, 8, and 9 of a decapeptide library be fixed to include only arginine. Clearly, many types of biases can be contemplated, and the present invention is not restricted to any particular bias. Furthermore, the present invention contemplates specific types of peptide libraries, such as phage displayed peptide libraries and those that utilize a DNA construct comprising a lambda phage vector with a DNA insert.

[0493] As mentioned above, in the case of a connective tissue antigen binding molecule that is a polypeptide, the polypeptide may have about 6 to less than about 60 amino acid residues, preferably about 6 to about 10 amino acid residues, and most preferably, about 6 to about 22 amino acids. In another embodiment, a connective tissue antigen binding polypeptide has in the range of 15-100 amino acids, or 20-50 amino acids.

[0494] The selected connective tissue antigen binding polypeptide can be obtained by chemical synthesis or recombinant expression.

[0495] Other Activities

[0496] A polypeptide, polynucleotide, agonist, or antagonist of the present invention, as a result of the ability to stimulate vascular endothelial cell growth, may be employed in treatment for stimulating re-vascularization of ischemic tissues due to various disease conditions such as thrombosis, arteriosclerosis, and other cardiovascular conditions. The polypeptide, polynucleotide, agonist, or antagonist of the present invention may also be employed to stimulate angiogenesis and limb regeneration, as discussed above.

[0497] A polypeptide, polynucleotide, agonist, or antagonist of the present invention may also be employed for treating wounds due to injuries, burns, post-operative tissue repair, and ulcers since they are mitogenic to various cells of different origins, such as fibroblast cells and skeletal muscle cells, and therefore, facilitate the repair or replacement of damaged or diseased tissue.

[0498] A polypeptide, polynucleotide, agonist, or antagonist of the present invention may also be employed to stimulate neuronal growth and to treat and prevent neuronal damage which occurs in certain neuronal disorders or neuro-degenerative conditions such as Alzheimer's disease, Parkinson's disease, and AIDS-related complex. A polypeptide, polynucleotide, agonist, or antagonist of the present invention may have the ability to stimulate chondrocyte growth; therefore, they may be employed to enhance bone and periodontal regeneration and aid in tissue transplants or bone grafts.

[0499] A polypeptide, polynucleotide, agonist, or antagonist of the present invention may be also employed to prevent skin aging due to sunburn by stimulating keratinocyte growth.

[0500] A polypeptide, polynucleotide, agonist, or antagonist of the present invention may also be employed for preventing hair loss, since FGF family members activate hair-forming cells and promotes melanocyte growth. Along the same lines, a polypeptide, polynucleotide, agonist, or antagonist of the present invention may be employed to stimulate growth and differentiation of hematopoietic cells and bone marrow cells when used in combination with other cytokines.

[0501] A polypeptide, polynucleotide, agonist, or antagonist of the present invention may also be employed to maintain organs before transplantation or for supporting cell culture of primary tissues. A polypeptide, polynucleotide, agonist, or antagonist of the present invention may also be employed for inducing tissue of mesodermal origin to differentiate in early embryos.

[0502] A polypeptide, polynucleotide, agonist, or antagonist of the present invention may also increase or decrease the differentiation or proliferation of embryonic stem cells, besides, as discussed above, hematopoietic lineage.

[0503] A polypeptide, polynucleotide, agonist, or antagonist of the present invention may also be used to modulate mammalian characteristics, such as body height, weight, hair color, eye color, skin, percentage of adipose tissue, pigmentation, size, and shape (e.g., cosmetic surgery). Similarly, a polypeptide, polynucleotide, agonist, or antagonist of the present invention may be used to modulate mammalian metabolism affecting catabolism, anabolism, processing, utilization, and storage of energy.

[0504] A polypeptide, polynucleotide, agonist, or antagonist of the present invention may be used to change a mammal's mental state or physical state by influencing biorhythms, caricadic rhythms, depression (including depressive disorders), tendency for violence, tolerance for pain, reproductive capabilities (preferably by Activin or Inhibin-like activity), hormonal or endocrine levels, appetite, libido, memory, stress, or other cognitive qualities.

[0505] A polypeptide, polynucleotide, agonist, or antagonist of the present invention may also be used as a food additive or preservative, such as to increase or decrease storage capabilities, fat content, lipid, protein, carbohydrate, vitamins, minerals, cofactors or other nutritional components.

[0506] The above-recited applications have uses in a wide variety of hosts. Such hosts include, but are not limited to, human, murine, rabbit, goat, guinea pig, camel, horse, mouse, rat, hamster, pig, micro-pig, chicken, goat, cow, sheep, dog, cat, non-human primate, and human. In specific embodiments, the host is a mouse, rabbit, goat, guinea pig, chicken, rat, hamster, pig, sheep, dog or cat. In preferred embodiments, the host is a mammal. In most preferred embodiments, the host is a human.

[0507] Other Preferred Embodiments

[0508] Other preferred embodiments of the claimed invention include an isolated nucleic acid molecule comprising a nucleotide sequence which is at least 95% identical to a sequence of at least about 50 contiguous nucleotides in the nucleotide sequence of SEQ ID NO:X or the complementary strand thereto, the nucleotide sequence as defined in column 4 of Table 1A or columns 8 and 9 of Table 2 or the complementary strand thereto, and/or cDNA contained in Clone ID NO:Z.

[0509] Also preferred is a nucleic acid molecule wherein said sequence of contiguous nucleotides is included in the nucleotide sequence of the portion of SEQ ID NO:X as defined in column 4, “ORF (From-To)”, in Table 1A.

[0510] Also preferred is a nucleic acid molecule wherein said sequence of contiguous nucleotides is included in the nucleotide sequence of the portion of SEQ ID NO:X as defined in columns 8 and 9, “NT From” and “NT To” respectively, in Table 2.

[0511] Also preferred is an isolated nucleic acid molecule comprising a nucleotide sequence which is at least 95% identical to a sequence of at least about 150 contiguous nucleotides in the nucleotide sequence of SEQ ID NO:X or the complementary strand thereto, the nucleotide sequence as defined in column 4 of Table 1A or columns 8 and 9 of Table 2 or the complementary strand thereto, and/or cDNA contained in Clone ID NO:Z.

[0512] Further preferred is an isolated nucleic acid molecule comprising a nucleotide sequence which is at least 95% identical to a sequence of at least about 500 contiguous nucleotides in the nucleotide sequence of SEQ ID NO:X or the complementary strand thereto, the nucleotide sequence as defined in column 4 of Table 1A or columns 8 and 9 of Table 2 or the complementary strand thereto, and/or cDNA contained in Clone ID NO:Z.

[0513] A further preferred embodiment is a nucleic acid molecule comprising a nucleotide sequence which is at least 95% identical to the nucleotide sequence of the portion of SEQ ID NO:X defined in column 4, “ORF (From-To)”, in Table 1A.

[0514] A further preferred embodiment is a nucleic acid molecule comprising a nucleotide sequence which is at least 95% identical to the nucleotide sequence of the portion of SEQ ID NO:X defined in columns 8 and 9, “NT From” and “NT To”, respectively, in Table 2.

[0515] A further preferred embodiment is an isolated nucleic acid molecule comprising a nucleotide sequence which is at least 95% identical to the complete nucleotide sequence of SEQ ID NO:X or the complementary strand thereto, the nucleotide sequence as defined in column 4 of Table 1A or columns 8 and 9 of Table 2 or the complementary strand thereto, and/or cDNA contained in Clone ID NO:Z.

[0516] Also preferred is an isolated nucleic acid molecule which hybridizes under stringent hybridization conditions to a nucleic acid molecule comprising a nucleotide sequence of SEQ ID NO:X or the complementary strand thereto, the nucleotide sequence as defined in column 4 of Table 1A or columns 8 and 9 of Table 2 or the complementary strand thereto, and/or cDNA contained in Clone ID NO:Z, wherein said nucleic acid molecule which hybridizes does not hybridize under stringent hybridization conditions to a nucleic acid molecule having a nucleotide sequence consisting of only A residues or of only T residues.

[0517] Also preferred is a composition of matter comprising a DNA molecule which comprises the cDNA contained in Clone ID NO:Z.

[0518] Also preferred is an isolated nucleic acid molecule comprising a nucleotide sequence which is at least 95% identical to a sequence of at least 50 contiguous nucleotides of the cDNA sequence contained in Clone ID NO:Z.

[0519] Also preferred is an isolated nucleic acid molecule, wherein said sequence of at least 50 contiguous nucleotides is included in the nucleotide sequence of an open reading frame sequence encoded by cDNA contained in Clone ID NO:Z.

[0520] Also preferred is an isolated nucleic acid molecule comprising a nucleotide sequence which is at least 95% identical to sequence of at least 150 contiguous nucleotides in the nucleotide sequence encoded by cDNA contained in Clone ID NO:Z.

[0521] A further preferred embodiment is an isolated nucleic acid molecule comprising a nucleotide sequence which is at least 95% identical to sequence of at least 500 contiguous nucleotides in the nucleotide sequence encoded by cDNA contained in Clone ID NO:Z.

[0522] A further preferred embodiment is an isolated nucleic acid molecule comprising a nucleotide sequence which is at least 95% identical to the complete nucleotide sequence encoded by cDNA contained in Clone ID NO:Z.

[0523] A further preferred embodiment is a method for detecting in a biological sample a nucleic acid molecule comprising a nucleotide sequence which is at least 95% identical to a sequence of at least 50 contiguous nucleotides in a sequence selected from the group consisting of: a nucleotide sequence of SEQ ID NO:X or the complementary strand thereto; the nucleotide sequence as defined in column 4 of Table 1A or columns 8 and 9 of Table 2 or the complementary strand thereto; and a nucleotide sequence encoded by cDNA contained in Clone ID NO:Z; which method comprises a step of comparing a nucleotide sequence of at least one nucleic acid molecule in said sample with a sequence selected from said group and determining whether the sequence of said nucleic acid molecule in said sample is at least 95% identical to said selected sequence.

[0524] Also preferred is the above method wherein said step of comparing sequences comprises determining the extent of nucleic acid hybridization between nucleic acid molecules in said sample and a nucleic acid molecule comprising said sequence selected from said group. Similarly, also preferred is the above method wherein said step of comparing sequences is performed by comparing the nucleotide sequence determined from a nucleic acid molecule in said sample with said sequence selected from said group. The nucleic acid molecules can comprise DNA molecules or RNA molecules.

[0525] A further preferred embodiment is a method for identifying the species, tissue or cell type of a biological sample which method comprises a step of detecting nucleic acid molecules in said sample, if any, comprising a nucleotide sequence that is at least 95% identical to a sequence of at least 50 contiguous nucleotides in a sequence selected from the group consisting of: a nucleotide sequence of SEQ ID NO:X or the complementary strand thereto; the nucleotide sequence as defined in column 4 of Table 1A or columns 8 and 9 of Table 2 or the complementary strand thereto; and a nucleotide sequence of the cDNA contained in Clone ID NO:Z.

[0526] The method for identifying the species, tissue or cell type of a biological sample can comprise a step of detecting nucleic acid molecules comprising a nucleotide sequence in a panel of at least two nucleotide sequences, wherein at least one sequence in said panel is at least 95% identical to a sequence of at least 50 contiguous nucleotides in a sequence selected from said group.

[0527] Also preferred is a method for diagnosing in a subject a pathological condition associated with abnormal structure or expression of a nucleotide sequence of SEQ ID NO:X or the complementary strand thereto; the nucleotide sequence as defined in column 4 of Table 1A or columns 8 and 9 of Table 2 or the complementary strand thereto; or the cDNA contained in Clone ID NO:Z which encodes a protein, wherein the method comprises a step of detecting in a biological sample obtained from said subject nucleic acid molecules, if any, comprising a nucleotide sequence that is at least 95% identical to a sequence of at least 50 contiguous nucleotides in a sequence selected from the group consisting of: a nucleotide sequence of SEQ ID NO:X or the complementary strand thereto; the nucleotide sequence as defined in column 4 of Table 1A or columns 8 and 9 of Table 2 or the complementary strand thereto; and a nucleotide sequence of cDNA contained in Clone ID NO:Z.

[0528] The method for diagnosing a pathological condition can comprise a step of detecting nucleic acid molecules comprising a nucleotide sequence in a panel of at least two nucleotide sequences, wherein at least one sequence in said panel is at least 95% identical to a sequence of at least 50 contiguous nucleotides in a sequence selected from said group.

[0529] Also preferred is a composition of matter comprising isolated nucleic acid molecules wherein the nucleotide sequences of said nucleic acid molecules comprise a panel of at least two nucleotide sequences, wherein at least one sequence in said panel is at least 95% identical to a sequence of at least 50 contiguous nucleotides in a sequence selected from the group consisting of: a nucleotide sequence of SEQ ID NO:X or the complementary strand thereto; the nucleotide sequence as defined in column 4 of Table 1A or columns 8 and 9 of Table 2 or the complementary strand thereto; and a nucleotide sequence encoded by cDNA contained in Clone ID NO:Z. The nucleic acid molecules can comprise DNA molecules or RNA molecules.

[0530] Also preferred is a composition of matter comprising isolated nucleic acid molecules wherein the nucleotide sequences of said nucleic acid molecules comprise a DNA microarray or “chip” of at least 1, 2, 3, 4, 5, 6, 7, 8, 9, 10, 15, 20, 25, 30, 40, 50, 100, 150, 200, 250, 300, 500, 1000, 2000, 3000, or 4000 nucleotide sequences, wherein at least one sequence in said DNA microarray or “chip” is at least 95% identical to a sequence of at least 50 contiguous nucleotides in a sequence selected from the group consisting of: a nucleotide sequence of SEQ ID NO:X wherein X is any integer as defined in Table 1A; and a nucleotide sequence encoded by a human cDNA clone identified by a cDNA “Clone ID” in Table 1A.

[0531] Also preferred is an isolated polypeptide comprising an amino acid sequence at least 90% identical to a sequence of at least about 10 contiguous amino acids in the polypeptide sequence of SEQ ID NO:Y; a polypeptide encoded by SEQ ID NO:X or the complementary strand thereto; the polypeptide encoded by the nucleotide sequence as defined in columns 8 and 9 of Table 2; and/or a polypeptide encoded by cDNA contained in Clone ID NO:Z.

[0532] Also preferred is an isolated polypeptide comprising an amino acid sequence at least 95% identical to a sequence of at least about 30 contiguous amino acids in the amino acid sequence of SEQ ID NO:Y; a polypeptide encoded by SEQ ID NO:X or the complementary strand thereto; the polypeptide encoded by the nucleotide sequence as defined in columns 8 and 9 of Table 2; and/or a polypeptide encoded by cDNA contained in Clone ID NO:Z.

[0533] Further preferred is an isolated polypeptide comprising an amino acid sequence at least 95% identical to a sequence of at least about 100 contiguous amino acids in the amino acid sequence of SEQ ID NO:Y; a polypeptide encoded by SEQ ID NO:X or the complementary strand thereto; the polypeptide encoded by the nucleotide sequence as defined in columns 8 and 9 of Table 2; and/or a polypeptide encoded by cDNA contained in Clone ID NO:Z.

[0534] Further preferred is an isolated polypeptide comprising an amino acid sequence at least 95% identical to the complete amino acid sequence of SEQ ID NO:Y; a polypeptide encoded by SEQ ID NO:X or the complementary strand thereto; the polypeptide encoded by the nucleotide sequence as defined in columns 8 and 9 of Table 2; and/or a polypeptide encoded by cDNA contained in Clone ID NO:Z.

[0535] Further preferred is an isolated polypeptide comprising an amino acid sequence at least 90% identical to a sequence of at least about 10 contiguous amino acids in the complete amino acid sequence of a polypeptide encoded by contained in Clone ID NO:Z

[0536] Also preferred is a polypeptide wherein said sequence of contiguous amino acids is included in the amino acid sequence of a portion of said polypeptide encoded by cDNA contained in Clone ID NO:Z; a polypeptide encoded by SEQ ID NO:X or the complementary strand thereto; the polypeptide encoded by the nucleotide sequence as defined in columns 8 and 9 of Table 2; and/or the polypeptide sequence of SEQ ID NO:Y.

[0537] Also preferred is an isolated polypeptide comprising an amino acid sequence at least 95% identical to a sequence of at least about 30 contiguous amino acids in the amino acid sequence of a polypeptide encoded by the cDNA contained in Clone ID NO:Z.

[0538] Also preferred is an isolated polypeptide comprising an amino acid sequence at least 95% identical to a sequence of at least about 100 contiguous amino acids in the amino acid sequence of a polypeptide encoded by cDNA contained in Clone ID NO:Z.

[0539] Also preferred is an isolated polypeptide comprising an amino acid sequence at least 95% identical to the amino acid sequence of a polypeptide encoded by the cDNA contained in Clone ID NO:Z.

[0540] Further preferred is an isolated antibody which binds specifically to a polypeptide comprising an amino acid sequence that is at least 90% identical to a sequence of at least 10 contiguous amino acids in a sequence selected from the group consisting of: a polypeptide sequence of SEQ ID NO:Y; a polypeptide encoded by SEQ ID NO:X or the complementary strand thereto; the polypeptide encoded by the nucleotide sequence as defined in columns 8 and 9 of Table 2; and a polypeptide encoded by the cDNA contained in Clone ID NO:Z.

[0541] Further preferred is a method for detecting in a biological sample a polypeptide comprising an amino acid sequence which is at least 90% identical to a sequence of at least 10 contiguous amino acids in a sequence selected from the group consisting of: a polypeptide sequence of SEQ ID NO:Y; a polypeptide encoded by SEQ ID NO:X or the complementary strand thereto; the polypeptide encoded by the nucleotide sequence as defined in columns 8 and 9 of Table 2; and a polypeptide encoded by the cDNA contained in Clone ID NO:Z; which method comprises a step of comparing an amino acid sequence of at least one polypeptide molecule in said sample with a sequence selected from said group and determining whether the sequence of said polypeptide molecule in said sample is at least 90% identical to said sequence of at least 10 contiguous amino acids.

[0542] Also preferred is the above method wherein said step of comparing an amino acid sequence of at least one polypeptide molecule in said sample with a sequence selected from said group comprises determining the extent of specific binding of polypeptides in said sample to an antibody which binds specifically to a polypeptide comprising an amino acid sequence that is at least 90% identical to a sequence of at least 10 contiguous amino acids in a sequence selected from the group consisting of: a polypeptide sequence of SEQ ID NO:Y; a polypeptide encoded by SEQ ID NO:X or the complementary strand thereto; the polypeptide encoded by the nucleotide sequence as defined in columns 8 and 9 of Table 2; and a polypeptide encoded by the cDNA contained in Clone ID NO:Z.

[0543] Also preferred is the above method wherein said step of comparing sequences is performed by comparing the amino acid sequence determined from a polypeptide molecule in said sample with said sequence selected from said group.

[0544] Also preferred is a method for identifying the species, tissue or cell type of a biological sample which method comprises a step of detecting polypeptide molecules in said sample, if any, comprising an amino acid sequence that is at least 90% identical to a sequence of at least 10 contiguous amino acids in a sequence selected from the group consisting of: polypeptide sequence of SEQ ID NO:Y; a polypeptide encoded by SEQ ID NO:X or the complementary strand thereto; the polypeptide encoded by the nucleotide sequence as defined in columns 8 and 9 of Table 2; and a polypeptide encoded by the cDNA contained in Clone ID NO:Z.

[0545] Also preferred is the above method for identifying the species, tissue or cell type of a biological sample, which method comprises a step of detecting polypeptide molecules comprising an amino acid sequence in a panel of at least two amino acid sequences, wherein at least one sequence in said panel is at least 90% identical to a sequence of at least 10 contiguous amino acids in a sequence selected from the above group.

[0546] Also preferred is a method for diagnosing in a subject a pathological condition associated with abnormal structure or expression of a nucleic acid sequence identified in Table 1A or Table 2 encoding a polypeptide, which method comprises a step of detecting in a biological sample obtained from said subject polypeptide molecules comprising an amino acid sequence in a panel of at least two amino acid sequences, wherein at least one sequence in said panel is at least 90% identical to a sequence of at least 10 contiguous amino acids in a sequence selected from the group consisting of: polypeptide sequence of SEQ IID NO:Y; a polypeptide encoded by SEQ IID NO:X or the complementary strand thereto; the polypeptide encoded by the nucleotide sequence as defined in columns 8 and 9 of Table 2; and a polypeptide encoded by the cDNA contained in Clone ID NO:Z.

[0547] In any of these methods, the step of detecting said polypeptide molecules includes using an antibody.

[0548] Also preferred is an isolated nucleic acid molecule comprising a nucleotide sequence which is at least 95% identical to a nucleotide sequence encoding a polypeptide wherein said polypeptide comprises an amino acid sequence that is at least 90% identical to a sequence of at least 10 contiguous amino acids in a sequence selected from the group consisting of: polypeptide sequence of SEQ ID) NO:Y; a polypeptide encoded by SEQ ID NO:X or the complementary strand thereto; the polypeptide encoded by the nucleotide sequence as defined in columns 8 and 9 of Table 2; and a polypeptide encoded by the cDNA contained in Clone ID NO:Z.

[0549] Also preferred is an isolated nucleic acid molecule, wherein said nucleotide sequence encoding a polypeptide has been optimized for expression of said polypeptide in a prokaryotic host.

[0550] Also preferred is a polypeptide molecule, wherein said polypeptide comprises an amino acid sequence selected from the group consisting of: polypeptide sequence of SEQ ID NO:Y; a polypeptide encoded by SEQ ID NO:X or the complementary strand thereto; the polypeptide encoded by the nucleotide sequence as defined in columns 8 and 9 of Table 2; and a polypeptide encoded by the cDNA contained in Clone ID NO:Z.

[0551] Further preferred is a method of making a recombinant vector comprising inserting any of the above isolated nucleic acid molecule into a vector. Also preferred is the recombinant vector produced by this method. Also preferred is a method of making a recombinant host cell comprising introducing the vector into a host cell, as well as the recombinant host cell produced by this method.

[0552] Also preferred is a method of making an isolated polypeptide comprising culturing this recombinant host cell under conditions such that said polypeptide is expressed and recovering said polypeptide. Also preferred is this method of making an isolated polypeptide, wherein said recombinant host cell is a eukaryotic cell and said polypeptide is a human protein comprising an amino acid sequence selected from the group consisting of: polypeptide sequence of SEQ ID NO:Y; a polypeptide encoded by SEQ ID NO:X or the complementary strand thereto; the polypeptide encoded by the nucleotide sequence as defined in columns 8 and 9 of Table 2; and a polypeptide encoded by the cDNA contained in Clone ID NO:Z. The isolated polypeptide produced by this method is also preferred.

[0553] Also preferred is a method of treatment of an individual in need of an increased level of a protein activity, which method comprises administering to such an individual a Therapeutic comprising an amount of an isolated polypeptide, polynucleotide, immunogenic fragment or analogue thereof, binding agent, antibody, or antigen binding fragment of the claimed invention effective to increase the level of said protein activity in said individual.

[0554] Also preferred is a method of treatment of an individual in need of a decreased level of a protein activity, which method comprised administering to such an individual a Therapeutic comprising an amount of an isolated polypeptide, polynucleotide, immunogenic fragment or analogue thereof, binding agent, antibody, or antigen binding fragment of the claimed invention effective to decrease the level of said protein activity in said individual.

[0555] Also preferred is a method of treatment of an individual in need of a specific delivery of toxic compositions to diseased cells (e.g., tumors, leukemias or lymphomas), which method comprises administering to such an individual a Therapeutic comprising an amount of an isolated polypeptide of the invention, including, but not limited to a binding agent, or antibody of the claimed invention that are associated with toxin or cytotoxic prodrugs.

[0556] Having generally described the invention, the same will be more readily understood by reference to the following examples, which are provided by way of illustration and are not intended as limiting.

TABLE 6

| ATCC Deposits | Deposit Date | ATCC Designation Number |
|---|---|---|
| LP01, LP02, LP03, | May-20-97 | 209059, 209060, 209061, 209062, |
| LP04, LP05, LP06, | | 209063, 209064, 209065, 209066, |
| LP07, LP08, LP09, | | 209067, 209068, 209069 |
| LP10, LP11, | | |
| LP12 | Jan-12-98 | 209579 |
| LP13 | Jan-12-98 | 209578 |
| LP14 | Jul-16-98 | 203067 |
| LP15 | Jul-16-98 | 203068 |
| LP16 | Feb-1-99 | 203609 |
| LP17 | Feb-1-99 | 203610 |
| LP20 | Nov-17-98 | 203485 |
| LP21 | Jun-18-99 | PTA-252 |
| LP22 | Jun-18-99 | PTA-253 |
| LP23 | Dec-22-99 | PTA-1081 |

### EXAMPLES

### Example 1

### Isolation of a Selected cDNA Clone from the Deposited Sample

[0557] Each Clone ID NO:Z is contained in a plasmid. Table 7 identifies the vectors used to construct the cDNA library from which each clone was isolated. In many cases, the vector used to construct the library is a phage vector from which a plasmid has been excised. The following correlates the related plasmid for each phage vector used in constructing the cDNA library. For example, where a particular clone is identified in Table 7 as being isolated in the vector “Lambda Zap,” the corresponding deposited clone is in “pBluescript.”

| Vector Used to Construct Library | Corresponding Deposited Plasmid |
|---|---|
| Lambda Zap | pBluescript (pBS) |
| Uni-Zap XR | pBluescript (pBS) |
| Zap Express | pBK |
| lafmid BA | plafmid BA |
| pSport1 | pSport1 |
| pCMVSport 2.0 | pCMVSport 2.0 |
| pCMVSport 3.0 | pCMVSport 3.0 |
| pCR ® 21 | pCR ® 2.1 |

[0558] Vectors Lambda Zap (U.S. Pat. Nos. 5,128,256 and 5,286,636), Uni-Zap XR (U.S. Pat. Nos. 5,128, 256 and 5,286,636), Zap Express (U.S. Pat. Nos. 5,128,256 and 5,286,636), pBluescript (pBS) (Short, J. M. et al., Nucleic Acids Res. 16:7583-7600 (1988); Alting-Mees, M. A. and Short, J. M., Nucleic Acids Res. 17:9494 (1989)) and pBK (Alting-Mees, M. A. et al., Strategies 5:58-61 (1992)) are commercially available from Stratagene Cloning Systems, Inc., 11011 N. Torrey Pines Road, La Jolla, Calif., 92037. pBS contains an ampicillin resistance gene and pBK contains a neomycin resistance gene. Both can be transformed into E. coli strain XL-1 Blue, also available from Stratagene. pBS comes in 4 forms SK+, SK−, KS+ and KS. The S and K refers to the orientation of the polylinker to the T7 and T3 primer sequences which flank the polylinker region (“S” is for SacI and “K” is for KpnI which are the first sites on each respective end of the linker). “+” or “−” refer to the orientation of the f1 origin of replication (“ori”), such that in one orientation, single stranded rescue initiated from the f1 ori generates sense strand DNA and in the other, antisense.

[0559] Vectors pSport1, pCMVSport 2.0 and pCMVSport 3.0, were obtained from Life Technologies, Inc., P. O. Box 6009, Gaithersburg, Md. 20897. All Sport vectors contain an ampicillin resistance gene and may be transformed into E. coli strain DH10B, also available from Life Technologies. (See, for instance, Gruber, C. E., et al., Focus 15:59 (1993).) Vector lafmid BA (Bento Soares, Columbia University, NY) contains an ampicillin resistance gene and can be transformed into E. coli strain XL-1 Blue. Vector pCR®2.1, which is available from Invitrogen, 1600 Faraday Avenue, Carlsbad, Calif. 92008, contains an ampicillin resistance gene and may be transformed into E. coli strain DH10B, available from Life Technologies. (See, for instance, Clark, J. M., Nuc. Acids Res. 16:9677-9686 (1988) and Mead, D. et al., Bio/Technology 9: (1991).) Preferably, a polynucleotide of the present invention does not comprise the vector sequences identified for the particular clone in Table 7, as well as the corresponding plasmid vector sequences designated above.

[0560] The deposited material in the sample assigned the ATCC Deposit Number cited by reference to Tables 1A, 2, 6 and 7 for any given cDNA clone also may contain one or more additional plasmids, each comprising a cDNA clone different from that given clone. Thus, deposits sharing the same ATCC Deposit Number contain at least a plasmid for each Clone ID NO:Z.

TABLE 7

| | | | ATCC |
|---|---|---|---|
| Libraries owned by Catalog | Catalog Description | Vector | Deposit |
| HUKA HUKB HUKC HUKD HUKE | Human Uterine Cancer | Lambda ZAP II | LP01 |
| HUKE HUKG | | | |
| HCNA HCNB | Human Colon | Lambda Zap II | LP01 |
| HFFA | Human Fetal Brain, random primed | Lambda Zap II | LP01 |
| HTWA | Resting T-Cell | Lambda ZAP II | LP01 |
| HBQA | Early Stage Human Brain, random | Lambda ZAP II | LP01 |
| | primed | | |
| HLMB HLMF HLMG HLMH HLMI | breast lymph node CDNA library | Lambda ZAP II | LP01 |
| HLMJ HLMM HLMN | | | |
| HCQA HCQB | human colon cancer | Lamda ZAP II | LP01 |
| HMEA HMEC HMED HMEE HMEF | Human Microvascular Endothelial | Lambda ZAP II | LP01 |
| HMEG HME1 HMEJ HMEK HMEL | Cells, fract. A | | |
| HUSA HUSC | Human Umbilical Vein Endothelial | Lambda ZAP II | LP01 |
| | Cells, fract. A | | |
| HLQA HLQB | Hepatocellular Tumor | Lambda ZAP II | LP01 |
| HHGA HHGB HHGC HHGD | Hemangiopericytoma | Lambda ZAP II | LP01 |
| HSDM | Human Striatum Depression, re-rescue | Lambda ZAP II | LP01 |
| HUSH | H Umbilical Vein Endothelial Cells, | Lambda ZAP II | LP01 |
| | frac A, re-excision | | |
| HSGS | Salivary gland, subtracted | Lambda ZAP II | LP01 |
| HFXA HFXB HFXC HFXD HFXE | Brain frontal cortex | Lambda ZAP II | LP01 |
| HFXF HFXG HFXH | | | |
| HPQA HPQB HPQC | PERM TF274 | Lambda ZAP II | LP01 |
| HFXJ HFXK | Brain Frontal Cortex, re-excision | Lambda ZAP II | LP01 |
| HCWA HCWB HCWC HCWD | CD34 positive cells (Cord Blood) | ZAP Express | LP02 |
| HCWE HCWF HCWG HCWH HCWI | | | |
| HCWJ HCWK | | | |
| HCUA HCUB HCUC | CD34 depleted Buffy Coat (Cord | ZAP Express | LP02 |
| | Blood) | | |
| HRSM | A-14 cell line | ZAP Express | LP02 |
| HRSA | Al-CELL LINE | ZAP Express | LP02 |
| HCUD HCUE HCUF HCUG HCUH | CD34 depleted Buffy Coat (Cord | ZAP Express | LP02 |
| HCUI | Blood), re-excision | | |
| HBXE HBXF HBXG | H. Whole Brain #2, re-excision | ZAP Express | LP02 |
| HRLM | L8 cell line | ZAP Express | LP02 |
| HBXA HBXB HBXC HBXD | Human Whole Brain #2 - Oligo dT> | ZAP Express | LP02 |
| | 1.5Kb | | |
| HUDA HUDB HUDC | Testes | ZAP Express | LP02 |
| HHTM HHTN HHTO | H. hypothalamus, frac A;re-excision | ZAP Express | LP02 |
| HHTL | H. hypothalamus, frac A | ZAP Express | LP02 |
| HASA HASD | Human Adult Spleen | Uni-ZAP XR | LP03 |
| HFKC HFKD HFKE HFKF HFKG | Human Fetal Kidney | Uni-ZAP XR | LP03 |
| HESA HESB HE8C HESD HE8E | Human 8 Week Whole Embryo | Uni-ZAP XR | LP03 |
| HESF HESM HE8N | | | |
| HGBA HGBD HGBE HGBF HGBG | Human Gall Bladder | Uni-ZAP XR | LP03 |
| HGBH HGBI | | | |
| HLHA HLHB HLHC HLHD HLHE | Human Fetal Lung III | Uni-ZAP XR | LP03 |
| HLHF HLHG HLHH HLHQ | | | |
| HPMA HPMB HPMC HPMD HPME | Human Placenta | lJni-ZAP XR | LP03 |
| HPMF HPMG HPMH | | | |
| HPRA HPRB HPRC HPRD | Human Prostate | Uni-ZAP XR | LP03 |
| HSIA HSIC HSID HSIE | Human Adult Small Intestine | Uni-ZAP XR | LP03 |
| HTEA HTEB HTEC HTED HTEE | Human Testes | Uni-ZAP XR | LP03 |
| HTEF HTEG HTEH HTEI HTEJ | | | |
| HTEK | | | |
| HTPA HTPB HTPC HTPD HTPE | Human Pancreas Tumor | Uni-ZAP XR | LP03 |
| HTTA HTTB HTTC HTTD HTTE | Human Testes Tumor | Uni-ZAP XR | LP03 |
| HTTF | | | |
| HAPA HAPB HAPC HAPM | Human Adult Pulmonary | Uni-ZAP XR | LP03 |
| HETA HETB HETC HETD HETE | Human Endometnal Tumor | Uni-ZAP XR | LP03 |
| HETE HETG HETH HETI | | | |
| HHFB HHFC HHFD HHFE HHFF | Human Fetal Heart | Uni-ZAP XR | LP03 |
| HHFG HHFH HHFI | | | |
| HHPB HHPC HHPD HHPE HHPF | Human Hippocampus | Uni-ZAP XR | LP03 |
| HHPG HHPH | | | |
| HCE1 HCE2 HCE3 HCE4 HCE5 | Human Cerebellum | Uni-ZAP XR | LP03 |
| HCEB HCEC HCED HCEE HCEF | | | |
| HCEG | | | |
| HUVB HUVC HUVD HUVE | Human Umbilical Vein, Endo. remake | Uni-ZAP XR | LP03 |
| HSTA HSTB HSTC HSTD | Human Skin Tumor | Uni-ZAP XR | LP03 |
| HTAA HTAB HTAC HTAD HTAE | Human Activated T-Cells | Uni-ZAP XR | LP03 |
| HFEA HFEB HEEC | Human Fetal Epithelium (Skin) | Uni-ZAP XR | LP03 |
| HJPA HJPB HJPC HJPD | HUMAN JURKAT MEMBRANE | Uni-ZAP XR | LP03 |
| | BOUND POLYSOMES | | |
| HESA | Human epithelioid sarcoma | Uni-Zap XR | LP03 |
| HLTA HLTB HLTC HLTD HLTE | Human T-Cell Lymphoma | Uni-ZAP XR | LP03 |
| HLTF | | | |
| HFTA HFTB HFTC HFTD | Human Fetal Dura Mater | Uni-ZAP XR | LP03 |
| HRDA HRDB HRDC HRDD HRDE | Human Rhabdomyosarcoma | Uni-ZAP XR | LP03 |
| HRDF | | | |
| HCAA HCAB HCAC | Cem cells cyclohexamide treated | Uni-ZAP XR | LP03 |
| HRGA HRGB HRGC HRGD | Raji Cells, cyclohexamide treated | Uni-ZAP XR | LP03 |
| HSUA HSUB HSUC HSUM | Supt Cells, cyclohexamide treated | Uni-ZAP XR | LP03 |
| HT4A HT4C HT4D | Activated T-Cells, 12 hrs. | Uni-ZAP XR | LP03 |
| HE9A HE9B HE9C HE9D HE9E | Nine Week Old Early Stage Human | Uni-ZAP XR | LP03 |
| HE9F HE9G HE9H HE9M HE9N | | | |
| HATA HATB HATC HATD HATE | Human Adrenal Gland Tumor | Uni-ZAP XR | LP03 |
| HT5A | Activated T-Cells, 24 hrs. | Uni-ZAP XR | LP03 |
| HFGA HFGM | Human Fetal Brain | Uni-ZAP XR | LP03 |
| HNEA HNEB HNEC HNED HNEE | Human Neutrophil | Uni-ZAP XR | LP03 |
| HBGB HBGD | Human Primary Breast Cancer | Uni-ZAP XR | LP03 |
| HBNA HBNB | Human Normal Breast | Uni-ZAP XR | LP03 |
| HCAS | Gem Cells, cyclohexamide treated, | Uni-ZAP XR | LP03 |
| | subtra | | |
| HHPS | Human Hippocampus, subtracted | pBS | LP03 |
| HKCS HKCU | Human Colon Cancer, subtracted | pBS | LP03 |
| HRGS | Raji cells, cyclohexamide treated, | pBS | LP03 |
| | subtracted | | |
| HSUT | Supt cells, cyclohexamide treated, | pBS | LP03 |
| | differentially expressed | | |
| HT4S | Activated T-Cells, 12 hrs, subtracted | Uni-ZAP XR | LP03 |
| HCDA HCDB HCDC HCDD HCDE | Human Chondrosarcoma | Uni-ZAP XR | LP03 |
| HOAA HOAB HOAC | Human Osteosarcoma | Uni-ZAP XR | LP03 |
| HTLA HTLB HTLC HTLD HTLE | Human adult testis, large inserts | Uni-ZAP XR | LP03 |
| HTLF | | | |
| HLMA HLMC HLMD | Breast Lymph node cDNA library | Uni-ZAP XR | LP03 |
| H6EA H6EB H6EC | HL-60, PMA 4H | Uni-ZAP XR | LP03 |
| HTXA HTXB HTXC HTXD HTXE | Activated T-Cell (12hs)/Thiouridine | Uni-ZAP XR | LP03 |
| HTXF HTXG HTXH | labelledEco | | |
| HNFA HNFB HNFC HNFD HNFE | Human Neutrophil, Activated | Uni-ZAP XR | LP03 |
| HNFF HNFG HNFH HNFJ | | | |
| HTOB HTOC | HUMAN TONSILS, FRACTION 2 | Uni-ZAP XR | LP03 |
| HMGB | Human OB MG63 control fraction I | Uni-ZAP XR | LP03 |
| HOPB | Human OB HOS control fraction I | Uni-ZAP XR | LP03 |
| HORB | Human OB HOS treated (10 nM E2) | Uni-ZAP XR | LP03 |
| | fraction I | | |
| HSVA HSVB HSVC | Human Chronic Synovitis | Uni-ZAP XR | LP03 |
| HROA | HUMAN STOMACH | Uni-ZAP XR | LP03 |
| HBJA HBJB HBJC HBJD HBJE | HUMAN B CELL LYMPHOMA | Uni-ZAP XR | LP03 |
| HBJF HBJG HBJH HBJI HBJJ HBJK | | | |
| HCRA HCRB HCRC | human corpus colosum | Uni-ZAP XR | LP03 |
| HODA HODB HODC HODD | human ovarian cancer | Uni-ZAP XR | LP03 |
| HDSA | Dermatofibrosarcoma Protuberance | Uni-ZAP XR | LP03 |
| HMWA HMWB HMWC HMWD | Bone Marrow Cell Line (RS4;11) | Uni-ZAP XR | LP03 |
| HMWE HMWF HMWG HMWH | | | |
| HMWI HMWJ | | | |
| HSOA | stomach cancer (human) | Uni-ZAP XR | LP03 |
| HERA | SKIN | Uni-ZAP XR | LP03 |
| HMDA | Brain-medulloblastoma | Uni-ZAP XR | LP03 |
| HGLA HGLB HGLD | Glioblastoma | Uni-ZAP XR | LP03 |
| HEAA | H. Atrophic Endometrium | Uni-ZAP XR | LP03 |
| HBCA HBCB | H. Lymph node breast Cancer | Uni-ZAP XR | LP03 |
| HPWT | Human Prostate BPH, re-excision | Uni-ZAP XR | LP03 |
| HFVG HFVH HEVI | Fetal Liver, subtraction II | pBS | LP03 |
| HNFI | Human Neutrophils, Activated, re- | pBS | LP03 |
| | excision | | |
| HBMB HBMC HBMD | Human Bone Marrow, re-excision | pBS | LP03 |
| HKML HKMM HKMN | H. Kidney Medulla, re-excision | pBS | LP03 |
| HKIX HKIY | H. Kidney Cortex, subtracted | pBS | LP03 |
| HADT | H. Amygdala Depression, subtracted | pBS | LP03 |
| H6AS | HI-60, untreated, subtracted | Uni-ZAP XR | LP03 |
| H6ES | HL-60, PMA 4H, subtracted | Uni-ZAP XR | LP03 |
| H6BS | HL-60, RA 4h, Subtracted | Uni-ZAP XR | LP03 |
| H6CS | HL-60, PMA 1d, subtracted | Uni-ZAP XR | LP03 |
| HTXJ HTXK | Activated T-cell(12h)/Thiouridine-re- | Uni-ZAP XR | LP03 |
| | excision | | |
| HMSA HMSB HMSC HMSD HMSE | Monocyte activated | Uni-ZAP XR | LP03 |
| HMSF HMSG HMSH HMSI HMSJ | | | |
| HMSK | | | |
| HAGA HAGB HAGC HAGD HAGE | Human Amygdala | Uni-ZAP XR | LP03 |
| HAGF | | | |
| HSRA HSRB HSRE | STROMAL -OSTEOCLASTOMA | Uni-ZAP XR | LP03 |
| HSRD HSRF HSRG HSRH | Human Osteoclastoma Stromal Cells - | Uni-ZAP XR | LP03 |
| | unamplified | | |
| HSQA HSQB HSQC HSQD HSQE | Stromal cell TF274 | Uni-ZAP XR | LP03 |
| HSQF HSQG | | | |
| HSKA HSKB HSKC HSKD HSKE | Smooth muscle, serum treated | Uni-ZAP XR | LP03 |
| HSKF HSKZ | | | |
| HSLA HSLB HSLC HSLD HSLE | Smooth muscle,control | Uni-ZAP XR | LP03 |
| HSLF HSLG | | | |
| HSDA HSDD HSDE HSDF HSDG | Spinal cord | Uni-ZAP XR | LP03 |
| HSDH | | | |
| HPWS | Prostate-BPH subtracted II | pBS | LP03 |
| HSKW HSKX HSKY | Smooth Muscle- HASTE normalized | pBS | LP03 |
| HFPB HFPC HFPD | H. Frontal cortex,epileptic;re-excision | Uni-ZAP XR | LP03 |
| HSDI HSDJ HSDK | Spinal Cord, re-excision | Uni-ZAP XR | LP03 |
| HSKN HSKO | Smooth Muscle Serum Treated, Norm | pBS | LP03 |
| HSKG HSKH HSKI | Smooth muscle, serum induced,re-exc | pBS | LP03 |
| HFCA HFCB HFCC HFCD HFCE | Human Fetal Brain | Uni-ZAP XR | LP04 |
| HFCF | | | |
| HPTA HPTB HPTD | Human Pituitary | Uni-ZAP XR | LP04 |
| HTHB HTHC HTHD | Human Thymus | Uni-ZAP XR | LP04 |
| HE6B HE6C HE6D HE6E HE6F | Human Whole Six Week Old Embryo | Uni-ZAP XR | LP04 |
| HE6G HE6S | | | |
| HSSA HSSB HSSC HSSD HSSE | Human Synovial Sarcoma | Uni-ZAP XR | LP04 |
| HSSF HSSG HSSH HSSI HSSJ HSSK | | | |
| HE7T | 7 Week Old Early Stage Human, | Uni-ZAP XR | LP04 |
| | subtracted | | |
| HEPA HEPB HEPC | Human Epididymus | Uni-ZAP XR | LP04 |
| HSNA HSNB HSNC HSNM HSNN | Human Synovium | Uni-ZAP XR | LP04 |
| HPFB HPFC HPFD HPFE | Human Prostate Cancer, Stage C | Uni-ZAP XR | LP04 |
| | fraction | | |
| HE2A HE2D HE2E HE2H HE2I | 12 Week Old Early Stage Human | Uni-ZAP XR | LP04 |
| HE2M HE2N HE2O | | | |
| HE2B HE2C HE2F HE2G HE2P | 12 Week Old Early Stage Human, II | Uni-ZAP XR | LP04 |
| HE2Q | | | |
| HPTS HPTT HPTU | Human Pituitary, subtracted | Uni-ZAP XR | LP04 |
| HAUA HAUB HAUC | Amniotic Cells - ThF induced | Uni-ZAP XR | LP04 |
| HAQA HAQB HAQC HAQD | Amniotic Cells - Primary Culture | Uni-ZAP XR | LP04 |
| HWTA HWTB HWTC | wilm's tumor | Uni-ZAP XR | LP04 |
| HBSD | Bone Cancer, re-excision | Uni-ZAP XR | LP04 |
| HSGB | Salivary gland, re-excision | Uni-ZAP XR | LP04 |
| HSJA HSJB HSJC | Smooth muscle-ILb induced | Uni-ZAP XR | LP04 |
| HSXA HSXB HSXC HSXD | Human Substantia Nigra | Uni-ZAP XR | LP04 |
| HSHA HSHB HSHC | Smooth muscle, IL1b induced | Uni-ZAP XR | LP04 |
| HOUA HOUB HOUC HOUD HOUE | Adipocytes | Uni-ZAP XR | LP04 |
| HPWA HPWB HPWC HPWD HPWE | Prostate BPH | Uni-ZAP XR | LP04 |
| HELA HELB HELC HELD HELE | Endothelial cells-control | Uni-ZAP XR | LP04 |
| HELF HELG HELH | | | |
| HEMA HEMB HEMC HEMD HEME | Endothelial-induced | Uni-ZAP XR | LP04 |
| HEMF HEMG HEMH | | | |
| HBIA HBIB HBIC | Human Brain, Striatum | Uni-ZAP XR | LP04 |
| HHSA HHSB HHSC HHSD HHSE | Human Hypothalmus,Schizophrenia | Uni-ZAP XR | LP04 |
| HNGA HNGB HNGC HNGD HNGE | neutrophils control | Uni-ZAP XR | LP04 |
| HNGF HNGG HNGH HNGI HNGJ | | | |
| HNHA HNHB HNHC HNHD HNHE | Neutrophils IL-I and LPS induced | Uni-ZAP XR | LP04 |
| HNHF HNHG HNHH HNHI HNHJ | | | |
| HSDB HSDC | STRIATUM DEPRESSION | Uni-ZAP XR | LP04 |
| HHPT | Hypothalamus | Uni-ZAP XR | LP04 |
| HSAT HSAU HSAV HSAW HSAX | Anergic T-cell | Uni-ZAP XR | LP04 |
| HSAY HSAZ | | | |
| HBMS HBMT HBMU HBMV | Bone marrow | Uni-ZAP XR | LP04 |
| HBMW HBMX | | | |
| HOEA HOEB HOEC HOED HOEE | Osteoblasts | Uni-ZAP XR | LP04 |
| HOEF HOBJ | | | |
| HAIA HAIB HAIC HAID HAIE | Epithelial-TNFa and INF induced | Uni-ZAP XR | LP04 |
| HAlF | | | |
| HTGA HTGB HTGC HTGD | Apoptotic T-cell | Uni-ZAP XR | LP04 |
| HMCA HMCB HMCC HMCD | Macrophage-oxLDL | Uni-ZAP XR | LP04 |
| HMCE | | | |
| HMAA HMAB HMAC HMAD | Macrophage (GM-CSF treated) | Uni-ZAP XR | LP04 |
| HMAE HMAF HMAG | | | |
| HPHA | Normal Prostate | Uni-ZAP XR | LP04 |
| HPIA HPIB HPIC | LNCAP prostate cell line | Uni-ZAP XR | LP04 |
| HPJA HPJB HPJC | PC3 Prostate cell line | Uni-ZAP XR | LP04 |
| HOSE HOSF HOSG | Human Osteoclastoma, re-excision | Uni-ZAP XR | LP04 |
| HTGE HTGF | Apoptotic T-cell, re-excision | Uni-ZAP XR | LP04 |
| HMAJ HMAK | H Macrophage (GM-CSF treated), re- | Uni-ZAP XR | LP04 |
| | excision | | |
| HACB HACC HACD | Human Adipose Tissue, re-excision | Uni-ZAP XR | LP04 |
| HFPA | H. Frontal Cortex, Epileptic | Uni-ZAP XR | LP04 |
| HFAA HFAB HFAC HFAD HFAE | Alzheimers, spongy change | Uni-ZAP XR | LP04 |
| HFAM | Frontal Lobe, Dementia | Uni-ZAP XR | LP04 |
| HMIA HMIB HMIC | Human Manic Depression Tissue | Uni-ZAP XR | LP04 |
| HTSA HTSE HTSF HTSG HTSH | Human Thymus | pBS | LP05 |
| HPBA HPBB HPBC HPBD HPBE | Human Pineal Gland | pBS | LP05 |
| HSAA HSAB HSAC | HSA 172 Cells | pBS | LP05 |
| HSBA HSBB HSBC HSBM | HSC172 cells | pBS | LP05 |
| HJAA HJAB HIAC HJAD | Jurkat T-ceIl G1 phase | pBS | LP05 |
| HJBA HJBB HJBC HJBD | Jurkat T-Cell, S phase | pBS | LP05 |
| HAFA HAFB | Aorta endothelial cells + TNF-a | pBS | LP05 |
| HAWA HAWE HAWC | Human White Adipose | pBS | LP05 |
| HTNA HTNB | Human Thyroid | pBS | LP05 |
| HONA | Normal Ovary, Premenopausal | pBS | LP05 |
| HARA HARB | Human Adult Retina | pBS | LP05 |
| HLJA HUB | Human Lung | pCMVSport 1 | LP06 |
| HOFM HOFN HOFO | H. Ovarian Tumor, II, OV5232 | pCMVSport2.0 | LP07 |
| HOGA HOGB HOGC | OV 10-3-95 | pCMVSport2.0 | LP07 |
| HCGL | CD34+cells, II | pCMVSport2.0 | LP07 |
| HDLA | Hodgkin's Lymphoma I | pCMVSport 2.0 | LP07 |
| HDTA HDTB HDTC HDTD HDTE | Hodgkin's Lymphoma II | pCMVSport2.0 | LP07 |
| HKAA HKAB HKAC HKAD HKAE | Keratinocyte | pCMVSport2.0 | LP07 |
| HKAF HKAG HKAH | | | |
| HCIM | CAPFINDER, Crohns Disease, lib 2 | pCMVSport2.0 | LP07 |
| HKAL | Keratinocyte, lib 2 | pCMVSport2.0 | LP07 |
| HKAT | Keratinocyte, lib 3 | pCMVSport2.0 | LP07 |
| HNDA | Nasal poiyps | pCMVSport2.0 | LP07 |
| HDRA | H. Primary Dendritic Cells,lib 3 | pCMVSport2.0 | LP07 |
| HOHA HOHB HOHC | Human Osteoblasts II | pCMVSport2.0 | LP07 |
| HLDA HLDB HLDC | Liver, Hepatoma | pCMVSport3.0 | LP08 |
| HLDN HLDO HLDP | Human Liver, normal | pCMVSport3.0 | LP08 |
| HMTA | pBMC stimulated w/ poly I/C | pCMVSport3.0 | LP08 |
| HNTA | NTERA2, control | pCMVSport3.0 | LP08 |
| HDPA HDPB HDPC HDPD HDPF | Primary Dendritic Cells, lib I | pCMVSport3.0 | LP08 |
| HDPG HDPH HDPI HDPJ HDPK | | | |
| HDPM HDPN HDPO HDPP | Primary Dendritic cells,frac 2 | pCMVSport3.0 | LP08 |
| HMUA HMUB HMUC | Myoloid Progenitor Cell Line | pCMVSport3.0 | LP08 |
| HHEA HHEB RHEC HHED | T Cell helper I | pCMVSport3.0 | LP08 |
| HHEM HHEN HHEO HHEP | T cell helper II | pCMVSport3.0 | LP08 |
| HEQA HEQB HEQC | Human endometrial stromal cells | pCMVSport3.0 | LP08 |
| HJMA HJMB | Human endometrial stromal cells- | pCMVSport3.0 | LP08 |
| | treated with progesterone | | |
| HSWA HSWB HSWC | Human endometrial stromal cells- | pCMVSport3.0 | LP08 |
| | treated with estradiol | | |
| HSYA HSYB HSYC | Human Thymus Stromal Cells | pCMVSport3.0 | LP08 |
| HLWA HLWB HLWC | Human Placenta | pCMVSport3.0 | LP08 |
| HRAA HRAB HRAC | Rejected Kidney, lib 4 | pCMVSport3.0 | LP08 |
| HMTM | PCR, pBMC I/C treated | PCRII | LP09 |
| HMJA | H. Meniingima, M6 | pSport 1 | LP10 |
| HMKA HMKB HMKC HMKD | H. Meningima, M1 | pSport 1 | LP10 |
| HMKE | | | |
| HUSG RUST | Human umbilical vein endothelial cells, | pSport 1 | LP10 |
| | IL-4 induced | | |
| HUSX HUSY | Human Umbilical Vein Endothelial | pSport 1 | LP10 |
| | Cells, uninduced | | |
| HOFA | Ovarian Tumor I, OV5232 | pSport 1 | LP10 |
| HCFA HCFB HCFC HCFD | T-Cell PHA 16 hrs | pSport 1 | LP10 |
| HCFL HCFM HCFN HCFO | T-Cell PHA 24 hrs | pSport 1 | LP10 |
| HADA HADC HADD HADE HADF | Human Adipose | pSport 1 | LP10 |
| HADG | | | |
| HOVA HOVB HOVC | Human Ovary | pSport 1 | LP10 |
| HTWB HTWC HTWD HTWE HTWF | Resting T-Cell Library,II | pSport 1 | LP10 |
| HMMA | Spleen metastic melanoma | pSport 1 | LP10 |
| HLYA HLYB HLYC HLYD HLYE | Spleen, Chronic lymphocytic leukemia | pSport 1 | LP10 |
| HCGA | CD34+cell, I | pSport 1 | LP10 |
| HEOM HEON | Human Eosinophils | pSport 1 | LP10 |
| HTDA | Human Tonsil, Lib 3 | pSport 1 | LP10 |
| HSPA | Salivary Gland, Lib 2 | pSport 1 | LP10 |
| HCHA HCHB HCHC | Breast Cancer cell line, MDA 36 | pSport 1 | LP10 |
| HCHM HCHN | Breast Cancer Cell line, angiogenic | pSport 1 | LP10 |
| HCIA | Crohn's Disease | pSport 1 | LP10 |
| HDAA HDAB HDAC | HEL cell line | pSport 1 | LP10 |
| HABA | Human Astrocyte | pSport 1 | LP10 |
| HUFA HUFB HUFC | Ulcerative Colitis | pSport 1 | LP10 |
| HNTM | NTERA2 + retinoic acid, 14 days | pSport 1 | LP10 |
| HDQA | Primary Dendritic cells,CapFinder2, | pSport 1 | LP10 |
| | frac 1 | | |
| HDQM | Primary Dendritic Cells, CapFinder, | pSport 1 | LP10 |
| | frac 2 | | |
| HLDX | Human Liver, | pSport 1 | LP10 |
| | normal,CapFinder | | |
| HULA HULB HULC | Human Dermal Endothelial | pSport1 | LP10 |
| | Cells,untreated | | |
| HUMA | Human Dermal Endothelial cells,treated | pSport1 | LP10 |
| HCJA | Human Stromal Endometrial | pSport1 | LP10 |
| | fibroblasts, untreated | | |
| HCJM | Human Stromal endometrial fibroblasts, | pSport1 | LP10 |
| | treated w/ estradiol | | |
| HEDA | Human Stromal endometrial fibroblasts, | pSport1 | LP10 |
| | treated with progesterone | | |
| HFNA | Human ovary tumor cell OV350721 | pSport1 | LP10 |
| HKGA HKGB HKGC HKGD | Merkel Cells | pSport1 | LP10 |
| HISA HISB HISC | Pancreas Islet Cell Tumor | pSport1 | LP10 |
| HLSA | Skin, burned | pSport1 | LP10 |
| HBZA | Prostate,BPH, Lib 2 | pSport 1 | LP10 |
| HBZS | Prostate BPH,Lib 2, subtracted | pSport 1 | LP10 |
| HFIA HFIB HEIC | Synovial Fibroblasts (control) | pSport1 | LP10 |
| HFIH HFII HFIJ | Synovial hypoxia | pSport 1 | LP10 |
| HFIT HFIU HFIV | Synovial IL-l/TNF stimulated | pSport 1 | LP10 |
| HGCA | Messangial cell, frac I | pSport1 | LP10 |
| HMVA HMVB HMVC | Bone Marrow Stromal Cell, untreated | pSport1 | LP10 |
| HFIX HFIY HFIZ | Synovial Fibroblasts (IIIITNF), subt | pSport1 | LP10 |
| HFOX HFOY HFOZ | Synovial hypoxia-RSF subtracted | pSport1 | LP10 |
| HMQA HMQB HMQC HMQD | Human Activated Monocytes | Uni-ZAP XR | LP11 |
| HLIA HLIB HLIC | Human Liver | pCMVSport 1 | LP012 |
| HHBA HHBB HHBC HHBD HHBE | Human Heart | pCMVSport 1 | LP012 |
| HBBA HBBB | Human Brain | pCMVSport 1 | LP012 |
| HLJA HUB HLJC HLJD HUE | Human Lung | pCMVSport 1 | LP012 |
| HOGA HOGB HOGC | Ovarian Tumor | pCMVSport 2.0 | LP012 |
| HTJM | Human Tonsils, Lib 2 | pCMVSport 2.0 | LP012 |
| HAMF HAMG | KMH2 | pCMVSport 3.0 | LP012 |
| HAJA HAJB HAJC | L428 | pCMVSport 3.0 | LP012 |
| HWBA HWBB HWBC HWBD | Dendritic cells, pooled | pCMVSport 3.0 | LP012 |
| HWBE | | | |
| HWAA HWAB HWAC HWAD | Human Bone Marrow, treated | pCMVSport 3.0 | LP012 |
| HWAE | | | |
| HYAA HYAB HYAC | B Cell lymphoma | pCMVSport 3.0 | LP012 |
| HWHG HWHH HWHI | Healing groin wound, 6.5 hours post | pCMVSport 3.0 | LP012 |
| | incision | | |
| HWHP HWHQ HWHR | Healing groin wound; 7.5 hours post | pCMVSport 3.0 | LP012 |
| | incision | | |
| HARM | Healing groin wound - zero hr post- | pCMVSport 3.0 | LP012 |
| | incision (control) | | |
| HBlM | Olfactory epithelium; nasalcavity | pCMVSport 3.0 | LP012 |
| HWDA | Healing Abdomen wound; 70&90 min | pCMVSport 3.0 | LP012 |
| | post incision | | |
| HWEA | Healing Abdomen Wound;15 days post | pCMVSport 3.0 | LP012 |
| | incision | | |
| HWJA | Healing Abdomen Wound;21&29 days | pCMVSport 3.0 | LP012 |
| HNAL | Human Tongue, frac 2 | pSport1 | LP012 |
| HMJA | H. Meniingima, M6 | pSport1 | LP012 |
| HMKA HMKB HMKC HMKD | H. Meningima, M1 | pSport1 | LP012 |
| HMKE | | | |
| HOFA | Ovarian Tumor I, OV5232 | pSport1 | LP012 |
| HCFA HCFB HCFC HCFD | T-Cell PHA 16 hrs | pSport1 | LP012 |
| HCFL HCFM HCFN HCFO | T-Cell PHA 24 hrs | pSport1 | LP012 |
| HMMA HMMB HMMC | Spleen metastic melanoma | pSport1 | LP012 |
| HTDA | Human Tonsil, Lib 3 | pSport1 | LP012 |
| HDBA | Human Fetal Thymus | pSport1 | LP012 |
| HDUA | Pericardium | pSport1 | LP012 |
| HBZA | Prostate,BPH, Lib 2 | pSport1 | LP012 |
| HWCA | Larynx tumor | pSport1 | LP012 |
| HWKA | Normal lung | pSport1 | LP012 |
| HSMB | Bone marrow stroma,treated | pSport1 | LP012 |
| HBHM | Normal trachea | pSport1 | LP012 |
| HLFC | Human Larynx | pSport1 | LP012 |
| HLRB | Siebben Polyposis | pSport1 | LP012 |
| HNIA | Mammary Gland | pSport1 | LP012 |
| HNJB | Palate carcinoma | pSport1 | LP012 |
| HNKA | Palate normal | pSport1 | LP012 |
| HMZA | Pharynx carcinoma | pSport1 | LP012 |
| HABG | Cheek Carcinoma | pSport1 | LP012 |
| HMZM | Pharynx Carcinoma | pSport1 | LP012 |
| HDRM | Larynx Carcinoma | pSport1 | LP012 |
| HVAA | Pancreas normal PCA4 No | pSport1 | LP012 |
| HICA | Tongue carcinoma | pSport1 | LP012 |
| HUKA HUKB HUKC HUKD HUKE | Human Uterine Cancer | Lambda ZAP II | LP013 |
| HFFA | Human Fetal Brain, random primed | Lambda ZAP II | LP013 |
| HTUA | Activated T-cell labeled with 4-thioluri | Lambda ZAP II | LP013 |
| HBQA | Early Stage Human Brain, random | Lambda ZAP II | LP013 |
| | primed | | |
| HMEB | Human microvascular Endothelial cells, | Lambda ZAP II | LP013 |
| | fract. B | | |
| HUSH | Human Umbilical Vein Endothelial | Lambda ZAP II | LP013 |
| | cells, fract. A, re-excision | | |
| HLQC HLQD | Hepatocellular tumor, re-excision | Lambda ZAP II | LP013 |
| HTWJ HTWK HTWL | Resting T-cell, re-excision | Lambda ZAP II | LP013 |
| HF6S | Human Whole 6 week Old Embryo (II), | pBluescript | LP013 |
| | subt | | |
| HHPS | Human Hippocampus, subtracted | pBluescript | LP013 |
| HL1S | LNCAP, differential expression | pBluescript | LP013 |
| HLHS HLHT | Early Stage Human Lung, Subtracted | pBluescript | LP013 |
| HSUS | Supt cells, cyclohexamide treated, | pBluescript | LP013 |
| | subtracted | | |
| HSUT | Supt cells, cyclohexamide treated, | pBluescript | LP013 |
| | differentially expressed | | |
| HSDS | H. Striatum Depression, subtracted | pBluescript | LP013 |
| HPTZ | Human Pituitary, Subtracted VII | pBluescript | LP013 |
| HSDX | H. Striatum Depression, subt II | pBluescript | LP013 |
| HSDZ | H. Striatum Depression, subt | pBluescript | LP013 |
| HPBA HPBB HPBC HPBD HPBE | Human Pineal Gland | pBluescript SK- | LP013 |
| HRTA | Colorectal Tumor | pBluescript SK- | LP013 |
| HSBA HSBB HSBC HSBM | HSC172 cells | pBluescript SK- | LP013 |
| HJAA HJAB HJAC HJAD | Jurkat T-cell G1 phase | pBluescript SK- | LP013 |
| HJBA HJBB HJBC HJBD | Jurkat T-cell, S1 phase | pBluescript SK- | LP013 |
| HTNA HTNB | Human Thyroid | pBluescript SK- | LP013 |
| HAHA HAHB | Human Adult Heart | Uni-ZAP XR | LP013 |
| HE6A | Whole 6 week Old Embryo | Uni-ZAP XR | LP013 |
| HFCA HFCB HFCC HFCD HFCE | Human Fetal Brain | Uni-ZAP XR | LP013 |
| HFKC HFKD HFKE HFKF HFKG | Human Fetal Kidney | Uni-ZAP XR | LP013 |
| HGBA HGBD HOBE HGBF HGBG | Human Gall Bladder | Uni-ZAP XR | LP013 |
| HPRA HPRB HPRC HPRD | Human Prostate | Uni-ZAP XR | LP013 |
| HTEA HTEB HTEC HTED HTEE | Human Testes | Uni-ZAP XR | LP013 |
| HTTA HTTB HTTC HTTD HTTE | Human Testes Tumor | Uni-ZAP XR | LP013 |
| HYBA HYBB | Human Fetal Bone | Uni-ZAP XR | LP013 |
| HFLA | Human Fetal Liver | Uni-ZAP XR | LP013 |
| HHFB HHFC HHFD HHFE HHFF | Human Fetal Heart | Uni-ZAP XR | LP013 |
| HUVB HUVC HUVD HUVE | Human Umbilical Vein, End. remake | Uni-ZAP XR | LP013 |
| HTHB HTHC HTHD | Human Thymus | Uni-ZAP XR | LP013 |
| HSTA HSTB HSTC HSTD | Human Skin Tumor | Uni-ZAP XR | LP013 |
| HTAA HTAB HTAC HTAD HTAE | Human Activated T-cells | Uni-ZAP XR | LP013 |
| HFEA HEEB HFEC | Human Fetal Epithelium (skin) | Uni-ZAP XR | LP013 |
| HJPA HJPB HJPC HJPD | Human Jurkat Membrane Bound | Uni-ZAP XR | LP013 |
| | Polysomes | | |
| HESA | Human Epithelioid Sarcoma | Uni-ZAP XR | LP013 |
| HALS | Human Adult Liver, Subtracted | Uni-ZAP XR | LP013 |
| HFTA HFTB HFTC HFTD | Human Fetal Dura Mater | Uni-ZAP XR | LP013 |
| HCAA HCAB HCAC | Cem cells, cyclohexamide treated | Uni-ZAP XR | LP013 |
| HRGA HRGB HRGC HRGD | Raji Cells, cyclohexamide treated | Uni-ZAP XR | LP013 |
| HE9A HE9B HE9C HE9D HE9E | Nine Week Old Early Stage Human | Uni-ZAP XR | LP013 |
| HSFA | Human Fibrosarcoma | Uni-ZAP XR | LP013 |
| HATA HATB HATC HATD HATE | Human Adrenal Gland Tumor | Uni-ZAP XR | LP013 |
| HTRA | Human Trachea Tumor | Uni-ZAP XR | LP013 |
| HE2A HE2D HE2E HE2H HE2I | 12 Week Old Early Stage Human | Uni-ZAP XR | LP013 |
| HE2B HE2C HE2F HE2G HE2P | 12 Week Old Early Stage Human, II | Uni-ZAP XR | LP013 |
| HNEA HNEB HNEC HNED HNEE | Human Neutrophil | Uni-ZAP XR | LP013 |
| HBGA | Human Primary Breast Cancer | Uni-ZAP XR | LP013 |
| HPTS HPTT HPTU | Human Pituitary, subtracted | Uni-ZAP XR | LP013 |
| HMQA HMQB HMQC HMQD | Human Activated Monocytes | Uni-ZAP XR | LP013 |
| HOAA HOAB HOAC | Human Osteosarcoma | Uni-ZAP XR | LP013 |
| HTOA HTOD HTOE HTOF HTOG | human tonsils | Uni-ZAP XR | LP013 |
| HMGB | Human GB MG63 control fraction I | Uni-ZAP XR | LP013 |
| HOPB | Human GB HOS control fraction I | Uni-ZAP XR | LP013 |
| HOQB | Human GB HOS treated (1 nM E2) | Uni-ZAP XR | LP013 |
| | fraction I | | |
| HAUA HAUB HAUC | Amniotic Cells - TNF induced | Uni-ZAP XR | LP013 |
| HAQA HAQB HAQC HAQD | Amniotic Cells - Primary Culture | Uni-ZAP XR | LP013 |
| HROA HROC | HUMAN STOMACH | Uni-ZAP XR | LP013 |
| HBJA HBJB HBJC HBJD EBJE | HUMAN B CELL LYMPHOMA | Uni-ZAP XR | LP013 |
| HODA HODB HODC HODD | human ovarian cancer | Uni-ZAP XR | LP013 |
| HCPA | Corpus Callosum | Uni-ZAP XR | LP013 |
| HSOA | stomach cancer (human) | Uni-ZAP XR | LP013 |
| HERA | SKIN | Uni-ZAP XR | LP013 |
| HMDA | Brain-medulloblastoma | Uni-ZAP XR | LP013 |
| HGLA HGLB HGLD | Glioblastoma | Uni-ZAP XR | LP013 |
| HWTA HWTB HWTC | wilms tumor | Uni-ZAP XR | LP013 |
| HEAA | H. Atrophic Endometrium | Uni-ZAP XR | LP013 |
| HAPN HAPO HAPP HAPQ HAPR | Human Adult Pulmonary;re-excision | Uni-ZAP XR | LP013 |
| HLTG HLTH | Human T-cell lymphoma;re-excision | Uni-ZAP XR | LP013 |
| HAHC HAHD HAHE | Human Adult Heart;re-excision | Uni-ZAP XR | LP013 |
| HAGA HAGB HAGC HAGD HAGE | Human Amygdala | Uni-ZAP XR | LP013 |
| HSJA HSJB HSJC | Smooth muscle-ILb induced | Uni-ZAP XR | LP013 |
| HSHA HSHB HSHC | Smooth muscle, IL1b induced | Uni-ZAP XR | LP013 |
| HPWA HPWB HPWC HPWD HPWE | Prostate BPH | Uni-ZAP XR | LP013 |
| HPIA HPIB HPIC | LNCAP prostate cell line | Uni-ZAP XR | LP013 |
| HPJA HPJB HPJC | PC3 Prostate cell line | Uni-ZAP XR | LP013 |
| HBTA | Bone Marrow Stroma, TNF&LPS ind | Uni-ZAP XR | LP013 |
| HMCF HMCG HMCH HMCI HMCJ | Macrophage-oxLDL; re-excision | Uni-ZAP XR | LP013 |
| HAGG HAGH HAGI | Human Amygdala;re-excision | Uni-ZAP XR | LP013 |
| HACA | H. Adipose Tissue | Uni-ZAP XR | LP013 |
| HKFB | K562 + PMA (36 hrs),re-excision | ZAP Express | LP013 |
| HCWT HCWU HCWV | CD34 positive cells (cord blood),re-ex | ZAP Express | LP013 |
| HBWA | Whole brain | ZAP Express | LP013 |
| HBXA HBXB HBXC HBXD | Human Whole Brain #2- Oligo dT> | ZAP Express | LP013 |
| | 1.5Kb | | |
| HAVM | Temporal cortex-Alzheizmer | pT-Adv | LP014 |
| HAVT | Hippocampus, Alzheimer Subtracted | pT-Adv | LP014 |
| HHAS | CHME Cell Line | Uni-ZAP XR | LP014 |
| HAJR | Larynx normal | pSport 1 | LP014 |
| HWLE HWLF HWLG HWLH | Colon Normal | pSport 1 | LP014 |
| HCRM HCRN HCRO | Colon Carcinoma | pSport 1 | LP014 |
| HWLI HWLJ HWLK | Colon Normal | pSport 1 | LP014 |
| HWLQ HWLR HWLS HWLT | Colon Tumor | pSport 1 | LP014 |
| HBFM | Gastrocnemius Muscle | pSport 1 | LP014 |
| HBOD HBOE | Quadriceps Muscle | pSport 1 | LP014 |
| HBKD HBKE | Soleus Muscle | pSport 1 | LP0t4 |
| HCCM | Pancreatic Langerhans | pSport 1 | LP014 |
| HWGA | Larynx carcinoma | pSport 1 | LP014 |
| HWGM HWGN | Larynx carcinoma | pSport 1 | LP014 |
| HWLA HWLB HWLC | Normal colon | pSport 1 | LP014 |
| HWLM HWLN | Colon Tumor | pSport 1 | LP014 |
| HVAM HVAN HVAO | Pancreas Tumor | pSport 1 | LP0t4 |
| HWGQ | Larynx carcinoma | pSport 1 | LP014 |
| HAQM HAQN | Salivary Gland | pSport 1 | LP014 |
| HASM | Stomach; normal | pSport 1 | LP014 |
| HBGM | Uterus; normal | pSport 1 | LP014 |
| HCDM | Testis; normal | pSport 1 | LP014 |
| HDJM | Brain; normal | pSport 1 | LP014 |
| HEFM | Adrenal Gland,normal | pSport 1 | LP014 |
| HBAA | Rectum normal | pSport 1 | LP014 |
| HFDM | Rectum tumour | pSport 1 | LP014 |
| HGAM | Colon, normal | pSport 1 | LP014 |
| HHMM | Colon, tumour | pSport 1 | LP014 |
| HCLB HCLC | Human Lung Cancer | Lambda Zap II | LP015 |
| HRLA | LI Cell line | ZAP Express | LP015 |
| HHAM | Hypothalamus, Alzheimer's | pCMVSport 3.0 | LP015 |
| HKBA | Ku 812F Basophils Line | pSport 1 | LP015 |
| HS2S | Saos2, Dexamethosome Treated | pSport 1 | LP016 |
| HA5A | Lung Carcinoma A549 TNFalpha | pSport 1 | LP016 |
| | activated | | |
| HTFM | TF-l Cell Line GM-CSF Treated | pSport 1 | LP016 |
| HYAS | Thyroid Tumour | pSport1 | LP016 |
| HUTS | Larynx Normal | pSport 1 | LP016 |
| HXOA | Larynx Tumor | pSport 1 | LP016 |
| HEAH | Ea.hy.926 cell line | pSport 1 | LP016 |
| HINA | Adenocarcinoma Human | pSport 1 | LP016 |
| HRMA | Lung Mesothelium | pSport 1 | LP016 |
| HLCL | Human Pre-Differentiated Adipocytes | Uni-Zap XR | LP017 |
| HS2A | Saos2 Cells | pSport 1 | LP020 |
| HS2I | Saos2 Cells; Vitamin D3 Treated | pSport 1 | LP020 |
| HUCM | CHME Cell Line, untreated | pSport 1 | LP020 |
| HEPN | Aryepiglottis Normal | pSport 1 | LP020 |
| HPSN | Sinus Piniformis Tumour | pSport 1 | LP020 |
| HNSA | Stomach Normal | pSport 1 | LP020 |
| HNSM | Stomach Tumour | pSport 1 | LP020 |
| HNLA | Liver Normal Met5No | pSport 1 | LP020 |
| HUTA | Liver Tumour Met 5 Tu | pSport 1 | LP020 |
| HOCN | Colon Normal | pSport 1 | LP020 |
| HOCT | Colon Tumor | pSport 1 | LP020 |
| HTNT | Tongue Tumour | pSport 1 | LP020 |
| HLXN | Larynx Normal | pSport 1 | LP020 |
| HLXT | Larynx Tumour | pSport 1 | LP020 |
| HTYN | Thymus | pSport 1 | LP020 |
| HPLN | Placenta | pSport 1 | LP020 |
| HTNG | Tongue Normal | pSport 1 | LP020 |
| HZAA | Thyroid Normal (SDCA2 No) | pSport 1 | LP020 |
| HWES | Thyroid Thyroiditis | pSport 1 | LP020 |
| HFHD | Ficolled Human Stromal Cells, 5Fu | pTrip1Ex2 | LP021 |
| | treated | | |
| HFHM,HFHN | Ficolled Human Stromal Cells, | pTrip1Ex2 | LP021 |
| | Untreated | | |
| HPCI | Hep G2 Cells, lambda library | lambda Zap-CMV XR | LP021 |
| HBCA,HBCB,HBCC | H. Lymph node breast Cancer | Uni-ZAP XR | LP021 |
| HCOK | Chondrocytes | pSPORT1 | LP022 |
| HDCA, HDCB, HDCC | Dendritic Cells From CD34 Cells | pSPORT1 | LP022 |
| HDMA, HDMB | CD4O activated monocyte dendritic | pSPORT1 | LP022 |
| | cells | | |
| HDDM, HDDN, HDDO | LPS activated derived dendritic cells | pSPORT1 | LP022 |
| HPCR | Hep G2 Cells, PCR library | lambda Zap-CMV XR | LP022 |
| HAAA, HAAB, HAAC | Lung, Cancer (40053 13A3): Invasive | pSPORT1 | LP022 |
| | Poorly Differentiated Lung | | |
| | Adenocarcinoma | | |
| HIPA, HIPB, HIPC | Lung, Cancer (4005163 B7): Invasive, | pSPORT1 | LP022 |
| | Poorly Diff. Adenocarcinoma, | | |
| | Metastatic | | |
| HOOH, HOGI | Ovary, Cancer: (4004562 B6) Papillary | pSPORT1 | LP022 |
| | Serous Cystic Neoplasm, Low | | |
| | Malignant Pot | | |
| HIDA | Lung, Normal: (4005313 B1) | pSPORT1 | LP022 |
| HUJA,HUJB,HUJC,HUJD,HUJE | B-Cells | pCMVSport 3.0 | LP022 |
| HNOA,HNOB,HNOC,HNOD | Ovary, Normal: (9805C040R) | pSPORT1 | LP022 |
| HNLM | Lung, Normal: (4005313 B1) | pSPORT1 | LP022 |
| HSCL | Stromal Cells | pSPORT1 | LP022 |
| HAAX | Lung, Cancer: (4005313 A3) Invasive | pSPORT1 | LP022 |
| | Poorly-differentiated Metastatic lung | | |
| | adenocarcinoma | | |
| HUUA,HUUB,HUUC,HUUD | B-cells (unstimulated) | pTrip1Ex2 | LP022 |
| HWWA,HWWB,HWWC,HWWD,H | B-cells (stimulated) | pSPORT1 | LP022 |
| WWE,HWWF,HWWG | | | |
| HCCC | Colon, Cancer: (9808C064R) | pCMVSport 3.0 | LP023 |
| HPDO HPDP HPDQ HPDR HPD | Ovary, Cancer (9809C332): Poorly | pSport 1 | LP023 |
| | differentiated adenocarcinoma | | |
| HPCO HPCP HPCQ HPCT | Ovary, Cancer (15395A1F): Grade II | pSport 1 | LP023 |
| | Papillary Carcinoma | | |
| HOCM HOCO HOCP HOCQ | Ovary, Cancer: (15799A1F) Poorly | pSport 1 | LP023 |
| | differentiated carcinoma | | |
| HCBM HCBN HCBO | Breast, Cancer: (4004943 A5) | pSport 1 | LP023 |
| HNBT HNBU HNBV | Breast, Normal: (4005522B2) | pSport 1 | LP023 |
| HBCP HBCQ | Breast, Cancer: (4005522 A2) | pSport 1 | LP023 |
| HBCJ | Breast, Cancer: (9806C012R) | pSport 1 | LP023 |
| HSAM HSAN | Stromal cells 3.88 | pSport 1 | LP023 |
| HVCA HVCB HVCC HVCD | Ovary, Cancer: (4004332 A2) | pSport 1 | LP023 |
| HSCK HSEN HSEO | Stromal cells (HBM3.18) | pSport 1 | LP023 |
| HSCP HSCQ | stromal cell clone 2.5 | pSport 1 | LP023 |
| HUXA | Breast Cancer: (4005385 A2) | pSport 1 | LP023 |
| HCOM HCON HCOO HCOP HCOQ | Ovary, Cancer (4004650 A3): Well- | pSport 1 | LP023 |
| | Differentiated Micropapillary Serous | | |
| | Carcinoma | | |
| HBNM | Breast, Cancer: (9802C020E) | pSport 1 | LP023 |
| HVVA HVVB HVVC HVVD HVVE | Human Bone Marrow, treated | pSport 1 | LP023 |

[0561] Two nonlimiting examples are provided below for isolating a particular clone from the deposited sample of plasmid cDNAs cited for that clone in Table 7. First, a plasmid is directly isolated by screening the clones using a polynucleotide probe corresponding to the nucleotide sequence of SEQ ID NO:X.

[0562] Particularly, a specific polynucleotide with 30-40 nucleotides is synthesized using an Applied Biosystems DNA synthesizer according to the sequence reported. The oligonucleotide is labeled, for instance, with ³²P-γ-ATP using T4 polynucleotide kinase and purified according to routine methods. (E.g., Maniatis et al., Molecular Cloning: A Laboratory Manual, Cold Spring Harbor Press, Cold Spring, N.Y. (1982).) The plasmid mixture is transformed into a suitable host, as indicated above (such as XL-1 Blue (Stratagene)) using techniques known to those of skill in the art, such as those provided by the vector supplier or in related publications or patents cited above. The transformants are plated on 1.5% agar plates (containing the appropriate selection agent, e.g., ampicillin) to a density of about 150 transformants (colonies) per plate. These plates are screened using Nylon membranes according to routine methods for bacterial colony screening (e.g., Sambrook et al., Molecular Cloning: A Laboratory Manual, 2nd Edit., (1989), Cold Spring Harbor Laboratory Press, pages 1.93 to 1.104), or other techniques known to those of skill in the art.

[0563] Alternatively, two primers of 17-20 nucleotides derived from both ends of the nucleotide sequence of SEQ ID NO:X are synthesized and used to amplify the desired cDNA using the deposited cDNA plasmid as a template. The polymerase chain reaction is carried out under routine conditions, for instance, in 25 μl of reaction mixture with 0.5 ug of the above cDNA template. A convenient reaction mixture is 1.5-5 mM MgCl₂, 0.01% (w/v) gelatin, 20 μM each of dATP, dCTP, dGTP, dTTP, 25 pmol of each primer and 0.25 Unit of Taq polymerase. Thirty five cycles of PCR (denaturation at 94° C. for 1 min; annealing at 55° C. for 1 min; elongation at 72° C. for 1 min) are performed with a Perkin-Elmer Cetus automated thermal cycler. The amplified product is analyzed by agarose gel electrophoresis and the DNA band with expected molecular weight is excised and purified. The PCR product is verified to be the selected sequence by subcloning and sequencing the DNA product.

[0564] Several methods are available for the identification of the 5′ or 3′ non-coding portions of a gene which may not be present in the deposited clone. These methods include but are not limited to, filter probing, clone enrichment using specific probes, and protocols similar or identical to 5′ and 3′ “RACE” protocols which are well known in the art. For instance, a method similar to 5′ RACE is available for generating the missing 5′ end of a desired full-length transcript. (Fromont-Racine et al., Nucleic Acids Res. 21(7):1683-1684 (1993).)

[0565] Briefly, a specific RNA oligonucleotide is ligated to the 5′ ends of a population of RNA presumably containing full-length gene RNA transcripts. A primer set containing a primer specific to the ligated RNA oligonucleotide and a primer specific to a known sequence of the gene of interest is used to PCR amplify the 5′ portion of the desired full-length gene. This amplified product may then be sequenced and used to generate the full length gene.

[0566] This above method starts with total RNA isolated from the desired source, although poly-A+ RNA can be used. The RNA preparation can then be treated with phosphatase if necessary to eliminate 5′ phosphate groups on degraded or damaged RNA which may interfere with the later RNA ligase step. The phosphatase should then be inactivated and the RNA treated with tobacco acid pyrophosphatase in order to remove the cap structure present at the 5′ ends of messenger RNAs. This reaction leaves a 5′ phosphate group at the 5′ end of the cap cleaved RNA which can then be ligated to an RNA oligonucleotide using T4 RNA ligase.

[0567] This modified RNA preparation is used as a template for first strand cDNA synthesis using a gene specific oligonucleotide. The first strand synthesis reaction is used as a template for PCR amplification of the desired 5′ end using a primer specific to the ligated RNA oligonucleotide and a primer specific to the known sequence of the gene of interest. The resultant product is then sequenced and analyzed to confirm that the 5′ end sequence belongs to the desired gene.

### Example 2

### Isolation of Genomic Clones Corresponding to a Polynucleotide

[0568] A human genomic PI library (Genomic Systems, Inc.) is screened by PCR using primers selected for the sequence corresponding to SEQ ID NO:X according to the method described in Example 1. (See also, Sambrook et al., Molecular Cloning: A Laboratory Manual, 2nd Edn., (1989), Cold Spring Harbor Laboratory Press).

### Example 3

### Tissue Specific Expression Analysis

[0569] The Human Genome Sciences, Inc. (HGS) database is derived from sequencing tissue and/or disease specific cDNA libraries. Libraries generated from a particular tissue are selected and the specific tissue expression pattern of EST groups or assembled contigs within these libraries is determined by comparison of the expression patterns of those groups or contigs within the entire database. ESTs and assembled contigs which show tissue specific expression are selected.

[0570] The original clone from which the specific EST sequence was generated, or in the case of an assembled contig, the clone from which the 5′ most EST sequence was generated, is obtained from the catalogued library of clones and the insert amplified by PCR using methods known in the art. The PCR product is denatured and then transferred in 96 or 384 well format to a nylon membrane (Schleicher and Scheull) generating an array filter of tissue specific clones. Housekeeping genes, maize genes, and known tissue specific genes are included on the filters. These targets can be used in signal normalization and to validate assay sensitivity. Additional targets are included to monitor probe length and specificity of hybridization.

[0571] Radioactively labeled hybridization probes are generated by first strand cDNA synthesis per the manufacturer's instructions (Life Technologies) from mRNA/RNA samples prepared from the specific tissue being analyzed (e.g., connective tissue(s), connective tissue cancer, prostate, prostate cancer, ovarian, ovarian cancer, etc.). The hybridization probes are purified by gel exclusion chromatography, quantitated, and hybridized with the array filters in hybridization bottles at 65° C. overnight. The filters are washed under stringent conditions and signals are captured using a Fuji phosphorimager.

[0572] Data is extracted using AIS software and following background subtraction, signal normalization is performed. This includes a normalization of filter-wide expression levels between different experimental runs. Genes that are differentially expressed in the tissue of interest are identified.

### Example 4

### Chromosomal Mapping of the Polynucleotides

[0573] An oligonucleotide primer set is designed according to the sequence at the 5′ end of SEQ ID NO:X. This primer preferably spans about 100 nucleotides. This primer set is then used in a polymerase chain reaction under the following set of conditions: 30 seconds, 95° C.; 1 minute, 56° C.; 1 minute, 70° C. This cycle is repeated 32 times followed by one 5 minute cycle at 70° C. Human, mouse, and hamster DNA is used as template in addition to a somatic cell hybrid panel containing individual chromosomes or chromosome fragments (Bios, Inc). The reactions are analyzed on either 8% polyacrylamide gels or 3.5% agarose gels. Chromosome mapping is determined by the presence of an approximately 100 bp PCR fragment in the particular somatic cell hybrid.

### Example 5

### Bacterial Expression of a Polypeptide

[0574] A polynucleotide encoding a polypeptide of the present invention is amplified using PCR oligonucleotide primers corresponding to the 5′ and 3′ ends of the DNA sequence, as outlined in Example 1, to synthesize insertion fragments. The primers used to amplify the cDNA insert should preferably contain restriction sites, such as BamHI and XbaI, at the 5′ end of the primers in order to clone the amplified product into the expression vector. For example, BamHI and XbaI correspond to the restriction enzyme sites on the bacterial expression vector pQE-9. (Qiagen, Inc., Chatsworth, Calif.). This plasmid vector encodes antibiotic resistance (Amp^{r}), a bacterial origin of replication (ori), an IPTG-regulatable promoter/operator (P/O), a ribosome binding site (RBS), a 6-histidine tag (6-His), and restriction enzyme cloning sites.

[0575] The pQE-9 vector is digested with BamHI and XbaI and the amplified fragment is ligated into the pQE-9 vector maintaining the reading frame initiated at the bacterial RBS. The ligation mixture is then used to transform the E. coli strain M15/rep4 (Qiagen, Inc.) which contains multiple copies of the plasmid pREP4, which expresses the lacI repressor and also confers kanamycin resistance (Kan^{r}). Transformants are identified by their ability to grow on LB plates and ampicillin/kanamycin resistant colonies are selected. Plasmid DNA is isolated and confirmed by restriction analysis.

[0576] Clones containing the desired constructs are grown overnight (O/N) in liquid culture in LB media supplemented with both Amp (100 ug/ml) and Kan (25 ug/ml). The O/N culture is used to inoculate a large culture at a ratio of 1:100 to 1:250. The cells are grown to an optical density 600 (O.D.⁶⁰⁰) of between 0.4 and 0.6. IPTG (Isopropyl-B-D-thiogalacto pyranoside) is then added to a final concentration of 1 mM. IPTG induces by inactivating the lacI repressor, clearing the P/O leading to increased gene expression.

[0577] Cells are grown for an extra 3 to 4 hours. Cells are then harvested by centrifugation (20 mins at 6000× g). The cell pellet is solubilized in the chaotropic agent 6 Molar Guanidine HCl by stirring for 3-4 hours at 4° C. The cell debris is removed by centrifugation, and the supernatant containing the polypeptide is loaded onto a nickel-nitrilo-tri-acetic acid (“Ni-NTA”) affinity resin column (available from QIAGEN, Inc., supra). Proteins with a 6× His tag bind to the Ni-NTA resin with high affinity and can be purified in a simple one-step procedure (for details see: The QIAexpressionist (1995) QIAGEN, Inc., supra).

[0578] Briefly, the supernatant is loaded onto the column in 6 M guanidine-HCl, pH 8. The column is first washed with 10 volumes of 6 M guanidine-HCl, pH 8, then washed with 10 volumes of 6 M guanidine-HCl pH 6, and finally the polypeptide is eluted with 6 M guanidine-HCl, pH 5.

[0579] The purified protein is then renatured by dialyzing it against phosphate-buffered saline (PBS) or 50 mM Na-acetate, pH 6 buffer plus 200 mM NaCl. Alternatively, the protein can be successfully refolded while immobilized on the Ni-NTA column. The recommended conditions are as follows: renature using a linear 6M-1M urea gradient in 500 mM NaCl, 20% glycerol, 20 mM Tris/HCl pH 7.4, containing protease inhibitors. The renaturation should be performed over a period of 1.5 hours or more. After renaturation the proteins are eluted by the addition of 250 mM immidazole. Immidazole is removed by a final dialyzing step against PBS or 50 mM sodium acetate pH 6 buffer plus 200 mM NaCl. The purified protein is stored at 4° C. or frozen at −80° C.

[0580] In addition to the above expression vector, the present invention further includes an expression vector, called pHE4a (ATCC Accession Number 209645, deposited on Feb. 25, 1998) which contains phage operator and promoter elements operatively linked to a polynucleotide of the present invention. This vector contains: 1) a neomycinphosphotransferase gene as a selection marker, 2) an E. coli origin of replication, 3) a T5 phage promoter sequence, 4) two lac operator sequences, 5) a Shine-Delgarno sequence, and 6) the lactose operon repressor gene (lacIq). The origin of replication (oriC) is derived from pUC19 (LTI, Gaithersburg, Md.). The promoter and operator sequences are made synthetically.

[0581] DNA can be inserted into the pHE4a by restricting the vector with NdeI and Xbal, BamHI, XhoI, or Asp7l8, running the restricted product on a gel, and isolating the larger fragment (the stuffer fragment should be about 310 base pairs). The DNA insert is generated according to the PCR protocol described in Example 1, using PCR primers having restriction sites for NdeI (5′ primer) and XbaI, BamHI, XhoI, or Asp718 (3′ primer). The PCR insert is gel purified and restricted with compatible enzymes. The insert and vector are ligated according to standard protocols.

[0582] The engineered vector could easily be substituted in the above protocol to express protein in a bacterial system.

### Example 6

### Purification of a Polypeptide from an Inclusion Body

[0583] The following alternative method can be used to purify a polypeptide expressed in E coli when it is present in the form of inclusion bodies. Unless otherwise specified, all of the following steps are conducted at 4-10° C.

[0584] Upon completion of the production phase of the E. coli fermentation, the cell culture is cooled to 4-10° C. and the cells harvested by continuous centrifugation at 15,000 rpm (Heraeus Sepatech). On the basis of the expected yield of protein per unit weight of cell paste and the amount of purified protein required, an appropriate amount of cell paste, by weight, is suspended in a buffer solution containing 100 mM Tris, 50 mM EDTA, pH 7.4. The cells are dispersed to a homogeneous suspension using a high shear mixer.

[0585] The cells are then lysed by passing the solution through a microfluidizer (Microfuidics, Corp. or APV Gaulin, Inc.) twice at 4000-6000 psi. The homogenate is then mixed with NaCl solution to a final concentration of 0.5 M NaCl, followed by centrifugation at 7000× g for 15 min. The resultant pellet is washed again using 0.5M NaCl, 100 mM Tris, 50 mM EDTA, pH 7.4.

[0586] The resulting washed inclusion bodies are solubilized with 1.5 M guanidine hydrochloride (GuHCl) for 2-4 hours. After 7000× g centrifugation for 15 min., the pellet is discarded and the polypeptide containing supernatant is incubated at 4° C. overnight to allow further GuHCl extraction.

[0587] Following high speed centrifugation (30,000× g) to remove insoluble particles, the GuHCl solubilized protein is refolded by quickly mixing the GuHCl extract with 20 volumes of buffer containing 50 mM sodium, pH 4.5, 150 mM NaCl, 2 mM EDTA by vigorous stirring. The refolded diluted protein solution is kept at 4° C. without mixing for 12 hours prior to further purification steps.

[0588] To clarify the refolded polypeptide solution, a previously prepared tangential filtration unit equipped with 0.16 μm membrane filter with appropriate surface area (e.g., Filtron), equilibrated with 40 mM sodium acetate, pH 6.0 is employed. The filtered sample is loaded onto a cation exchange resin (e.g., Poros HS-50, Perseptive Biosystems). The column is washed with 40 mM sodium acetate, pH 6.0 and eluted with 250 mM, 500 mM, 1000 mM, and 1500 mM NaCl in the same buffer, in a stepwise manner. The absorbance at 280 nm of the effluent is continuously monitored. Fractions are collected and further analyzed by SDS-PAGE.

[0589] Fractions containing the polypeptide are then pooled and mixed with 4 volumes of water. The diluted sample is then loaded onto a previously prepared set of tandem columns of strong anion (Poros HQ-50, Perseptive Biosystems) and weak anion (Poros CM-20, Perseptive Biosystems) exchange resins. The columns are equilibrated with 40 mM sodium acetate, pH 6.0. Both columns are washed with 40 mM sodium acetate, pH 6.0, 200 mM NaCl. The CM-20 column is then eluted using a 10 column volume linear gradient ranging from 0.2 M NaCl, 50 mM sodium acetate, pH 6.0 to 1.0 M NaCl, 50 mM sodium acetate, pH 6.5. Fractions are collected under constant A₂₈₀ monitoring of the effluent. Fractions containing the polypeptide (determined, for instance, by 16% SDS-PAGE) are then pooled.

[0590] The resultant polypeptide should exhibit greater than 95% purity after the above refolding and purification steps. No major contaminant bands should be observed from Commassie blue stained 16% SDS-PAGE gel when 5 μg of purified protein is loaded. The purified protein can also be tested for endotoxin/LPS contamination, and typically the LPS content is less than 0.1 ng/ml according to LAL assays.

### Example 7

### Cloning and Expression of a Polypeptide in a Baculovirus Expression System

[0591] In this example, the plasmid shuttle vector pA2 is used to insert a polynucleotide into a baculovirus to express a polypeptide. This expression vector contains the strong polyhedrin promoter of the Autographa californica nuclear polyhedrosis virus (AcMNPV) followed by convenient restriction sites such as BamHI, Xba I and Asp718. The polyadenylation site of the simian virus 40 (“SV40”) is used for efficient polyadenylation. For easy selection of recombinant virus, the plasmid contains the beta-galactosidase gene from E. coli under control of a weak Drosophila promoter in the same orientation, followed by the polyadenylation signal of the polyhedrin gene. The inserted genes are flanked on both sides by viral sequences for cell-mediated homologous recombination with wild-type viral DNA to generate a viable virus that express the cloned polynucleotide.

[0592] Many other baculovirus vectors can be used in place of the vector above, such as pAc373, pVL941, and pAcIM1, as one skilled in the art would readily appreciate, as long as the construct provides appropriately located signals for transcription, translation, secretion and the like, including a signal peptide and an in-frame AUG as required. Such vectors are described, for instance, in Luckow et al., Virology 170:31-39 (1989).

[0593] Specifically, the cDNA sequence contained in the deposited clone, including the AUG initiation codon, is amplified using the PCR protocol described in Example 1. If a naturally occurring signal sequence is used to produce the polypeptide of the present invention, the pA2 vector does not need a second signal peptide. Alternatively, the vector can be modified (pA2 GP) to include a baculovirus leader sequence, using the standard methods described in Summers et al., “A Manual of Methods for Baculovirus Vectors and Insect Cell Culture Procedures,” Texas Agricultural Experimental Station Bulletin No. 1555 (1987).

[0594] The amplified fragment is isolated from a 1% agarose gel using a commercially available kit (“Geneclean,” BIO 101 Inc., La Jolla, Calif.). The fragment then is digested with appropriate restriction enzymes and again purified on a 1% agarose gel.

[0595] The plasmid is digested with the corresponding restriction enzymes and optionally, can be dephosphorylated using calf intestinal phosphatase, using routine procedures known in the art. The DNA is then isolated from a 1% agarose gel using a commercially available kit (“Geneclean” BIO 101 Inc., La Jolla, Calif.).

[0596] The fragment and the dephosphorylated plasmid are ligated together with-T4 DNA ligase. E. coli HB 101 or other suitable E. coli hosts such as XL-1 Blue (Stratagene Cloning Systems, La Jolla, Calif.) cells are transformed with the ligation mixture and spread on culture plates. Bacteria containing the plasmid are identified by digesting DNA from individual colonies and analyzing the digestion product by gel electrophoresis. The sequence of the cloned fragment is confirmed by DNA sequencing.

[0597] Five μg of a plasmid containing the polynucleotide is co-transfected with 1.0 μg of a commercially available linearized baculovirus DNA (“BaculoGold™ baculovirus DNA”, Pharmingen, San Diego, Calif.), using the lipofection method described by Felgner et al., Proc. Natl. Acad. Sci. USA 84:7413-7417 (1987). One μg of BaculoGold™ virus DNA and 5 μg of the plasmid are mixed in a sterile well of a microtiter plate containing 50 μl of serum-free Grace's medium (Life Technologies Inc., Gaithersburg, Md.). Afterwards, 10 μl Lipofectin plus 90 μl Grace's medium are added, mixed and incubated for 15 minutes at room temperature. Then the transfection mixture is added drop-wise to Sf9 insect cells (ATCC CRL 1711) seeded in a 35 mm tissue culture plate with 1 ml Grace's medium without serum. The plate is then incubated for 5 hours at 27° C. The transfection solution is then removed from the plate and 1 ml of Grace's insect medium supplemented with 10% fetal calf serum is added. Cultivation is then continued at 27° C. for four days.

[0598] After four days the supernatant is collected and a plaque assay is performed, as described by Summers and Smith, supra. An agarose gel with “Blue Gal” (Life Technologies Inc., Gaithersburg) is used to allow easy identification and isolation of gal-expressing clones, which produce blue-stained plaques. (A detailed description of a “plaque assay” of this type can also be found in the user's guide for insect cell culture and baculovirology distributed by Life Technologies Inc., Gaithersburg, page 9-10.) After appropriate incubation, blue stained plaques are picked with the tip of a micropipettor (e.g., Eppendorf). The agar containing the recombinant viruses is then resuspended in a microcentrifuge tube containing 200 μl of Grace's medium and the suspension containing the recombinant baculovirus is used to infect Sf9 cells seeded in 35 mm dishes. Four days later the supernatants of these culture dishes are harvested and then they are stored at 4° C.

[0599] To verify the expression of the polypeptide, Sf9 cells are grown in Grace's medium supplemented with 10% heat-inactivated FBS. The cells are infected with the recombinant baculovirus containing the polynucleotide at a multiplicity of infection (“MOI”) of about 2. If radiolabeled proteins are desired, 6 hours later the medium is removed and is replaced with SF900 II medium minus methionine and cysteine (available from Life Technologies Inc., Rockville, Md.). After 42 hours, 5 μCi of ³⁵S-methionine and 5 μCi ³⁵S-cysteine (available from Amersham) are added. The cells are further incubated for 16 hours and then are harvested by centrifugation. The proteins in the supernatant as well as the intracellular proteins are analyzed by SDS-PAGE followed by autoradiography (if radiolabeled).

[0600] Microsequencing of the amino acid sequence of the amino terminus of purified protein may be used to determine the amino terminal sequence of the produced protein.

### Example 8

### Expression of a Polypeptide in Mammalian Cells

[0601] The polypeptide of the present invention can be expressed in a mammalian cell. A typical mammalian expression vector contains a promoter element, which mediates the initiation of transcription of mRNA, a protein coding sequence, and signals required for the termination of transcription and polyadenylation of the transcript. Additional elements include enhancers, Kozak sequences and intervening sequences flanked by donor and acceptor sites for RNA splicing. Highly efficient transcription is achieved with the early and late promoters from SV40, the long terminal repeats (LTRs) from Retroviruses, e.g., RSV, HTLVI, HIVI and the early promoter of the cytomegalovirus (CMV). However, cellular elements can also be used (e.g., the human actin promoter).

[0602] Suitable expression vectors for use in practicing the present invention include, for example, vectors such as pSVL and pMSG (Pharmacia, Uppsala, Sweden), pRSVcat (ATCC 37152), pSV2dhfr (ATCC 37146), pBC12MI (ATCC 67109), pCMVSport 2.0, and pCMVSport 3.0. Mammalian host cells that could be used include, human Hela, 293, H9 and Jurkat cells, mouse NIH3T3 and C127 cells, Cos 1, Cos 7 and CV1, quail QC1-3 cells, mouse L cells and Chinese hamster ovary (CHO) cells.

[0603] Alternatively, the polypeptide can be expressed in stable cell lines containing the polynucleotide integrated into a chromosome. The co-transfection with a selectable marker such as DHFR, gpt, neomycin, or hygromycin allows the identification and isolation of the transfected cells.

[0604] The transfected gene can also be amplified to express large amounts of the encoded protein. The DHFR (dihydrofolate reductase) marker is useful in developing cell lines that carry several hundred or even several thousand copies of the gene of interest. (See, e.g., Alt, F. W., et al., J. Biol. Chem. 253:1357-137Q (1978); Hamlin, J. L. and Ma, C., Biochem. et Biophys. Acta, 1097:107-143 (1990); Page, M. J. and Sydenham, M. A., Biotechnology 9:64-68 (1991).) Another useful selection marker is the enzyme glutamine synthase (GS) (Murphy et al., Biochem J. 227:277-279 (1991); Bebbington et al., Bio/Technology 10:169-175 (1992). Using these markers, the mammalian cells are grown in selective medium and the cells with the highest resistance are selected. These cell lines contain the amplified gene(s) integrated into a chromosome. Chinese hamster ovary (CHO) and NSO cells are often used for the production of proteins.

[0605] Derivatives of the plasmid pSV2-dhfr (ATCC Accession No. 37146), the expression vectors pC4 (ATCC Accession No. 209646) and pC6 (ATCC Accession No. 209647) contain the strong promoter (LTR) of the Rous Sarcoma Virus (Cullen et al., Molecular and Cellular Biology, 438-447 (March, 1985)) plus a fragment of the CMV-enhancer (Boshart et al., Cell 41:521-530 (1985).) Multiple cloning sites, e.g., with the restriction enzyme cleavage sites BamHI, XbaI and Asp718, facilitate the cloning of the gene of interest. The vectors also contain the 3′ intron, the polyadenylation and termination signal of the rat preproinsulin gene, and the mouse DHFR gene under control of the SV40 early promoter.

[0606] Specifically, the plasmid pC6, for example, is digested with appropriate restriction enzymes and then dephosphorylated using calf intestinal phosphates by procedures known in the art. The vector is then isolated from a 1% agarose gel.

[0607] A polynucleotide of the present invention is amplified according to the protocol outlined in Example 1. If a naturally occurring signal sequence is used to produce the polypeptide of the present invention, the vector does not need a second signal peptide. Alternatively, if a naturally occurring signal sequence is not used, the vector can be modified to include a heterologous signal sequence. (See, e.g., International Publication No. WO 96/34891.)

[0608] The amplified fragment is isolated from a 1% agarose gel using a commercially available kit (“Geneclean,” BIO 101 Inc., La Jolla, Calif.). The fragment then is digested with appropriate restriction enzymes and again purified on a 1% agarose gel.

[0609] The amplified fragment is then digested with the same restriction enzyme and purified on a 1% agarose gel. The isolated fragment and the dephosphorylated vector are then ligated with T4 DNA ligase. E. coli HB101 or XL-1 Blue cells are then transformed and bacteria are identified that contain the fragment inserted into plasmid pC6 using, for instance, restriction enzyme analysis.

[0610] Chinese hamster ovary cells lacking an active DHFR gene is used for transfection. Five μg of the expression plasmid pC6 or pC4 is cotransfected with 0.5 μg of the plasmid pSVneo using lipofectin (Felgner et al., supra). The plasmid pSV2-neo contains a dominant selectable marker, the neo gene from Tn5 encoding an enzyme that confers resistance to a group of antibiotics including G418. The cells are seeded in alpha minus MEM supplemented with 1 mg/ml G418. After 2 days, the cells are trypsinized and seeded in hybridoma cloning plates (Greiner, Germany) in alpha minus MEM supplemented with 10, 25, or 50 ng/ml of methotrexate plus 1 mg/ml G418. After about 10-14 days single clones are trypsinized and then seeded in 6-well petri dishes or 10 ml flasks using different concentrations of methotrexate (50 nM, 100 nM, 200 μM, 400 nM, 800 mM). Clones growing at the highest concentrations of methotrexate are then transferred to new 6-well plates containing even higher concentrations of methotrexate (1 μM, 2 μM, 5 μM, 10 mM, 20 mM). The same procedure is repeated until clones are obtained which grow at a concentration of 100-200 μM. Expression of the desired gene product is analyzed, for instance, by SDS-PAGE and Western blot or by reversed phase HPLC analysis.

### Example 9

### Protein Fusions

[0611] The polypeptides of the present invention are preferably fused to other proteins. These fusion proteins can be used for a variety of applications. For example, fusion of the present polypeptides to His-tag, HA-tag, protein A, IgG domains, and maltose binding protein facilitates purification. (See Example 5; see also EP A 394,827; Traunecker, et al., Nature 331:84-86 (1988).) Similarly, fusion to IgG-1, IgG-3, and albumin increases the halflife time in vivo. Nuclear localization signals fused to the polypeptides of the present invention can target the protein to a specific subcellular localization, while covalent heterodimer or homodimers can increase or decrease the activity of a fusion protein. Fusion proteins can also create chimeric molecules having more than one function. Finally, fusion proteins can increase solubility and/or stability of the fused protein compared to the non-fused protein. All of the types of fusion proteins described above can be made by modifying the following protocol, which outlines the fusion of a polypeptide to an IgG molecule, or the protocol described in Example 5.

[0612] Briefly, the human Fc portion of the IgG molecule can be PCR amplified, using primers that span the 5′ and 3′ ends of the sequence described below. These primers also should have convenient restriction enzyme sites that will facilitate cloning into an expression vector, preferably a mammalian expression vector.

[0613] For example, if pC4 (ATCC Accession No. 209646) is used, the human Fc portion can be ligated into the BamHI cloning site. Note that the 3′ BamHI site should be destroyed. Next, the vector containing the human Fc portion is re-restricted with BamHI, linearizing the vector, and a polynucleotide of the present invention, isolated by the PCR protocol described in Example 1, is ligated into this BamHI site. Note that the polynucleotide is cloned without a stop codon, otherwise a fusion protein will not be produced.

[0614] If the naturally occurring signal sequence is used to produce the polypeptide of the present invention, pC4 does not need a second signal peptide. Alternatively, if the naturally occurring signal sequence is not used, the vector can be modified to include a heterologous signal sequence. (See, e.g., International Publication No. WO 96/34891.)

| | |
|---|---|
| Human IgG Fc region: | |
| GGGATCCGGAGCCCAAATCTTCTGACAAAACTCACACATGCCCACCGTGCCCAG | (SEQ ID NO: 1) |
| CACCTGAATTCGAGGGTGCACCGTCAGTCTTCCTCTTCCCCCCAAAACCCAAGGA | |
| CACCCTCATGATCTCCCGGACTCCTGAGGTCACATGCGTGGTGGTGGACGTAAGC | |
| CACGAAGACCCTGAGGTCAAGTTCAACTGGTACGTGGACGGCGTGGAGGTGCAT | |
| AATGCCAAGACAAAGCCGCGGGAGGAGCAGTACAACAGCACGTACCGTGTGGTC | |
| AGCGTCCTCACCGTCCTGCACCAGGACTGGCTGAATGGCAAGGAGTACAAGTGC | |
| AAGGTCTCCAACAAAGCCCTCCCAACCCCCATCGAGAAAACCATCTCCAAAGCC | |
| AAAGGGCAGCCCCGAGAACCACAGGTGTACACCCTGCCCCCATCCCGGGATGAG | |
| CTGACCAAGAACCAGGTCAGCCTGACCTGCCTGGTCAAAGGCTTCTATCCAAGCG | |
| ACATCGCCGTGGAGTGGGAGAGCAATGGGCAGCCGGAGAACAACTACAAGACC | |
| ACGCCTCCCGTGCTGGACTCCGACGGCTCCTTCTTCCTCTACAGCAAGCTCACCG | |
| TGGACAAGAGCAGGTGGCAGCAGGGGAACGTCTTCTCATGCTCCGTGATGCATG | |
| AGGCTCTGCACAACCACTACACGCAGAAGAGCCTCTCCCTGTCTCCGGGTAAATG | |
| AGTGCGACGGCCGCGACTCTAGAGGAT | |

### Example 10

### Production of an Antibody from a Polypeptide

[0615] Hybridoma Technology

[0616] The antibodies of the present invention can be prepared by a variety of methods. (See, Current Protocols, Chapter 2.) As one example of such methods, cells expressing polypeptide of the present invention are administered to an animal to induce the production of sera containing polyclonal antibodies. In a preferred method, a preparation of polypeptide of the present invention is prepared and purified to render it substantially free of natural contaminants. Such a preparation is then introduced into an animal in order to produce polyclonal antisera of greater specific activity.

[0617] Monoclonal antibodies specific for polypeptide of the present invention are prepared using hybridoma technology (Kohler et al., Nature 256:495 (1975); Kohler et al., Eur. J. Immunol. 6:511 (1976); Kohler et al., Eur. J. Immunol. 6:292 (1976); Hammerling et al., in: Monoclonal Antibodies and T-Cell Hybridomas, Elsevier, N.Y., pp. 563-681 (1981)). In general, an animal (preferably a mouse) is immunized with polypeptide of the present invention or, more preferably, with a secreted polypeptide of the present invention-expressing cell. Such polypeptide-expressing cells are cultured in any suitable tissue culture medium, preferably in Earle's modified Eagle's medium supplemented with 10% fetal bovine serum (inactivated at about 56° C.), and supplemented with about 10 g/l of nonessential amino acids, about 1,000 U/ml of penicillin, and about 100 μg/ml of streptomycin.

[0618] The splenocytes of such mice are extracted and fused with a suitable myeloma cell line. Any suitable myeloma cell line may be employed in accordance with the present invention; however, it is preferable to employ the parent myeloma cell line (SP2O), available from the ATCC. After fusion, the resulting hybridoma cells are selectively maintained in HAT medium, and then cloned by limiting dilution as described by Wands et al. (Gastroenterology 80:225-232 (1981)). The hybridoma cells obtained through such a selection are then assayed to identify clones which secrete antibodies capable of binding the polypeptide of the present invention.

[0619] Alternatively, additional antibodies capable of binding to polypeptide of the present invention can be produced in a two-step procedure using anti-idiotypic antibodies. Such a method makes use of the fact that antibodies are themselves antigens, and therefore, it is possible to obtain an antibody which binds to a second antibody. In accordance with this method, protein specific antibodies are used to immunize an animal, preferably a mouse. The splenocytes of such an animal are then used to produce hybridoma cells, and the hybridoma cells are screened to identify clones which produce an antibody whose ability to bind to the polypeptide of the present invention-specific antibody can be blocked by polypeptide of the present invention. Such antibodies comprise anti-idiotypic antibodies to the polypeptide of the present invention-specific antibody and are used to immunize an animal to induce formation of further polypeptide of the present invention-specific antibodies.

[0620] For in vivo use of antibodies in humans, an antibody is “humanized”. Such antibodies can be produced using genetic constructs derived from hybridoma cells producing the monoclonal antibodies described above. Methods for producing chimeric and humanized antibodies are known in the art and are discussed herein. (See, for review, Morrison, Science 229:1202 (1985); Oi et al., BioTechniques 4:214 (1986); Cabilly et al., U.S. Pat. No. 4,816,567; Taniguchi et al., EP 171496; Morrison et al., EP 173494; Neuberger et al., WO 8601533; Robinson et al., International Publication No. WO 8702671; Boulianne et al., Nature 312:643 (1984); Neuberger et al., Nature 314:268 (1985).)

[0621] Isolation of Antibody Fragments Directed Against Polypeptide of the Present Invention from a Library of scFvs

[0622] Naturally occurring V-genes isolated from human PBLs are constructed into a library of antibody fragments which contain reactivities against polypeptide of the present invention to which the donor may or may not have been exposed (see e.g., U.S. Pat. No. 5,885,793 incorporated herein by reference in its entirety).

[0623] Rescue of the Library.

[0624] A library of scFvs is constructed from the RNA of human PBLs as described in International Publication No. WO 92/01047. To rescue phage displaying antibody fragments, approximately 109 E. coli harboring the phagemid are used to inoculate 50 ml of 2×TY containing 1% glucose and 100 μg/ml of ampicillin (2×TY-AMP-GLU) and grown to an O.D. of 0.8 with shaking. Five ml of this culture is used to inoculate 50 ml of 2×TY-AMP-GLU, 2 ×•TU of delta gene 3 helper (M13 delta gene III, see International Publication No. WO 92/01047) are added and the culture incubated at 37° C. for 45 minutes without shaking and then at 37° C. for 45 minutes with shaking. The culture is centrifuged at 4000 r.p.m. for 10 min. and the pellet resuspended in 2 liters of 2×TY containing 100 μg/ml ampicillin and 50 ug/ml kanamycin and grown overnight. Phage are prepared as described in International Application No. WO 92/01047.

[0625] M13 delta gene III is prepared as follows: M13 delta gene III helper phage does not encode gene III protein, hence the phage(mid) displaying antibody fragments have a greater avidity of binding to antigen. Infectious M13 delta gene III particles are made by growing the helper phage in cells harboring a pUC19 derivative supplying the wild type gene III protein during phage morphogenesis. The culture is incubated for 1 hour at 37° C. without shaking and then for a further hour at 37° C. with shaking. Cells are spun down (IEC-Centra 8,400 r.p.m. for 10 min), resuspended in 300 ml 2×TY broth containing 100 μg ampicillin/ml and 25 μg kanamycin/ml (2×TY-AMP-KAN) and grown overnight, shaking at 37° C. Phage particles are purified and concentrated from the culture medium by two PEG-precipitations (Sambrook et al., 1990), resuspended in 2 ml PBS and passed through a 0.45 μm filter (Minisart NML; Sartorius) to give a final concentration of approximately 1013 transducing units/ml (ampicillin-resistant clones).

[0626] Panning of the Library.

[0627] Immunotubes (Nunc) are coated overnight in PBS with 4 ml of either 100 μg/ml or 10 μg/ml of a polypeptide of the present invention. Tubes are blocked with 2% Marvel-PBS for 2 hours at 37° C. and then washed 3 times in PBS. Approximately 10¹³ TU of phage is applied to the tube and incubated for 30 minutes at room temperature tumbling on an over and under turntable and then left to stand for another 1.5 hours. Tubes are washed 10 times with PBS 0.1% Tween-20 and 10 times with PBS. Phage are eluted by adding 1 ml of 100 mM triethylamine and rotating 15 minutes on an under and over turntable after which the solution is immediately neutralized with 0.5 ml of 1.0M Tris-HCl, pH 7.4. Phage are then used to infect 10 ml of mid-log E. coli TG1 by incubating eluted phage with bacteria for 30 minutes at 37° C. The E. coli are then plated on TYE plates containing 1% glucose and 100 μg/ml ampicillin. The resulting bacterial library is then rescued with delta gene 3 helper phage as described above to prepare phage for a subsequent round of selection. This process is then repeated for a total of 4 rounds of affinity purification with tube-washing increased to 20 times with PBS, 0.1% Tween-20 and 20 times with PBS for rounds 3 and 4.

[0628] Characterization of Binders.

[0629] Eluted phage from the 3rd and 4th rounds of selection are used to infect E. coli HB 2151 and soluble scFv is produced (Marks, et al., 1991) from single colonies for assay. ELISAs are performed with microtitre plates coated with 10 μg/ml of the polypeptide of the present invention in 50 mM bicarbonate pH 9.6. Clones positive in ELISA are further characterized by PCR fingerprinting (see, e.g., International Application No. WO 92/01047) and then by sequencing. These ELISA positive clones may also be further characterized by techniques known in the art, such as, for example, epitope mapping, binding affinity, receptor signal transduction, ability to block or competitively inhibit antibody/antigen binding, and competitive agonistic or antagonistic activity.

### Example 11

### Method of Determining Alterations in a Gene Corresponding to a Polynucleotide

[0630] RNA isolated from entire families or individual patients presenting with a phenotype of interest (such as a disease) is isolated. cDNA is then generated from these RNA samples using protocols known in the art. (See, Sambrook.) The cDNA is then used as a template for PCR, employing primers surrounding regions of interest in SEQ ID NO:X; and/or the nucleotide sequence of the cDNA contained in Clone ID NO:Z. Suggested PCR conditions consist of 35 cycles at 95 degrees C for 30 seconds; 60-120 seconds at 52-58 degrees C.; and 60-120 seconds at 70 degrees C., using buffer solutions described in Sidransky et al., Science 252:706 (1991).

[0631] PCR products are then sequenced using primers labeled at their 5′ end with T4 polynucleotide kinase, employing SequiTherm Polymerase (Epicentre Technologies). The intron-exon boundaries of selected exons is also determined and genomic PCR products analyzed to confirm the results. PCR products harboring suspected mutations are then cloned and sequenced to validate the results of the direct sequencing.

[0632] PCR products are cloned into T-tailed vectors as described in Holton et al., Nucleic Acids Research, 19:1156 (1991) and sequenced with T7 polymerase (United States Biochemical). Affected individuals are identified by mutations not present in unaffected individuals.

[0633] Genomic rearrangements are also observed as a method of determining alterations in a gene corresponding to a polynucleotide. Genomic clones isolated according to Example 2 are nick-translated with digoxigenindeoxy-uridine 5′-triphosphate (Boehringer Manheim), and FISH performed as described in Johnson et al., Methods Cell Biol. 35:73-99 (1991). Hybridization with the labeled probe is carried out using a vast excess of human cot-1 DNA for specific hybridization to the corresponding genomic locus.

[0634] Chromosomes are counterstained with 4,6-diamino-2-phenylidole and propidium iodide, producing a combination of C- and R-bands. Aligned images for precise mapping are obtained using a triple-band filter set (Chroma Technology, Brattleboro, Vt.) in combination with a cooled charge-coupled device camera (Photometrics, Tucson, Ariz.)-and variable excitation wavelength filters. (Johnson et al., Genet. Anal. Tech. Appl., 8:75 (1991).) Image collection, analysis and chromosomal fractional length measurements are performed using the ISee Graphical Program System. (Inovision Corporation, Durham, N.C.) Chromosome alterations of the genomic region hybridized by the probe are identified as insertions, deletions, and translocations. These alterations are used as a diagnostic marker for an associated disease.

### Example 12

### Method of Detecting Abnormal Levels of a Polypeptide in a Biological Sample

[0635] A polypeptide of the present invention can be detected in a biological sample, and if an increased or decreased level of the polypeptide is detected, this polypeptide is a marker for a particular phenotype. Methods of detection are numerous, and thus, it is understood that one skilled in the art can modify the following assay to fit their particular needs.

[0636] For example, antibody-sandwich ELISAs are used to detect polypeptides in a sample, preferably a biological sample. Wells of a microtiter plate are coated with specific antibodies, at a final concentration of 0.2 to 10 ug/ml. The antibodies are either monoclonal or polyclonal and are produced by the method described in Example 10. The wells are blocked so that non-specific binding of the polypeptide to the well is reduced.

[0637] The coated wells are then incubated for >2 hours at RT with a sample containing the polypeptide. Preferably, serial dilutions of the sample should be used to validate results. The plates are then washed three times with deionized or distilled water to remove unbound polypeptide.

[0638] Next, 50 ul of specific antibody-alkaline phosphatase conjugate, at a concentration of 25-400 ng, is added and incubated for 2 hours at room temperature. The plates are again washed three times with deionized or distilled water to remove unbound conjugate.

[0639] Add 75 ul of 4-methylumbelliferyl phosphate (MUP) or p-nitrophenyl phosphate (NPP) substrate solution to each well and incubate 1 hour at room temperature. Measure the reaction by a microtiter plate reader. Prepare a standard curve, using serial dilutions of a control sample, and plot polypeptide concentration on the X-axis (log scale) and fluorescence or absorbance of the Y-axis (linear scale). Interpolate the concentration of the polypeptide in the sample using the standard curve.

### Example 13

### Formulation

[0640] The invention also provides methods of treatment and/or prevention of diseases or disorders (such as, for example, any one or more of the diseases or disorders disclosed herein) by administration to a subject of an effective amount of a Therapeutic. By therapeutic is meant polynucleotides or polypeptides of the invention (including fragments and variants), agonists or antagonists thereof, and/or antibodies thereto, in combination with a pharmaceutically acceptable carrier type (e.g., a sterile carrier).

[0641] The Therapeutic will be formulated and dosed in a fashion consistent with good medical practice, taking into account the clinical condition of the individual patient (especially the side effects of treatment with the Therapeutic alone), the site of delivery, the method of administration, the scheduling of administration, and other factors known to practitioners. The “effective amount” for purposes herein is thus determined by such considerations.

[0642] As a general proposition, the total pharmaceutically effective amount of the Therapeutic administered parenterally per dose will be in the range of about 1 ug/kg/day to 10 mg/kg/day of patient body weight, although, as noted above, this will be subject to therapeutic discretion. More preferably, this dose is at least 0.01 mg/kg/day, and most preferably for humans between about 0.01 and 1 mg/kg/day for the hormone. If given continuously, the Therapeutic is typically administered at a dose rate of about 1 ug/kg/hour to about 50 ug/kg/hour, either by 1-4 injections per day or by continuous subcutaneous infusions, for example, using a mini-pump. An intravenous bag solution may also be employed. The length of treatment needed to observe changes and the interval following treatment for responses to occur appears to vary depending on the desired effect.

[0643] Therapeutics can be are administered orally, rectally, parenterally, intracistemally, intravaginally, intraperitoneally, topically (as by powders, ointments, gels, drops or transdermal patch), bucally, or as an oral or nasal spray. “Pharmaceutically acceptable carrier” refers to a non-toxic solid, semisolid or liquid filler, diluent, encapsulating material or formulation auxiliary of any. The term “parenteral” as used herein refers to modes of administration which include intravenous, intramuscular, intraperitoneal, intrastemal, subcutaneous and intraarticular injection and infusion.

[0644] Therapeutics of the invention are also suitably administered by sustained-release systems. Suitable examples of sustained-release Therapeutics are administered orally, rectally, parenterally, intracistemally, intravaginally, intraperitoneally, topically (as by powders, ointments, gels, drops or transdermal patch), bucally, or as an oral or nasal spray. “Pharmaceutically acceptable carrier” refers to a non-toxic solid, semisolid or liquid filler, diluent, encapsulating material or formulation auxiliary of any type. The term “parenteral” as used herein refers to modes of administration which include intravenous, intramuscular, intraperitoneal, intrastemal, subcutaneous and intraarticular injection and infusion.

[0645] Therapeutics of the invention are also suitably administered by sustained-release systems. Suitable examples of sustained-release Therapeutics include suitable polymeric materials (such as, for example, semi-permeable polymer matrices in the form of shaped articles, e.g., films, or mirocapsules), suitable hydrophobic materials (for example as an emulsion in an acceptable oil) or ion exchange resins, and sparingly soluble derivatives (such as, for example, a sparingly soluble salt).

[0646] Sustained-release matrices include polylactides (U.S. Pat. No. 3,773,919, EP 58,481), copolymers of L-glutamic acid and gamma-ethyl-L-glutamate (Sidman et al., Biopolymers 22:547-556 (1983)), poly (2-hydroxyethyl methacrylate) (Langer et al., J. Biomed. Mater. Res. 15:167-277 (1981), and Langer, Chem. Tech. 12:98-105 (1982)), ethylene vinyl acetate (Langer et al., Id.) or poly-D-(−)-3-hydroxybutyric acid (EP 133,988).

[0647] Sustained-release Therapeutics also include liposomally entrapped Therapeutics of the invention (see generally, Langer, Science 249:1527-1533 (1990); Treat et al., in Liposomes in the Therapy of Infectious Disease and Cancer, Lopez-Berestein and Fidler (eds.), Liss, New York, pp. 317-327 and 353-365 (1989)). Liposomes containing the Therapeutic are prepared by methods known per se: DE 3,218,121; Epstein et al., Proc. Natl. Acad. Sci. (USA) 82:3688-3692 (1985); Hwang et al., Proc. Natl. Acad. Sci.(USA) 77:4030-4034 (1980); EP 52,322; EP 36,676; EP 88,046; EP 143,949; EP 142,641; Japanese Pat. Appl. 83-118008; U.S. Pat. Nos. 4,485,045 and 4,544,545; and EP 102,324. Ordinarily, the liposomes are of the small (about 200-800 Angstroms) unilamellar type in which the lipid content is greater than about 30 mol. percent cholesterol, the selected proportion being adjusted for the optimal Therapeutic.

[0648] In yet an additional embodiment, the Therapeutics of the invention are delivered by way of a pump (see Langer, supra; Sefton, CRC Crit. Ref. Biomed. Eng. 14:201 (1987); Buchwald et al., Surgery 88:507 (1980); Saudek et al., N. Engl. J. Med. 321:574 (1989)).

[0649] Other controlled release systems are discussed in the review by Langer (Science249:1527-1533 (1990)).

[0650] For parenteral administration, in one embodiment, the Therapeutic is formulated generally by mixing it at the desired degree of purity, in a unit dosage injectable form (solution, suspension, or emulsion), with a pharmaceutically acceptable carrier, i.e., one that is non-toxic to recipients at the dosages and concentrations employed and is compatible with other ingredients of the formulation. For example, the formulation preferably does not include oxidizing agents and other compounds that are known to be deleterious to the Therapeutic.

[0651] Generally, the formulations are prepared by contacting the Therapeutic uniformly and intimately with liquid carriers or finely divided solid carriers or both. Then, if necessary, the product is shaped into the desired formulation. Preferably the carrier is a parenteral carrier, more preferably a solution that is isotonic with the blood of the recipient. Examples of such carrier vehicles include water, saline, Ringer's solution, and dextrose solution. Non-aqueous vehicles such as fixed oils and ethyl oleate are also useful herein, as well as liposomes.

[0652] The carrier suitably contains minor amounts of additives such as substances that enhance isotonicity and chemical stability. Such materials are non-toxic to recipients at the dosages and concentrations employed, and include buffers such as phosphate, citrate, succinate, acetic acid, and other organic acids or their salts; antioxidants such as ascorbic acid; low molecular weight (less than about ten residues) polypeptides, e.g., polyarginine or tripeptides; proteins, such as serum albumin, gelatin, or immunoglobulins; hydrophilic polymers such as polyvinylpyrrolidone; amino acids, such as glycine, glutamic acid, aspartic acid, or arginine; monosaccharides, disaccharides, and other carbohydrates including cellulose or its derivatives, glucose, manose, or dextrins; chelating agents such as EDTA; sugar alcohols such as mannitol or sorbitol; counterions such as sodium; and/or nonionic surfactants such as polysorbates, poloxamers, or PEG.

[0653] The Therapeutic is typically formulated in such vehicles at a concentration of about 0.1 mg/ml to 100 mg/ml, preferably 1-10 mg/ml, at a pH of about 3 to 8. It will be understood that the use of certain of the foregoing excipients, carriers, or stabilizers will result in the formation of polypeptide salts.

[0654] Any pharmaceutical used for therapeutic administration can be sterile. Sterility is readily accomplished by filtration through sterile filtration membranes (e.g., 0.2 micron membranes). Therapeutics generally are placed into a container having a sterile access port, for example, an intravenous solution bag or vial having a stopper pierceable by a hypodermic injection needle.

[0655] Therapeutics ordinarily will be stored in unit or multi-dose containers, for example, sealed ampoules or vials, as an aqueous solution or as a lyophilized formulation for reconstitution. As an example of a lyophilized formulation, 10-ml vials are filled with 5 ml of sterile-filtered 1% (w/v) aqueous Therapeutic solution, and the resulting mixture is lyophilized. The infusion solution is prepared by reconstituting the lyophilized Therapeutic using bacteriostatic Water-for-Injection.

[0656] The invention also provides a pharmaceutical pack or kit comprising one or more containers filled with one or more of the ingredients of the Therapeutics of the invention. Associated with such container(s) can be a notice in the form prescribed by a governmental agency regulating the manufacture, use or sale of pharmaceuticals or biological products, which notice reflects approval by the agency of manufacture, use or sale for human administration. In addition, the Therapeutics may be employed in conjunction with other therapeutic compounds.

[0657] The Therapeutics of the invention may be administered alone or in combination with adjuvants. Adjuvants that may be administered with the Therapeutics of the invention include, but are not limited to, alum, alum plus deoxycholate (ImmunoAg), MTP-PE (Biocine Corp.), QS21 (Genentech, Inc.), BCG (e.g., THERACYS®, MPL and nonviable prepartions of Corynebacterium parvum. In a specific embodiment, Therapeutics of the invention are administered in combination with alum. In another specific embodiment, Therapeutics of the invention are administered in combination with QS-21. Further adjuvants that may be administered with the Therapeutics of the invention include, but are not limited to, Monophosphoryl lipid immunomodulator, AdjuVax 100a, QS-21, QS-18, CRL1005, Aluminum salts, MF-59, and Virosomal adjuvant technology. Vaccines that may be administered with the Therapeutics of the invention include, but are not limited to, vaccines directed toward protection against MMR (measles, mumps, rubella), polio, varicella, tetanus/diptheria, hepatitis A, hepatitis B, haemophilus influenzae B, whooping cough, pneumonia, influenza, Lyme's Disease, rotavirus, cholera, yellow fever, Japanese encephalitis, poliomyelitis, rabies, typhoid fever, and pertussis. Combinations may be administered either concomitantly, e.g., as an admixture, separately but simultaneously or concurrently; or sequentially. This includes presentations in which the combined agents are administered together as a therapeutic mixture, and also procedures in which the combined agents are administered separately but simultaneously, e.g., as through separate intravenous lines into the same individual. Administration “in combination” further includes the separate administration of one of the compounds or agents given first, followed by the second.

[0658] The Therapeutics of the invention may be administered alone or in combination with other therapeutic agents. Therapeutic agents that may be administered in combination with the Therapeutics of the invention, include but not limited to, chemotherapeutic agents, antibiotics, steroidal and non-steroidal anti-inflammatories, conventional immunotherapeutic agents, and/or therapeutic treatments described below. Combinations may be administered either concomitantly, e.g., as an admixture, separately but simultaneously or concurrently; or sequentially. This includes presentations in which the combined agents are administered together as a therapeutic mixture, and also procedures in which the combined agents are administered separately but simultaneously, e.g., as through separate intravenous lines into the same individual. Administration “in combination” further includes the separate administration of one of the compounds or agents given first, followed by the second.

[0659] In certain embodiments, Therapeutics of the invention are administered in combination with antiretroviral agents, nucleoside/nucleotide reverse transcriptase inhibitors (NRTIs), non-nucleoside reverse transcriptase inhibitors (NNRTIs), and/or protease inhibitors (PIs). NRTIs that may be administered in combination with the Therapeutics of the invention, include, but are not limited to, RETROVIR™ (zidovudine/AZT), VIDEX™ (didanosine/ddI), HIVID™ (zalcitabine/ddC), ZERIT™ (stavudine/d4T), EPIVIR™ (lamivudine/3TC), and COMBIVIR™ (zidovudine/lamivudine). NNRTIs that may be administered in combination with the Therapeutics of the invention, include, but are not limited to, VIRMUNE™ (nevirapine), RESCRIPTOR™ (delavirdine), and SUSTIVA™ (efavirenz). Protease inhibitors that may be administered in combination with the Therapeutics of the invention, include, but are not limited to, CRIXIVAN™ (indinavir), NORVIR™ (ritonavir), INVIRASE™ (saquinavir), and VIRACEPT™ (nelfinavir). In a specific embodiment, antiretroviral agents, nucleoside reverse transcriptase inhibitors, non-nucleoside reverse transcriptase inhibitors, and/or protease inhibitors may be used in any combination with Therapeutics of the invention to treat AIDS and/or to prevent or treat HIV infection.

[0660] Additional NRTIs include LODENOSINE™ (F-ddA; an acid-stable adenosine NRTI; Triangle/Abbott; COVIRACIL™ (emtricitabine/FTC; structurally related to lamivudine (3TC) but with 3- to 10-fold greater activity in vitro; Triangle/Abbott); dOTC (BCH-10652, also structurally related to lamivudine but retains activity against a substantial proportion of lamivudine-resistant isolates; Biochem Pharma); Adefovir (refused approval for anti-HIV therapy by FDA; Gilead Sciences); PREVEON® (Adefovir Dipivoxil, the active prodrug of adefovir; its active form is PMEA-pp); TENOFOVIR™ (bis-POC PMPA, a PMPA prodrug; Gilead); DAPD/DXG (active metabolite of DAPD; Triangle/Abbott); D-D4FC (related to 3TC, with activity against AZT/3TC-resistant virus); GW420867X (Glaxo Wellcome); ZIAGEN™ (abacavir/159U89; Glaxo Wellcome Inc.); CS-87 (3′azido-2′,3′-dideoxyuridine; WO 99/66936); and S-acyl-2-thioethyl (SATE)-bearing prodrug forms of β-L-FD4C and β-L-FddC (WO 98/17281).

[0661] Additional NNRTIs include COACTINON™ (Emivirine/MKC-442, potent NNRTI of the HEPT class; Triangle/Abbott); CAPRAVIRINE™ (AG-1549/S-1153, a next generation NNRTI with activity against viruses containing the K103N mutation; Agouron); PNU-142721 (has 20- to 50-fold greater activity than its predecessor delavirdine and is active against K103N mutants; Pharmacia & Upjohn); DPC-961 and DPC-963 (second-generation derivatives of efavirenz, designed to be active against viruses with the K103N mutation; DuPont); GW-420867X (has 25-fold greater activity than HBY097 and is active against K103N mutants; Glaxo Wellcome); CALANOLIDE A (naturally occurring agent from the latex tree; active against viruses containing either or both the Y181C and K103N mutations); and Propolis (WO 99/49830).

[0662] Additional protease inhibitors include LOPINAVIR™ (ABT378/r; Abbott Laboratories); BMS-232632 (an azapeptide; Bristol-Myres Squibb); TIPRANAVIR™ (PNU-140690, a non-peptic dihydropyrone; Pharmacia & Upjohn); PD-178390 (a nonpeptidic dihydropyrone; Parke-Davis); BMS 232632 (an azapeptide; Bristol-Myers Squibb); L-756,423 (an indinavir analog; Merck); DMP-450 (a cyclic urea compound; Avid & DuPont); AG-1776 (a peptidomimetic with in vitro activity against protease inhibitor-resistant viruses; Agouron); VX-175/GW-433908 (phosphate prodrug of amprenavir; Vertex & Glaxo Welcome); CGP61755 (Ciba); and AGENERASE™ (amprenavir; Glaxo Wellcome Inc.).

[0663] Additional antiretroviral agents include fusion inhibitors/gp41 binders. Fusion inhibitors/gp41 binders include T-20 (a peptide from residues 643-678 of the HIV gp41 transmembrane protein ectodomain which binds to gp41 in its resting state and prevents transformation to the fusogenic state; Trimeris) and T-1249 (a second-generation fusion inhibitor; Trimeris).

[0664] Additional antiretroviral agents include fusion inhibitors/chemokine receptor antagonists. Fusion inhibitors/chemokine receptor antagonists include CXCR4 antagonists such as AMD 3100 (a bicyclam), SDF-1 and its analogs, and ALX40-4C (a cationic peptide), T22 (an 18 amino acid peptide; Trimeris) and the T22 analogs T134 and T140; CCR5 antagonists such as RANTES (9-68), AOP-RANTES, NNY-RANTES, and TAK-779; and CCR5/CXCR4 antagonists such as NSC₆₅₁₀₁₆ (a distamycin analog). Also included are CCR2B, CCR3, and CCR6 antagonists. Chemokine recpetor agonists such as RANTES, SDF-1, MIP-1α, MIP-1β, etc., may also inhibit fusion.

[0665] Additional antiretroviral agents include integrase inhibitors. Integrase inhibitors include dicaffeoylquinic (DFQA) acids; L-chicoric acid (a dicaffeoyltartaric (DCTA) acid); quinalizarin (QLC) and related anthraquinones; ZINTEVIR™ (AR 177, an oligonucleotide that probably acts at cell surface rather than being a true integrase inhibitor; Arondex); and naphthols such as those disclosed in WO 98/50347.

[0666] Additional antiretroviral agents include hydroxyurea-like compunds such as BCX-34 (a purine nucleoside phosphorylase inhibitor; Biocryst); ribonucleotide reductase inhibitors such as DIDOX™ (Molecules for Health); inosine monophosphate dehydrogenase (IMPDH) inhibitors sucha as VX-497 (Vertex); and myvopholic acids such as CellCept (mycophenolate mofetil; Roche).

[0667] Additional antiretroviral agents include inhibitors of viral integrase, inhibitors . of viral genome nuclear translocation such as arylene bis(methylketone) compounds; inhibitors of HIV entry such as AOP-RANTES, NNY-RANTES, RANTES-IgG fusion protein, soluble complexes of RANTES and glycosaminoglycans (GAG), and AMD-3100; nucleocapsid zinc finger inhibitors such as dithiane compounds; targets of HIV Tat and Rev; and pharmacoenhancers such as ABT-378.

[0668] Other antiretroviral therapies and adjunct therapies include cytokines and lymphokines such as MIP-1α, MIP-1β, SDF-1α, IL-2, PROLEUKIN™ (aldesleukin/L2-7001; Chiron), IL-4, IL-10, IL-12, and IL-13; interferons such as IFN-α2a; antagonists of TNFs, NFκB, GM-CSF, M-CSF, and IL-10; agents that modulate immune activation such as cyclosporin and prednisone; vaccines such as Remune™ (HIV Immunogen), APL 400-003 (Apollon), recombinant gp120 and fragments, bivalent (B/E) recombinant envelope glycoprotein, rgp120 CM235, MN rgp120, SF-2 rgp120, gp120/soluble CD4 complex, Delta JR-FL protein, branched synthetic peptide derived from discontinuous gp120 C3/C4 domain, fusion-competent immunogens, and Gag, Pol, Nef, and Tat vaccines; gene-based therapies such as genetic suppressor elements (GSEs; WO 98/54366), and intrakines (genetically modified CC chemokines targetted to the ER to block surface expression of newly synthesized CCR5 (Yang et al, PNAS 94:11567-72 (1997); Chen et al, Nat. Med. 3:1110-16 (1997)); antibodies such as the anti-CXCR4 antibody 12G5, the anti-CCR5 antibodies 2D7, 5C7, PA8, PA9, PA10, PA11, PA12, and PA14, the anti-CD4 antibodies Q4120 and RPA-T4, the anti-CCR3 antibody 7B11, the anti-gp120 antibodies 17b, 48d, 447-52D, 257-D, 268-D and 50.1, anti-Tat antibodies, anti-TNF-α antibodies, and monoclonal antibody 33A; aryl hydrocarbon (AH) receptor agonists and antagonists such as TCDD, 3,3′,4,4′,5-pentachlorobiphenyl, 3,3′,4,4′-tetrachlorobiphenyl, and α-naphthoflavone (WO 98/30213); and antioxidants such as γ-L-glutamyl-L-cysteine ethyl ester (y-GCE; WO 99/56764).

[0669] In a further embodiment, the Therapeutics of the invention are administered in combination with an antiviral agent. Antiviral agents that may be administered with the Therapeutics of the invention include, but are not limited to, acyclovir, ribavirin, amantadine, and remantidine.

[0670] In other embodiments, Therapeutics of the invention may be administered in combination with anti-opportunistic infection agents. Anti-opportunistic agents that may be administered in combination with the Therapeutics of the invention, include, but are not limited to, TRIMETHOPRIM-SULFAMETHOXAZOLE™, DAPSONE™, PENTAMIDINE™, ATOVAQUONE™, ISONIAZID™, RIFAMPIN™, PYRAZINAMIDE™, ETHAMBUTOL™, RIFABUTIN™, CLARITHROMYCIN™, AZITHROMYCIN™, GANCICLOVIR™, FOSCARNET™, CIDOFOVIR™, FLUCONAZOLE™, ITRACONAZOLE™, KETOCONAZOLE™, ACYCLOVIR™, FAMCICOLVIR™, PYRIMETHAMINE™, LEUCOVORIN™, NEUPOGEN™ (filgrastim/G-CSF), and LEUKINE™ (sargramostim/GM-CSF). In a specific embodiment, Therapeutics of the invention are used in any combination with TRIMETHOPRIM-SULFAMETHOXAZOLE™, DAPSONE™, PENTAMIDINE™, and/or ATOVAQUONE™ to prophylactically treat or prevent an opportunistic Pneumocystis carinii pneumonia infection. In another specific embodiment, Therapeutics of the invention are used in any combination with ISONIAZID™, RIFAMPIN™, PYRAZINAMIDE™, and/or ETHAMBUTOL™ to prophylactically treat or prevent an opportunistic Mycobacterium avium complex infection. In another specific embodiment, Therapeutics of the invention are used in any combination with RIFABUTIN™, CLARITHROMYCIN™, and/or AZITHROMYCIN™ to prophylactically treat or prevent an opportunistic Mycobacterium tuberculosis infection. In another specific embodiment, Therapeutics of the invention are used in any combination with GANCICLOVIR™, FOSCARNET™, and/or CIDOFOVIR™ to prophylactically treat or prevent an opportunistic cytomegalovirus infection. In another specific embodiment, Therapeutics of the invention are used in any combination with FLUCONAZOLE™, ITRACONAZOLE™, and/or KETOCONAZOLE™ to prophylactically treat or prevent an opportunistic fungal infection. In another specific embodiment, Therapeutics of the invention are used in any combination with ACYCLOVIR™ and/or FAMCICOLVIR™ to prophylactically treat or prevent an opportunistic herpes simplex virus type I and/or type I infection. In another specific embodiment, Therapeutics of the invention are used in any combination with PYRIMETHAMINE™ and/or LEUCOVORIN™ to prophylactically treat or prevent an opportunistic Toxoplasma gondii infection. In another specific embodiment, Therapeutics of the invention are used in any combination with LEUCOVORIN™ and/or NEUPOGEN™ to prophylactically treat or prevent an opportunistic bacterial infection.

[0671] In a further embodiment, the Therapeutics of the invention are administered in combination with an antibiotic agent. Antibiotic agents that may be administered with the Therapeutics of the invention include, but are not limited to, amoxicillin, beta-lactamases, aminoglycosides, beta-lactam (glycopeptide), beta-lactamases, Clindamycin, chloramphenicol, cephalosporins, ciprofloxacin, ciprofloxacin, erythromycin, fluoroquinolones, macrolides, metronidazole, penicillins, quinolones, rapamycin, rifampin, streptomycin, sulfonamide, tetracyclines, trimethoprim, trimethoprim-sulfamthoxazole, and vancomycin.

[0672] In other embodiments, Therapeutics of the invention are administered in combination with immunosuppressive agents. Immunosuppressive agents that may be administered in combination with the Therapeutics of the invention include, but are not limited to, steroids, cyclosporine, cyclosporine analogs, cyclophosphamide methylprednisone, prednisone, azathioprine, FK-506, 15-deoxyspergualin, and other immunosuppressive agents that act by suppressing the function of responding T cells. Other immunosuppressive agents that may be administered in combination with the Therapeutics of the invention include, but are not limited to, prednisolone, tnethotrexate, thalidomide, methoxsalen, rapamycin, leflunomide, mizoribine (BREDININ™), brequinar, deoxyspergualin, and azaspirane (SKF 105685), ORTHOCLONE OKT® 3 (muromonab-CD3), SANDIMMUNE™, NEORAL™, SANGDYA™ (cyclosporine), PROGRAF® (FK506, tacrolimus), CELLCEPT® (mycophenolate motefil, of which the active metabolite is mycophenolic acid), IMURAN™ (azathioprine), glucocorticosteroids, adrenocortical steroids such as DELTASONE™ (prednisone) and HYDELTRASOL™ (prednisolone), FOLEX™ and MEXATE™ (methotrxate), OXSORALEN-ULTRA™ (methoxsalen) and RAPAMUNE™ (sirolimus). In a specific embodiment, immunosuppressants may be used to prevent rejection of organ or bone marrow transplantation.

[0673] In an additional embodiment, Therapeutics of the invention are administered alone or in combination with one or more intravenous immune globulin preparations. Intravenous immune globulin preparations that may be administered with the Therapeutics of the invention include, but not limited to, GAMMAR™, IVEEGAM™, SANDOGLOBULIN™, GAMMAGARD S/D™, ATGAM™ (antithyrnocyte glubulin), and GAMIMUNE™. In a specific embodiment, Therapeutics of the invention are administered in combination with intravenous immune globulin preparations in transplantation therapy (e.g., bone marrow transplant).

[0674] In certain embodiments, the Therapeutics of the invention are administered alone or in combination with an anti-inflammatory agent. Anti-inflammatory agents that may be administered with the Therapeutics of the invention include, but are not limited to, corticosteroids (e.g. betamethasone, budesonide, cortisone, dexamethasone, hydrocortisone, methylprednisolone, prednisolone, prednisone, and triamcinolone), nonsteroidal anti-inflammatory drugs (e.g., diclofenac, diflunisal, etodolac, fenoprofen, floctafenine, flurbiprofen, ibuprofen, indomethacin, ketoprofen, meclofenamate, mefenamic acid, meloxicam, nabumetone, naproxen, oxaprozin, phenylbutazone, piroxicam, sulindac, tenoxicam, tiaprofenic acid, and tolmetin.), as well as antihistamines, aminoarylcarboxylic acid derivatives, arylacetic acid derivatives, arylbutyric acid derivatives, arylcarboxylic acids, arylpropionic acid derivatives, pyrazoles, pyrazolones, salicylic acid derivatives, thiazinecarboxamides, e-acetamidocaproic acid, S-adenosylmethionine, 3-amino-4-hydroxybutyric acid, amixetrine, bendazac, benzydamine, bucolome, difenpiramide, ditazol, emorfazone, guaiazulene, nabumetone, nimesulide, orgotein, oxaceprol, paranyline, perisoxal, pifoxime, proquazone, proxazole, and tenidap.

[0675] In an additional embodiment, the compositions of the invention are administered alone or in combination with an anti-angiogenic agent. Anti-angiogenic agents that may be administered with the compositions of the invention include, but are not limited to, Angiostatin (Entremed, Rockville, Md.), Troponin- 1 (Boston Life Sciences, Boston, Mass.), anti-Invasive Factor, retinoic acid and derivatives thereof, paclitaxel (Taxol), Suramin, Tissue Inhibitor of Metalloproteinase-1, Tissue Inhibitor of Metalloproteinase-2, VEGI, Plasminogen Activator Inhibitor-1, Plasminogen Activator Inhibitor-2, and various forms of the lighter “d group” transition metals.

[0676] Lighter “d group” transition metals include, for example, vanadium, molybdenum, tungsten, titanium, niobium, and tantalum species. Such transition metal species may form transition metal complexes. Suitable complexes of the above-mentioned transition metal species include oxo transition metal complexes.

[0677] Representative examples of vanadium complexes include oxo vanadium complexes such as vanadate and vanadyl complexes. Suitable vanadate complexes include metavanadate and orthovanadate complexes such as, for example, ammonium metavanadate, sodium metavanadate, and sodium orthovanadate. Suitable vanadyl complexes include, for example, vanadyl acetylacetonate and vanadyl sulfate including vanadyl sulfate hydrates such as vanadyl sulfate mono- and trihydrates.

[0678] Representative examples of tungsten and molybdenum complexes also include oxo complexes. Suitable oxo tungsten complexes include tungstate and tungsten oxide complexes. Suitable tungstate complexes include ammonium tungstate, calcium tungstate, sodium tungstate dihydrate, and tungstic acid. Suitable tungsten oxides include tungsten (IV) oxide and tungsten (VI) oxide. Suitable oxo molybdenum complexes include molybdate, molybdenum oxide, and molybdenyl complexes. Suitable molybdate complexes include ammonium molybdate and its hydrates, sodium molybdate and its hydrates, and potassium molybdate and its hydrates. Suitable molybdenum oxides include molybdenum (VI) oxide, molybdenum (VI) oxide, and molybdic acid. Suitable molybdenyl complexes include, for example, molybdenyl acetylacetonate. Other suitable tungsten and molybdenum complexes include hydroxo derivatives derived from, for example, glycerol, tartaric acid, and sugars.

[0679] A wide variety of other anti-angiogenic factors may also be utilized within the context of the present invention. Representative examples include, but are not limited to, platelet factor 4; protamine sulphate; sulphated chitin derivatives (prepared from queen crab shells), (Murata et al., Cancer Res. 51:22-26, (1991)); Sulphated Polysaccharide Peptidoglycan Complex (SP-PG) (the function of this compound may be enhanced by the presence of steroids such as estrogen, and tamoxifen citrate); Staurosporine; modulators of matrix metabolism, including for example, proline analogs, cishydroxyproline, d,L-3,4-dehydroproline, Thiaproline, alpha,alpha-dipyridyl, aminopropionitrile fumarate; 4-propyl-5-(4-pyridinyl)-2(3H)-oxazolone; Methotrexate; Mitoxantrone; Heparin; Interferons; 2 Macroglobulin-serum; ChIMP-3 (Pavloff et al., J. Bio. Chem. 267:17321-17326, (1992)); Chymostatin (Tomkinson et al., Biochem J. 286:475-480, (1992)); Cyclodextrin Tetradecasulfate; Eponemycin; Camptothecin; Fumagillin (Ingber et al., Nature 348:555-557, (1990)); Gold Sodium Thiomalate (“GST”; Matsubara and Ziff, J. Clin. Invest. 79:1440-1446, (1987)); anticollagenase-serum; alpha2-antiplasmin (Holmes et al., J. Biol. Chem. 262(4):1659-1664, (1987)); Bisantrene (National Cancer Institute); Lobenzarit disodium (N-(2)-carboxyphenyl-4-chloroanthronilic acid disodium or “CCA”; (Takeuchi et al., Agents Actions 36:312-316, (1992)); and metalloproteinase inhibitors such as BB94.

[0680] Additional anti-angiogenic factors that may also be utilized within the context of the present invention include Thalidomide, (Celgene, Warren, N.J.); Angiostatic steroid; AGM-1470 (H. Brem and J. Folkman J Pediatr. Surg. 28:445-51 (1993)); an integrin alpha v beta 3 antagonist (C. Storgard et al., J Clin. Invest. 103:47-54 (1999)); carboxynaminolmidazole; Carboxyamidotriazole (CAI) (National Cancer Institute, Bethesda, Md.); Conbretastatin A-4 (CA4P) (OXiGENE, Boston, Mass.); Squalamine (Magainin Pharmaceuticals, Plymouth Meeting, Pa.); TNP-470, (Tap Pharmaceuticals, Deerfield, Ill.); ZD-0101 AstraZeneca (London, UK); APRA (CT2584); Benefin, Byrostatin-1 (SC339555); CGP-41251 (PKC 412); CM101; Dexrazoxane (ICRF187); DMXAA; Endostatin; Flavopridiol; Genestein; GTE; ImmTher; Iressa (ZD1839); Octreotide (Somatostatin); Panretin; Penacillamine; Photopoint; PI-88; Prinomastat (AG-3340) Purlytin; Suradista (FCE26644); Tamoxifen (Nolvadex); Tazarotene; Tetrathiomolybdate; Xeloda (Capecitabine); and 5-Fluorouracil.

[0681] Anti-angiogenic agents that may be administed in combination with the compounds of the invention may work through a variety of mechanisms including, but not limited to, inhibiting proteolysis of the extracellular matrix, blocking the function of endothelial cell-extracellular matrix adhesion molecules, by antagonizing the function of angiogenesis inducers such as growth factors, and inhibiting integrin receptors expressed on proliferating endothelial cells. Examples of anti-angiogenic inhibitors that interfere with extracellular matrix proteolysis and which may be administered in combination with the compositons of the invention include, but are not Imited to, AG-3340 (Agouron, La Jolla, Calif.), BAY-12-9566 (Bayer, West Haven, Conn.), BMS-275291 (Bristol Myers Squibb, Princeton, N.J.), CGS-27032A (Novartis, East Hanover, N.J.), Marimastat (British Biotech, Oxford, UK), and Metastat (Aetema, St-Foy, Quebec). Examples of anti-angiogenic inhibitors that act by blocking the function of endothelial cell-extracellular matrix adhesion molecules and which may be administered in combination with the compositons of the invention include, but are not lmited to, EMD-121974 (Merck KcgaA Darmstadt, Germany) and Vitaxin (Ixsys, La Jolla, Calif./Medimmune, Gaithersburg, Md.). Examples of anti-angiogenic agents that act by directly antagonizing or inhibiting angiogenesis inducers and which may be administered in combination with the compositons of the invention include, but are not Imited to, Angiozyme (Ribozyme, Boulder, Colo.), Anti-VEGF antibody (Genentech, S. San Francisco, Calif.), PTK-787/ZK-225846 (Novartis, Basel, Switzerland), SU-101 (Sugen, S. San Francisco, Calif.), SU-5416 (Sugen/Pharmacia Upjohn, Bridgewater, N.J.), and SU-6668 (Sugen). Other anti-angiogenic agents act to indirectly inhibit angiogenesis. Examples of indirect inhibitors of angiogenesis which may be administered in combination with the compositons of the invention include, but are not limited to, IM-862 (Cytran, Kirkland, Wash.), Interferon-alpha, IL-12 (Roche, Nutley, N.J.), and Pentosan polysulfate (Georgetown University, Washington, D.C.).

[0682] In particular embodiments, the use of compositions of the invention in combination with anti-angiogenic agents is contemplated for the treatment, prevention, and/or amelioration of an autoimmune disease, such as for example, an autoimmune disease described herein.

[0683] In a particular embodiment, the use of compositions of the invention in combination with anti-angiogenic agents is contemplated for the treatment, prevention, and/or amelioration of arthritis. In a more particular embodiment, the use of compositions of the invention in combination with anti-angiogenic agents is contemplated for the treatment, prevention, and/or amelioration of rheumatoid arthritis.

[0684] In another embodiment, the polynucleotides encoding a polypeptide of the present invention are administered in combination with an angiogenic protein, or polynucleotides encoding an angiogenic protein. Examples of angiogenic proteins that may be administered with the compositions of the invention include, but are not limited to, acidic and basic fibroblast growth factors, VEGF-1, VEGF-2, VEGF-3, epidermal growth factor alpha and beta, platelet-derived endothelial cell growth factor, platelet-derived growth factor, tumor necrosis factor alpha, hepatocyte growth factor, insulin-like growth factor, colony stimulating factor, macrophage colony stimulating factor, granulocyte/macrophage colony stimulating factor, and nitric oxide synthase.

[0685] In additional embodiments, compostions of the invention are administered in combination with a chemotherapeutic agent. Chemotherapeutic agents that may be administered with the Therapeutics of the invention include, but are not limited to alkylating agents such as nitrogen mustards (for example, Mechlorethamine, cyclophosphamide, Cyclophosphamide Ifosfamide, Melphalan (L-sarcolysin), and Chlorambucil), ethylenimines and methylmelamines (for example, Hexamethylmelamine and Thiotepa), alkyl sulfonates (for example, Busulfan), nitrosoureas (for example, Carmustine (BCNU), Lomustine (CCNU), Semustine (methyl-CCNU), and Streptozocin (streptozotocin)), triazenes (for example, Dacarbazine (DTIC; dimethyltriazenoimidazolecarboxamide)), folic acid analogs (for example, Methotrexate (amethopterin)), pyrimidine analogs (for example, Fluorouacil (5-fluorouracil; 5-FU), Floxuridine (fluorodeoxyuridine; FudR), and Cytarabine (cytosine arabinoside)), purine analogs and related inhibitors (for example, Mercaptopurine (6-mercaptopurine; 6-MP), Thioguanine (6-thioguanine; TG), and Pentostatin (2′-deoxycoformycin)), vinca alkaloids (for example, Vinblastine (VLB, vinblastine sulfate) and Vincristine (vincristine sulfate)), epipodophyllotoxins (for example, Etoposide and Teniposide), antibiotics (for example, Dactinomycin (actinomycin D), Daunorubicin (daunomycin; rubidomycin), Doxorubicin, Bleomycin, Plicamycin (mithramycin), and Mitomycin (mitomycin C), enzymes (for example, L-Asparaginase), biological response modifiers (for example, Interferon-alpha and interferon-alpha-2b), platinum coordination compounds (for example, Cisplatin (cis-DDP) and Carboplatin), anthracenedione (Mitoxantrone), substituted ureas (for example, Hydroxyurea), methylhydrazine derivatives (for example, Procarbazine (N-methylhydrazine; MIH), adrenocorticosteroids (for example, Prednisone), progestins (for example, Hydroxyprogesterone caproate, Medroxyprogesterone, Medroxyprogesterone acetate, and Megestrol acetate), estrogens (for example, Diethylstilbestrol (DES), Diethylstilbestrol diphosphate, Estradiol, and Ethinyl estradiol), antiestrogens (for example, Tamoxifen), androgens (Testosterone proprionate, and Fluoxymesterone), antiandrogens (for example, Flutamide), gonadotropin-releasing horomone analogs (for example, Leuprolide), other hormones and hormone analogs (for example, methyltestosterone, estramustine, estramustine phosphate sodium, chlorotrianisene, and testolactone), and others (for example, dicarbazine, glutamic acid, and mitotane).

[0686] In one embodiment, the compositions of the invention are administered in combination with one or more of the following drugs: infliximab (also known as Remicade™ Centocor, Inc.), Trocade (Roche, RO-32-3555), Leflunomide (also known as Arava™ from Hoechst Marion Roussel), Kineret™ (an IL-1 Receptor antagonist also known as Anakinra from Amgen, Inc.).

[0687] In a specific embodiment, compositions of the invention are administered in combination with CHOP (cyclophosphamide, doxorubicin, vincristine, and prednisone) or combination of one or more of the components of CHOP. In one embodiment, the compositions of the invention are administered in combination with anti-CD20 antibodies, human monoclonal anti-CD20 antibodies. In another embodiment, the compositions of the invention are administered in combination with anti-CD20 antibodies and CHOP, or anti-CD20 antibodies and any combination of one or more of the components of CHOP, particularly cyclophosphamide and/or prednisone. In a specific embodiment, compositions of the invention are administered in combination with Rituximab. In a further embodiment, compositions of the invention are administered with Rituximab and CHOP, or Rituximab and any combination of one or more of the components of CHOP, particularly cyclophosphamide and/or prednisone. In a specific embodiment, compositions of the invention are administered in combination with tositumomab. In a further embodiment, compositions of the invention are administered with tositumomab and CHOP, or tositumomab and any combination of one or more of the components of CHOP, particularly cyclophosphamide and/or prednisone. The anti-CD20 antibodies may optionally be associated with radioisotopes, toxins or cytotoxic prodrugs.

[0688] In another specific embodiment, the compositions of the invention are administered in combination Zevalin™. In a further embodiment, compositions of the invention are administered with Zevalin m and CHOP, or Zevalin™ and any combination of one or more of the components of CHOP, particularly cyclophosphamide and/or prednisone. ZevalinTm may be associated with one or more radisotopes. Particularly preferred isotopes are ⁹⁰Y and ¹¹¹In.

[0689] In an additional embodiment, the Therapeutics of the invention are administered in combination with cytokines. Cytokines that may be administered with the Therapeutics of the invention include, but are not limited to, IL2, IL3, IL4, IL5, IL6, IL7, IL10, IL12, IL13, IL15, anti-CD40, CD40L, IFN-gamma and TNF-alpha. In another embodiment, Therapeutics of the invention may be administered with any interleukin, including, but not limited to, IL-1alpha, IL-1beta, IL-2, IL-3, IL-4, IL-5, IL-6, IL-7, IL-8, IL-9, IL-10, IL-11, IL-12, IL-13, IL-14, IL-15, IL-16, IL-17, IL-18, IL-19, IL-20, and IL-21.

[0690] In one embodiment, the Therapeutics of the invention are administered in combination with members of the TNF family. TNF, TNF-related or TNF-like molecules that may be administered with the Therapeutics of the invention include, but are not limited to, soluble forms of TNF-alpha, lymphotoxin-alpha (LT-alpha, also known as TNF-beta), LT-beta (found in complex heterotrimer LT-alpha2-beta), OPGL, FasL, CD27L, CD30L, CD40L, 4-1BBL, DcR3, OX40L, TNF-gamma (International Publication No. WO 96/14328), AIM-I (International Publication No. WO 97/33899), endokine-alpha (International Publication No. WO 98/07880), OPG, and neutrokine-alpha (International Publication No. WO 98/18921, OX40, and nerve growth factor (NGF), and soluble forms of Fas, CD30, CD27, CD40 and 4-IBB, TR2 (International Publication No. WO 96/34095), DR3 (International Publication No. WO 97/33904), DR4 (International Publication No. WO 98/32856), TR5 (International Publication No. WO 98/30693), TRANK, TR9 (International Publication No. WO 98/56892), TR1O (International Publication No. WO 98/54202), 312C2 (International Publication No. WO 98/06842), and TR12, and soluble forms CD154, CD70, and CD153.

[0691] In an additional embodiment, the Therapeutics of the invention are administered in combination with angiogenic proteins. Angiogenic proteins that may be administered with the Therapeutics of the invention include, but are not limited to, Glioma Derived Growth Factor (GDGF), as disclosed in European Patent Number EP-399816; Platelet Derived Growth Factor-A (PDGF-A), as disclosed in European Patent Number EP-6821 10; Platelet Derived Growth Factor-B (PDGF-B), as disclosed in European Patent Number EP-282317; Placental Growth Factor (PlIGF), as disclosed in International Publication Number WO 92/06194; Placental Growth Factor-2 (PlGF-2), as disclosed in Hauser et al., Growth Factors, 4:259-268 (1993); Vascular Endothelial Growth Factor (VEGF), as disclosed in International Publication Number WO 90/13649; Vascular Endothelial Growth Factor-A (VEGF-A), as disclosed in European Patent Number EP-506477; Vascular Endothelial Growth Factor-2 (VEGF-2), as disclosed in International Publication Number WO 96/39515; Vascular Endothelial Growth Factor B (VEGF-3); Vascular Endothelial Growth Factor B-186 (VEGF-B186), as disclosed in International Publication Number WO 96/26736; Vascular Endothelial Growth Factor-D (VEGF-D), as disclosed in International Publication Number WO 98/02543; Vascular Endothelial Growth Factor-D (VEGF-D), as disclosed in International Publication Number WO 98/07832; and Vascular Endothelial Growth Factor-E (VEGF-E), as disclosed in German Patent Number DE19639601. The above mentioned references are herein incorporated by reference in their entireties.

[0692] In an additional embodiment, the Therapeutics of the invention are administered in combination with Fibroblast Growth Factors. Fibroblast Growth Factors that may be administered with the Therapeutics of the invention include, but are not limited to, FGF-1, FGF-2, FGF-3, FGF-4, FGF-5, FGF-6, FGF-7, FGF-8, FGF-9, FGF-10, FGF-11, FGF-12, FGF-13, FGF-14, and FGF-15.

[0693] In an additional embodiment, the Therapeutics of the invention are administered in combination with hematopoietic growth factors. Hematopoietic growth factors that may be administered with the Therapeutics of the invention include, but are not limited to, granulocyte macrophage colony stimulating factor (GM-CSF) (sargramostim, LEUKINE™, PROKINE™), granulocyte colony stimulating factor (G-CSF) (filgrastim, NEUPOGEN™), macrophage colony stimulating factor (M-CSF, CSF-1) erythropoietin (epoetin alfa, EPOGEN™, PROCRIT™), stem cell factor (SCF, c-kit ligand, steel factor), megakaryocyte colony stimulating factor, PIXY321 (a GMCSF/IL-3 fusion protein), interleukins, especially any one or more of IL-1 through IL-12, interferon-gamma, or thrombopoietin.

[0694] In certain embodiments, Therapeutics of the present invention are administered in combination with adrenergic blockers, such as, for example, acebutolol, atenolol, betaxolol, bisoprolol, carteolol, labetalol, metoprolol, nadolol, oxprenolol, penbutolol, pindolol, propranolol, sotalol, and timolol.

[0695] In another embodiment, the Therapeutics of the invention are administered in combination with an antiarrhythmic drug (e.g., adenosine, amidoarone, bretylium, digitalis, digoxin, digitoxin, diliazem, disopyramide, esmolol, flecainide, lidocaine, mexiletine, moricizine, phenytoin, procainamide, N-acetyl procainamide, propafenone, propranolol, quinidine, sotalol, tocainide, and verapamil).

[0696] In another embodiment, the Therapeutics of the invention are administered in combination with diuretic agents, such as carbonic anhydrase-inhibiting agents (e.g., acetazolamide, dichlorphenamide, and methazolamide), osmotic diuretics (e.g., glycerin, isosorbide, mannitol, and urea), diuretics that inhibit Na⁺—K⁺—2Cl⁻ symport (e.g., furosemide, bumetanide, azosemide, piretanide, tripamide, ethacrynic acid, muzolimine, and torsemide), thiazide and thiazide-like diuretics (e.g., bendroflumethiazide, benzthiazide, chlorothiazide, hydrochlorothiazide, hydroflumethiazide, methyclothiazide, polythiazide, trichormethiazide, chlorthalidone, indapamide, metolazone, and quinethazone), potassium sparing diuretics (e.g., amiloride and triamterene), and mineralcorticoid receptor antagonists (e.g., spironolactone, canrenone, and potassium canrenoate).

[0697] In one embodiment, the Therapeutics of the invention are administered in combination with treatments for endocrine and/or hormone imbalance disorders. Treatments for endocrine and/or hormone imbalance disorders include, but are not limited to, ¹²⁷I, radioactive isotopes of iodine such as ¹³¹I and ¹²³I; recombinant growth hormone, such as HUMATROPE™ (recombinant somatropin); growth hormone analogs such as PROTROPIN™ (somatrem); dopamine agonists such as PARLODEL™ (bromocriptine); somatostatin analogs such as SANDOSTAT™ (octreotide); gonadotropin preparations such as PREGNYL™, A.P.L.™ and PROFASI™ (chorionic gonadotropin (CG)), PERGONAL™ (menotropins), and METRODIN™ (urofollitropin (uFSH)); synthetic human gonadotropin releasing hormone preparations such as FACTREL™ and LUTREPULSE™ (gonadorelin hydrochloride); synthetic gonadotropin agonists such as LUPRON™ (leuprolide acetate), SUPPRELIN™ (histrelin acetate), SYNAREL™ (nafarelin acetate), and ZOLADEX™ (goserelin acetate); synthetic preparations of thyrotropin-releasing hormone such as RELEFACT TRH™ and THYPINONE™ (protirelin); recombinant human TSH such as THYROGEN™; synthetic preparations of the sodium salts of the natural isomers of thyroid hormones such as L-T₄™, SYNTHROID™ and LEVOTHROID™ (levothyroxine sodium), L-T₃™, CYTOMEL™ and TRIOSTAT™ (liothyroine sodium), and THYROLAR™ (liotrix); antithyroid compounds such as 6-n-propylthiouracil (propylthiouracil), 1-methyl-2-mercaptoimidazole and TAPAZOLE™ (methimazole), NEO-MERCAZOLE™ (carbimazole); beta-adrenergic receptor antagonists such as propranolol and esmolol; Ca²⁺ channel blockers; dexamethasone and iodinated radiological contrast agents such as TELEPAQUE™ (iopanoic acid) and ORAGRAFIN™ (sodium ipodate); estrogens or congugated estrogens such as ESTRACE™ (estradiol), ESTINYL™ (ethinyl estradiol), PREMARIN™, ESTRATAB™, ORTHO-EST™, OGEN™ and estropipate (estrone), ESTROVIS™ (quinestrol), ESTRADERM™ (estradiol), DELESTROGEN™ and VALERGEN™ (estradiol valerate), DEPO-ESTRADIOL CYPIONATE™ and ESTROJECT LA™ (estradiol cypionate); antiestrogens such as NOLVADEX™ (tamoxifen), SEROPHENE™ and CLOMID™ (clomiphene); progestins such as DURALUTIN™ (hydroxyprogesterone caproate), MPA™ and DEPO-PROVERA™ (medroxyprogesterone acetate), PROVERA™ and CYCRIN™ (MPA), MEGACE™ (megestrol acetate), NORLUTIN™ (norethindrone), and NORLUTATE™ and AYGESTIM™ (norethindrone acetate); progesterone implants such as NORPLANT SYSTEM™ (subdermal implants of norgestrel); antiprogestins such as RU 486™ (mifepristone); hormonal contraceptives such as ENOVID™ (norethynodrel plus mestranol), PROGESTASERT™ (intrauterine device that releases progesterone), LOESTRIN™, BREVICON™, MODICON™, GENORA™, NELONA™, NORINYL™, OVACON-35™ and OVACON-50™ (ethinyl estradiol/norethindrone), LEVLEN™, NORDETTE™, TRI-LEVLEN™ TRITRIPHASIL-21™ (ethinyl estradiol/levonorgestrel) LO/OVRAL™ and OVRAL™ (ethinyl estradiol/norgestrel), DEMULEN™ (ethinyl estradiol/ethynodiol diacetate), NORINYL™, ORTHO-NOVUM™, NORETHIN™, GENORA™, and NELOVA™ (norethindrone/mestranol), DESOGEN™ and ORTHO-CEPT™ (ethinyl estradiol/desogestrel), ORTHO-CYCLEN™ and ORTHO-TRICYCLEN™ (ethinyl estradiol/norgestimate), MICRONOR™ and NOR-QD™ (norethindrone), and OVRETTE™ (norgestrel); testosterone esters such as methenolone acetate and testosterone undecanoate; parenteral and oral androgens such as TESTOJECT-50™ (testosterone), TESTEX™ (testosterone propionate), DELATESTRYL™ (testosterone enanthate), DEPO-TESTOSTERONE™ (testosterone cypionate), DANOCRINE™ (danazol), HALOTESTIN™ (fluoxymesterone), ORETON METHYL™, TESTRED™ and VIRILON™ (methyltestosterone), and OXANDRIN™ (oxandrolone); testosterone transdermal systems such as TESTODERM™; androgen receptor antagonist and 5-alpha-reductase inhibitors such as ANDROCUR™ (cyproterone acetate), EULEXIN™ (flutamide), and PROSCAR™ (finasteride); adrenocorticotropic hormone preparations such as CORTROSYN™ (cosyntropin); adrenocortical steroids and their synthetic analogs such as ACLOVATE™ (alclometasone dipropionate), CYCLOCORT™ (amcinonide), BECLOVENT™ and VANCERIL™ (beclomethasone dipropionate), CELESTONE™ (betamethasone), BENISONE™ and UTICORT™ (betamethasone benzoate), DIPROSONE™ (betamethasone dipropionate), CELESTONE PHOSPHATE™ (betamethasone sodium phosphate), CELESTONE SOLUSPAN™ (betamethasone sodium phosphate and acetate), BETA-VAL™ and VALISONE™ (betamethasone valerate), TEMOVATE™ (clobetasol propionate), CLODERM™ (clocortolone pivalate), CORTEF™ and HYDROCORTONE™ (cortisol (hydrocortisone)), HYDROCORTONE ACETATE™ (cortisol (hydrocortisone) acetate), LOCOID™ (cortisol (hydrocortisone) butyrate), HYDROCORTONE PHOSPHATE™ (cortisol (hydrocortisone) sodium phosphate), A-HYDROCORT™ and SOLU CORTEF™ (cortisol (hydrocortisone) sodium succinate), WESTCORT™ (cortisol (hydrocortisone) valerate), CORTISONE ACETATE™ (cortisone acetate), DESOWEN™ and TRIDESILON™ (desonide), TOPICORT™ (desoximetasone), DECADRON™ (dexamethasone), DECADRON LA™ (dexamethasone acetate), DECADRON PHOSPHATE™ and HEXADROL PHOSPHATE™ (dexamethasone sodium phosphate), FLORONE™ and MAXIFLOR™ (diflorasone diacetate), FLORINEF ACETATE™ (fludrocortisone acetate), AEROBID™ and NASALIDE™ (flunisolide), FLUONID™ and SYNALAR™ (fluocinolone acetonide), LIDEX™ (fluocinonide), FLUOR-OP™ and FML™ (fluorometholone), CORDRAN™ (flurandrenolide), HALOG™ (halcinonide), HMS LIZUIFILM™ (medrysone), MEDROL™ (methylprednisolone), DEPO-MEDROL™ and MEDROL ACETATE™ (methylprednisone acetate), A-METHAPRED™ and SOLUMEDROL™ (methylprednisolone sodium succinate), ELOCON™ (mometasone furoate), HALDRONE™ (paramethasone acetate), DELTA-CORTEF™ (prednisolone), ECONOPRED™ (prednisolone acetate), HYDELTRASOL™ (prednisolone sodium phosphate), HYDELTRA-T.B.A™ (prednisolone tebutate), DELTASONE™ (prednisone), ARISTOCORT™ and KENACORT™ (triamcinolone), KENALOG™ (triamcinolone acetonide), ARISTOCORT™ and KENACORT DIACETATE™ (triamcinolone diacetate), and ARISTOSPAN™ (triamcinolone hexacetonide); inhibitors of biosynthesis and action of adrenocortical steroids such as CYTADREN™ (aminoglutethimide), NIZORAL™ (ketoconazole), MODRASTANE™ (trilostane), and METOPIRONE™ (metyrapone); bovine, porcine or human insulin or mixtures thereof; insulin analogs; recombinant human insulin such as HUMULIN™ and NOVOLIN™; oral hypoglycemic agents such as ORAMIDE™ and ORINASE™ (tolbutamide), DIABINESE™ (chlorpropamide), TOLAMIDE™ and TOLINASE™ (tolazamide), DYMELOR™ (acetohexamide), glibenclamide, MICRONASE™, DIBETA™ and GLYNASE™ (glyburide), GLUCOTROL™ (glipizide), and DIAMICRON™ (gliclazide), GLUCOPHAGE™ (metformin), ciglitazone, pioglitazone, and alpha-glucosidase inhibitors; bovine or porcine glucagon; somatostatins such as SANDOSTATIN™ (octreotide); and diazoxides such as PROGLYCEM™ (diazoxide).

[0698] In one embodiment, the Therapeutics of the invention are administered in combination with treatments for uterine motility disorders. Treatments for uterine motility disorders include, but are not limited to, estrogen drugs such as conjugated estrogens (e.g., PREMARIN® and ESTRATAB®), estradiols (e.g., CLIMARA® and ALORA®), estropipate, and chlorotrianisene; progestin drugs (e.g., AMEN® (medroxyprogesterone), MICRONOR® (norethidrone acetate), PROMETRIUM® progesterone, and megestrol acetate); and estrogen/progesterone combination therapies such as, for example, conjugated estrogens/medroxyprogesterone (e.g., PREMPRO™ and PREMPHASE®) and norethindrone acetate/ethinyl estsradiol (e.g., FEMHRT™).

[0699] In an additional embodiment, the Therapeutics of the invention are administered in combination with drugs effective in treating iron deficiency and hypochromic anemias, including but not limited to, ferrous sulfate (iron sulfate, FEOSOL™), ferrous fumarate (e.g., FEOSTAT™), ferrous gluconate (e.g., FERGON™), polysaccharide-iron complex (e.g., NIFEREX™), iron dextran injection (e.g., INFED™), cupric sulfate, pyroxidine, riboflavin, Vitamin B₁₂, cyancobalamin injection (e.g., REDISOL™, RUBRAMIN PC™), hydroxocobalamin, folic acid (e.g., FOLVITE™), leucovorin (folinic acid, 5—CHOH4PteGlu, citrovorum factor) or WELLCOVORIN (Calcium salt of leucovorin), transferrin or ferritin.

[0700] In certain embodiments, the Therapeutics of the invention are administered in combination with agents used to treat psychiatric disorders. Psychiatric drugs that may be administered with the Therapeutics of the invention include, but are not limited to, antipsychotic agents (e.g., chlorpromazine, chlorprothixene, clozapine, fluphenazine, haloperidol, loxapine, mesoridazine, molindone, olanzapine, perphenazine, pimozide, quetiapine, risperidone, thioridazine, thiothixene, trifluoperazine, and triflupromazine), antimanic agents (e.g., carbamazepine, divalproex sodium, lithium carbonate, and lithium citrate), antidepressants (e.g., amitriptyline, amoxapine, bupropion, citalopram, clomipramine, desipramine, doxepin, fluvoxamine, fluoxetine, imipramine, isocarboxazid, maprotiline, mirtazapine, nefazodone, nortriptyline, paroxetine, phenelzine, protriptyline, sertraline, tranylcypromine, trazodone, trimipramine, and venlafaxine), antianxiety agents (e.g., alprazolam, buspirone, chlordiazepoxide, clorazepate, diazepam, halazepam, lorazepam, oxazepam, and prazepam), and stimulants (e.g., d-amphetamine, methylphenidate, and pemoline).

[0701] In other embodiments, the Therapeutics of the invention are administered in combination with agents used to treat neurological disorders. Neurological agents that may be administered with the Therapeutics of the invention include, but are not limited to, antiepileptic agents (e.g., carbamazepine, clonazepam, ethosuximide, phenobarbital, phenytoin, primidone, valproic acid, divalproex sodium, felbamate, gabapentin, lamotrigine, levetiracetam, oxcarbazepine, tiagabine, topiramate, zonisamide, diazepam, lorazepam, and clonazeparn), antiparkinsonian agents (e.g., levodopa/carbidopa, selegiline, amantidine, bromocriptine, pergolide, ropinirole, pramipexole, benztropine; biperiden; ethopropazine; procyclidine; trihexyphenidyl, tolcapone), and ALS therapeutics (e.g. riluzole).

[0702] In another embodiment, Therapeutics of the invention are administered in combination with vasodilating agents and/or calcium channel blocking agents. Vasodilating agents that may be administered with the Therapeutics of the invention include, but are not limited to, Angiotensin Converting Enzyme (ACE) inhibitors (e.g., papaverine, isoxsuprine, benazepril, captopril, cilazapril, enalapril, enalaprilat, fosinopril, lisinopril, moexipril, perindopril, quinapril, ramipril, spirapril, trandolapril, and nylidrin), and nitrates (e.g., isosorbide dinitrate, isosorbide mononitrate, and nitroglycerin). Examples of calcium channel blocking agents that may be administered in combination with the Therapeutics of the invention include, but are not limited to amlodipine, bepridil, diltiazem, felodipine, flunarizine, isradipine, nicardipine, nifedipine, nimodipine, and verapamil.

[0703] In additional embodiments, the Therapeutics of the invention are administered in combination with other therapeutic or prophylactic regimens, such as, for example, radiation therapy.

### Example 14

### Method of Treating Decreased Levels of the Polypeptide

[0704] The present invention relates to a method for treating an individual in need of an increased level of a polypeptide of the invention in the body comprising administering to such an individual a composition comprising a therapeutically effective amount of an agonist of the invention (including polypeptides of the invention). Moreover, it will be appreciated that conditions caused by a decrease in the standard or normal expression level of a polypeptide of the present invention in an individual can be treated by administering the agonist or antagonist of the present invention. Thus, the invention also provides a method of treatment of an individual in need of an increased level of the polypeptide comprising administering to such an individual a Therapeutic comprising an amount of the agonist or antagonist to increase the activity level of the polypeptide in such an individual.

[0705] For example, a patient with decreased levels of a polypeptide receives a daily dose 0.1-100 ug/kg of the agonist or antagonist for six consecutive days. The exact details of the dosing scheme, based on administration and formulation, are provided in Example 13.

### Example 15

### Method of Treating Increased Levels of the Polypeptide

[0706] The present invention also relates to a method of treating an individual in need of a decreased level of a polypeptide of the invention in the body comprising administering to such an individual a composition comprising a therapeutically effective amount of an antagonist of the invention (including polypeptides and antibodies of the invention).

[0707] In one example, antisense technology is used to inhibit production of a polypeptide of the present invention. This technology is one example of a method of decreasing levels of a polypeptide, due to a variety of etiologies, such as cancer.

[0708] For example, a patient diagnosed with abnormally increased levels of a polypeptide is administered intravenously antisense polynucleotides at 0.5, 1.0, 1.5, 2.0 and 3.0 mg/kg day for 21 days. This treatment is repeated after a 7-day rest period if the treatment was well tolerated. The formulation of the antisense polynucleotide is provided in Example 13.

### Example 16

### Method of Treatment Using Gene Therapy-ex vivo

[0709] One method of gene therapy transplants fibroblasts, which are capable of expressing a polypeptide, onto a patient. Generally, fibroblasts are obtained from a subject by skin biopsy. The resulting tissue is placed in tissue-culture medium and separated into small pieces. Small chunks of the tissue are placed on a wet surface of a tissue culture flask, approximately ten pieces are placed in each flask. The flask is turned upside down, closed tight and left at room temperature over night. After 24 hours at room temperature, the flask is inverted and the chunks of tissue remain fixed to the bottom of the flask and fresh media (e.g., Ham's F12 media, with 10% FBS, penicillin and streptomycin) is added. The flasks are then incubated at 37 degree C. for approximately one week.

[0710] At this time, fresh media is added and subsequently changed every several days. After an additional two weeks in culture, a monolayer of fibroblasts emerge. The monolayer is trypsinized and scaled into larger flasks.

[0711] pMV-7 (Kirschmeier, P. T. et al., DNA, 7:219-25 (1988)), flanked by the long terminal repeats of the Moloney murine sarcoma virus, is digested with EcoRI and HindIII and subsequently treated with calf intestinal phosphatase. The linear vector is fractionated on agarose gel and purified, using glass beads.

[0712] The cDNA encoding a polypeptide of the present invention can be amplified using PCR primers which correspond to the 5′ and 3′ end sequences respectively as set forth in Example 1 using primers and having appropriate restriction sites and initiation/stop codons, if necessary. Preferably, the 5′ primer contains an EcoRI site and the 3′ primer includes a HindIII site. Equal quantities of the Moloney murine sarcoma virus linear backbone and the amplified EcoRI and HindIII fragment are added together, in the presence of T4 DNA ligase. The resulting mixture is maintained under conditions appropriate for ligation of the two fragments. The ligation mixture is then used to transform bacteria HB101, which are then plated onto agar containing kanamycin for the purpose of confirming that the vector has the gene of interest properly inserted.

[0713] The amphotropic pA317 or GP+aml2 packaging cells are grown in tissue culture to confluent density in Dulbecco's Modified Eagles Medium (DMEM) with 10% calf serum (CS), penicillin and streptomycin. The MSV vector containing the gene is then added to the media and the packaging cells transduced with the vector. The packaging cells now produce infectious viral particles containing the gene (the packaging cells are now referred to as producer cells).

[0714] Fresh media is added to the transduced producer cells, and subsequently, the media is harvested from a 10 cm plate of confluent producer cells. The spent media, containing the infectious viral particles, is filtered through a millipore filter to remove detached producer cells and this media is then used to infect fibroblast cells. Media is removed from a sub-confluent plate of fibroblasts and quickly replaced with the media from the producer cells. This media is removed and replaced with fresh media. If the titer of virus is high, then virtually all fibroblasts will be infected and no selection is required. If the titer is very low, then it is necessary to use a retroviral vector that has a selectable marker, such as neo or his. Once the fibroblasts have been efficiently infected, the fibroblasts are analyzed to determine whether protein is produced.

[0715] The engineered fibroblasts are then transplanted onto the host, either alone or after having been grown to confluence on cytodex 3 microcarrier beads.

### Example 17

### Gene Therapy Using Endogenous Genes Corresponding to Polynucleotides of the Invention

[0716] Another method of gene therapy according to the present invention involves operably associating the endogenous polynucleotide sequence of the invention with a promoter via homologous recombination as described, for example, in U.S. Pat. No. 5,641,670, issued Jun. 24, 1997; International Publication NO: WO 96/29411, published Sep. 26, 1996; International Publication NO: WO 94/12650, published Aug 4, 1994; Koller et al., Proc. Natl. Acad. Sci. USA, 86:8932-8935 (1989); and Zijlstra et al., Nature, 342:435-438 (1989). This method involves the activation of a gene which is present in the target cells, but which is not expressed in the cells, or is expressed at a lower level than desired.

[0717] Polynucleotide constructs are made which contain a promoter and targeting sequences, which are homologous to the 5′ non-coding sequence of endogenous polynucleotide sequence, flanking the promoter. The targeting sequence will be sufficiently near the 5′ end of the polynucleotide sequence so the promoter will be operably linked to the endogenous sequence upon homologous recombination. The promoter and the targeting sequences can be amplified using PCR. Preferably, the amplified promoter contains distinct restriction enzyme sites on the 5′ and 3′ ends. Preferably, the 3′ end of the first targeting sequence contains the same restriction enzyme site as the 5′ end of the amplified promoter and the 5′ end of the second targeting sequence contains the same restriction site as the 3′ end of the amplified promoter.

[0718] The amplified promoter and the amplified targeting sequences are digested with the appropriate restriction enzymes and subsequently treated with calf intestinal phosphatase. The digested promoter and digested targeting sequences are added together in the presence of T4 DNA ligase. The resulting mixture is maintained under conditions appropriate for ligation of the two fragments. The construct is size fractionated on an agarose gel, then purified by phenol extraction and ethanol precipitation.

[0719] In this Example, the polynucleotide constructs are administered as naked polynucleotides via electroporation. However, the polynucleotide constructs may also be administered with transfection-facilitating agents, such as liposomes, viral sequences, viral particles, precipitating agents, etc. Such methods of delivery are known in the art.

[0720] Once the cells are transfected, homologous recombination will take place which results in the promoter being operably linked to the endogenous polynucleotide sequence. This results in the expression of polynucleotide corresponding to the polynucleotide in the cell. Expression may be detected by immunological staining, or any other method known in the art.

[0721] Fibroblasts are obtained from a subject by skin biopsy. The resulting tissue is placed in DMEM+10% fetal calf serum. Exponentially growing or early stationary phase fibroblasts are trypsinized and rinsed from the plastic surface with nutrient medium. An aliquot of the cell suspension is removed for counting, and the remaining cells are subjected to centrifugation. The supernatant is aspirated and the pellet is resuspended in 5 ml of electroporation buffer (20 mM HEPES pH 7.3, 137 mM NaCl, 5 mM KCl, 0.7 mM Na₂ HPO₄, 6 mM dextrose). The cells are recentrifuged, the supernatant aspirated, and the cells resuspended in electroporation buffer containing 1 mg/ml acetylated bovine serum albumin. The final cell suspension contains approximately 3×10⁶ cells/ml. Electroporation should be performed immediately following resuspension.

[0722] Plasmid DNA is prepared according to standard techniques. For example, to construct a plasmid for targeting to the locus corresponding to the polynucleotide of the invention, plasmid pUC18 (MBI Fermentas, Amherst, N.Y.) is digested with HindIII. The CMV promoter is amplified by PCR with an XbaI site on the 5′ end and a BamHI site on the 3′ end. Two non-coding sequences are amplified via PCR: one non-coding sequence (fragment 1) is amplified with a HindIII site at the 5′end and an Xba site at the 3′end; the other non-coding sequence (fragment 2) is amplified with a BamHI site at the 5′end and a HindIII site at the 3′end. The CMV promoter and the fragments (1 and 2) are digested with the appropriate enzymes (CMV promoter—XbaI and BamHI; fragment 1—XbaI; fragment 2—BamHI) and ligated together. The resulting ligation product is digested with HindIll, and ligated with the HindIII-digested pUC₁₈ plasmid.

[0723] Plasmid DNA is added to a sterile cuvette with a 0.4 cm electrode gap (Bio-Rad). The final DNA concentration is generally at least 120 μg/ml. 0.5 ml of the cell suspension (containing approximately 1.5.×10⁶ cells) is then added to the cuvette, and the cell suspension and DNA solutions are gently mixed. Electroporation is performed with a Gene-Pulser apparatus (Bio-Rad). Capacitance and voltage are set at 960 μF and 250-300 V, respectively. As voltage increases, cell survival decreases, but the percentage of surviving cells that stably incorporate the introduced DNA into their genome increases dramatically. Given these parameters, a pulse time of approximately 14-20 mSec should be observed.

[0724] Electroporated cells are maintained at room temperature for approximately 5 min, and the contents of the cuvette are then gently removed with a sterile transfer pipette. The cells are added directly to 10 ml of prewarmed nutrient media (DMEM with 15% calf serum) in a 10 cm dish and incubated at 37 degree C. The following day, the media is aspirated and replaced with 10 ml of fresh media and incubated for a further 16-24 hours.

[0725] The engineered fibroblasts are then injected into the host, either alone or after having been grown to confluence on cytodex 3 microcarrier beads. The fibroblasts now produce the protein product. The fibroblasts can then be introduced into a patient as described above.

### Example 18

### Method of Treatment Using Gene Therapy

[0726] in vivo

[0727] Another aspect of the present invention is using in vivo gene therapy methods to treat disorders, diseases and conditions. The gene therapy method relates to the introduction of naked nucleic acid (DNA, RNA, and antisense DNA or RNA) sequences into an animal to increase or decrease the expression of the polypeptide. The polynucleotide of the present invention may be operatively linked to (i.e., associated with) a promoter or any other genetic elements necessary for the expression of the polypeptide by the target tissue. Such gene therapy and delivery techniques and methods are known in the art, see, for example, WO90/11092, WO98/11779; U.S. Pat. Nos. 5,693,622, 5,705,151, 5,580,859; Tabata et al., Cardiovasc. Res. 35(3):470-479 (1997); Chao et al., Pharmacol. Res. 35(6):517-522 (1997); Wolff, Neuromuscul. Disord. 7(5):314-318 (1997); Schwartz et al., Gene Ther. 3(5):405-411 (1996); Tsurumi et al., Circulation 94(12):3281-3290 (1996) (incorporated herein by reference).

[0728] The polynucleotide constructs may be delivered by any method that delivers injectable materials to the cells of an animal, such as, injection into the interstitial space of tissues (heart, muscle, skin, lung, liver, intestine and the like). The polynucleotide constructs can be delivered in a pharmaceutically acceptable liquid or aqueous carrier.

[0729] The term “naked” polynucleotide, DNA or RNA, refers to sequences that are free from any delivery vehicle that acts to assist, promote, or facilitate entry into the cell, including viral sequences, viral particles, liposome formulations, lipofectin or precipitating agents and the like. However, the polynucleotides of the present invention may also be delivered in liposome formulations (such as those taught in Felgner P. L. et al. (1995) Ann. NY Acad. Sci. 772:126-139 and Abdallah B. et al. (1995) Biol. Cell 85(1):1-7) which can be prepared by methods well known to those skilled in the art.

[0730] The polynucleotide vector constructs used in the gene therapy method are preferably constructs that will not integrate into the host genome nor will they contain sequences that allow for replication. Any strong promoter known to those skilled in the art can be used for driving the expression of DNA. Unlike other gene therapy techniques, one major advantage of introducing naked nucleic acid sequences into target cells is the transitory nature of the polynucleotide synthesis in the cells. Studies have shown that non-replicating DNA sequences can be introduced into cells to provide production of the desired polypeptide for periods of up to six months.

[0731] The polynucleotide construct can be delivered to the interstitial space of tissues within an animal, including muscle, skin, brain, lung, liver, spleen, bone marrow, thymus, heart, lymph, blood, bone, cartilage, pancreas, kidney, gall bladder, stomach, intestine, testis, ovary, uterus, rectum, nervous system, eye, gland, and connective tissue. Interstitial space of the tissues comprises the intercellular fluid, mucopolysaccharide matrix among the reticular fibers of organ tissues, elastic fibers in the walls of vessels or chambers, collagen fibers of fibrous tissues, or that same matrix within connective tissue ensheathing muscle cells or in the lacunae of bone. It is similarly the space occupied by the plasma of the circulation and the lymph fluid of the lymphatic channels. Delivery to the interstitial space of muscle tissue is preferred for the reasons discussed below. They may be conveniently delivered by injection into the tissues comprising these cells. They are preferably delivered to and expressed in persistent, non-dividing cells which are differentiated, although delivery and expression may be achieved in non-differentiated or less completely differentiated cells, such as, for example, stem cells of blood or skin fibroblasts. In vivo muscle cells are particularly competent in their ability to take up and express polynucleotides.

[0732] For the naked polynucleotide injection, an effective dosage amount of DNA or RNA will be in the range of from about 0.05 g/kg body weight to about 50 mg/kg body weight. Preferably the dosage will be from about 0.005 mg/kg to about 20 mg/kg and more preferably from about 0.05 mg/kg to about 5 mg/kg. Of course, as the artisan of ordinary skill will appreciate, this dosage will vary according to the tissue site of injection. The appropriate and effective dosage of nucleic acid sequence can readily be determined by those of ordinary skill in the art and may depend on the condition being treated and the route of administration. The preferred route of administration is by the parenteral route of injection into the interstitial space of tissues. However, other parenteral routes may also be used, such as, inhalation of an aerosol formulation particularly for delivery to lungs or bronchial tissues, throat or mucous membranes of the nose. In addition, naked polynucleotide constructs can be delivered to arteries during angioplasty by the catheter used in the procedure.

[0733] The dose response effects of injected polynucleotide in muscle in vivo is determined as follows. Suitable template DNA for production of mRNA coding for polypeptide of the present invention is prepared in accordance with a standard recombinant DNA methodology. The template DNA, which may be either circular or linear, is either used as naked DNA or complexed with liposomes. The quadriceps muscles of mice are then injected with various amounts of the template DNA.

[0734] Five to six week old female and male Balb/C mice are anesthetized by intraperitoneal injection with 0.3 ml of 2.5% Avertin. A 1.5 cm incision is made on the anterior thigh, and the quadriceps muscle is directly visualized. The template DNA is injected in 0.1 ml of carrier in a 1 cc syringe through a 27 gauge needle over one minute, approximately 0.5 cm from the distal insertion site of the muscle into the knee and about 0.2 cm deep. A suture is placed over the injection site for future localization, and the skin is closed with stainless steel clips.

[0735] After an appropriate incubation time (e.g., 7 days) muscle extracts are prepared by excising the entire quadriceps. Every fifth 15 um cross-section of the individual quadriceps muscles is histochemically stained for protein expression. A time course for protein expression may be done in a similar fashion except that quadriceps from different mice are harvested at different times. Persistence of DNA in muscle following injection may be determined by Southern blot analysis after preparing total cellular DNA and HIRT supernatants from injected and control mice. The results of the above experimentation in mice can be used to extrapolate proper dosages and other treatment parameters in humans and other animals using naked DNA.

### Example 19

### Transgenic Animals

[0736] The polypeptides of the invention can also be expressed in transgenic animals. Animals of any species, including, but not limited to, mice, rats, rabbits, hamsters, guinea pigs, pigs, micro-pigs, goats, sheep, cows and non-human primates, e.g., baboons, monkeys, and chimpanzees may be used to generate transgenic animals. In a specific embodiment, techniques described herein or otherwise known in the art, are used to express polypeptides of the invention in humans, as part of a gene therapy protocol.

[0737] Any technique known in the art may be used to introduce the transgene (i.e., polynucleotides of the invention) into animals to produce the founder lines of transgenic animals. Such techniques include, but are not limited to, pronuclear microinjection (Paterson et al., Appl. Microbiol. Biotechnol. 40:691-698 (1994); Carver et al., Biotechnology (NY) 11:1263-1270 (1993); Wright et al., Biotechnology (NY) 9:830-834 (1991); and Hoppe et al., U.S. Pat. No. 4,873,191 (1989)); retrovirus mediated gene transfer into germ lines (Van der Putten et al., Proc. Natl. Acad. Sci., USA 82:6148-6152 (1985)), blastocysts or embryos; gene targeting in embryonic stem cells (Thompson et al., Cell 56:313-321 (1989)); electroporation of cells or embryos (Lo, 1983, Mol Cell. Biol. 3:1803-1814 (1983)); introduction of the polynucleotides of the invention using a gene gun (see, e.g., Ulmer et al., Science 259:1745 (1993); introducing nucleic acid constructs into embryonic pleuripotent stem cells and transferring the stem cells back into the blastocyst; and sperm-mediated gene transfer (Lavitrano et al., Cell 57:717-723 (1989); etc. For a review of such techniques, see Gordon, “Transgenic Animals,” Intl. Rev. Cytol. 115:171-229 (1989), which is incorporated by reference herein in its entirety.

[0738] Any technique known in the art may be used to produce transgenic clones containing polynucleotides of the invention, for example, nuclear transfer into enucleated oocytes of nuclei from cultured embryonic, fetal, or adult cells induced to quiescence (Campell et al., Nature 380:64-66 (1996); Wilmut et al., Nature 385:810-813 (1997)).

[0739] The present invention provides for transgenic animals that carry the transgene in all their cells, as well as animals which carry the transgene in some, but not all their cells, i.e., mosaic animals or chimeric. The transgene may be integrated as a single transgene or as multiple copies such as in concatamers, e.g., head-to-head tandems or head-to-tail tandems. The transgene may also be selectively introduced into and activated in a particular cell type by following, for example, the teaching of Lasko et al. (Lasko et al., Proc. Natl. Acad. Sci. USA 89:6232-6236 (1992)). The regulatory sequences required for such a cell-type specific activation will depend upon the particular cell type of interest, and will be apparent to those of skill in the art. When it is desired that the polynucleotide transgene be integrated into the chromosomal site of the endogenous gene, gene targeting is preferred. Briefly, when such a technique is to be utilized, vectors containing some nucleotide sequences homologous to the endogenous gene are designed for the purpose of integrating, via homologous recombination with chromosomal sequences, into and disrupting the function of the nucleotide sequence of the endogenous gene. The transgene may also be selectively introduced into a particular cell type, thus inactivating the endogenous gene in only that cell type, by following, for example, the teaching of Gu et al. (Gu et al., Science 265:103-106 (1994)). The regulatory sequences required for such a cell-type specific inactivation will depend upon the particular cell type of interest, and will be apparent to those of skill in the art.

[0740] Once transgenic animals have been generated, the expression of the recombinant gene may be assayed utilizing standard techniques. Initial screening may be accomplished by Southern blot analysis or PCR techniques to analyze animal tissues to verify that integration of the transgene has taken place. The level of mRNA expression of the transgene in the tissues of the transgenic animals may also be assessed using techniques which include, but are not limited to, Northern blot analysis of tissue samples obtained from the animal, in situ hybridization analysis, and reverse transcriptase-PCR (rt-PCR). Samples of transgenic gene-expressing tissue may also be evaluated immunocytochemically or immunohistochemically using antibodies specific for the transgene product.

[0741] Once the founder animals are produced, they may be bred, inbred, outbred, or crossbred to produce colonies of the particular animal. Examples of such breeding strategies include, but are not limited to: outbreeding of founder animals with more than one integration site in order to establish separate lines; inbreeding of separate lines in order to produce compound transgenics that express the transgene at higher levels because of the effects of additive expression of each transgene; crossing of heterozygous transgenic animals to produce animals homozygous for a given integration site in order to both augment expression and eliminate the need for screening of animals by DNA analysis; crossing of separate homozygous lines to produce compound heterozygous or homozygous lines; and breeding to place the transgene on a distinct background that is appropriate for an experimental model of interest.

[0742] Transgenic animals of the invention have uses which include, but are not limited to, animal model systems usefull in elaborating the biological function of polypeptides of the present invention, studying conditions and/or disorders associated with aberrant expression, and in screening for compounds effective in ameliorating such conditions and/or disorders.

### Example 20

### Knock-out Animals

[0743] Endogenous gene expression can also be reduced by inactivating or “knocking out” the gene and/or its promoter using targeted homologous recombination. (See e.g., Smithies et al., Nature 317:230-234 (1985); Thomas & Capecchi, Cell 51:503-512 (1987); Thompson et al., Cell 5:313-321 (1989); each of which is incorporated by reference herein in its entirety.) For example, a mutant, non-functional polynucleotide of the invention (or a completely unrelated DNA sequence) flanked by DNA homologous to the endogenous polynucleotide sequence (either the coding regions or regulatory regions of the gene) can be used, with or without a selectable marker and/or a negative selectable marker, to transfect cells that express polypeptides of the invention in vivo. In another embodiment, techniques known in the art are used to generate knockouts in cells that contain, but do not express the gene of interest. Insertion of the DNA construct, via targeted homologous recombination, results in inactivation of the targeted gene. Such approaches are particularly suited in research and agricultural fields where modifications to embryonic stem cells can be used to generate animal offspring with an inactive targeted gene (e.g., see Thomas & Capecchi 1987 and Thompson 1989, supra). However this approach can be routinely adapted for use in humans provided the recombinant DNA constructs are directly administered or targeted to the required site in vivo using appropriate viral vectors that will be apparent to those of skill in the art.

[0744] In further embodiments of the invention, cells that are genetically engineered to express the polypeptides of the invention, or alternatively, that are genetically engineered not to express the polypeptides of the invention (e.g., knockouts) are administered to a patient in vivo. Such cells may be obtained from the patient (i.e., animal, including human) or an MHC compatible donor and can include, but are not limited to fibroblasts, bone marrow cells, blood cells (e.g., lymphocytes), adipocytes, muscle cells, endothelial cells etc. The cells are genetically engineered in vitro using recombinant DNA techniques to introduce the coding sequence of polypeptides of the invention into the cells, or alternatively, to disrupt the coding sequence and/or endogenous regulatory sequence associated with the polypeptides of the invention, e.g., by transduction (using viral vectors, and preferably vectors that integrate the transgene into the cell genome) or transfection procedures, including, but not limited to, the use of plasmids, cosmids, YACs, naked DNA, electroporation, liposomes, etc. The coding sequence of the polypeptides of the invention can be placed under the control of a strong constitutive or inducible promoter or promoter/enhancer to achieve expression, and preferably secretion, of the polypeptides of the invention. The engineered cells which express and preferably secrete the polypeptides of the invention can be introduced into the patient systemically, e.g., in the circulation, or intraperitoneally.

[0745] Alternatively, the cells can be incorporated into a matrix and implanted in the body, e.g., genetically engineered fibroblasts can be implanted as part of a skin graft; genetically engineered endothelial cells can be implanted as part of a lymphatic or vascular graft. (See, for example, Anderson et al. U.S. Pat. No. 5,399,349; and Mulligan & Wilson, U.S. Pat. No. 5,460,959 each of which is incorporated by reference herein in its entirety).

[0746] When the cells to be administered are non-autologous or non-MHC compatible cells, they can be administered using well known techniques which prevent the development of a host immune response against the introduced cells. For example, the cells may be introduced in an encapsulated form which, while allowing for an exchange of components with the immediate extracellular environment, does not allow the introduced cells to be recognized by the host immune system.

[0747] Transgenic and “knock-out” animals of the invention have uses which include, but are not limited to, animal model systems useful in elaborating the biological function of polypeptides of the present invention, studying conditions and/or disorders associated with aberrant expression, and in screening for compounds effective in ameliorating such conditions and/or disorders.

### Example 21

### Assays Detecting Stimulation or Inhibition of B Cell Proliferation and Differentiation G

[0748] eneration of functional humoral immune responses requires both soluble and cognate signaling between B-lineage cells and their microenvironment. Signals may impart a positive stimulus that allows a B-lineage cell to continue its programmed development, or a negative stimulus that instructs the cell to arrest its current developmental pathway. To date, numerous stimulatory and inhibitory signals have been found to influence B cell responsiveness including IL-2, IL-4, IL-5, IL-6, IL-7, IL10, IL-13, IL-14 and IL-15. Interestingly, these signals are by themselves weak effectors but can, in combination with various co-stimulatory proteins, induce activation, proliferation, differentiation, homing, tolerance and death among B cell populations.

[0749] One of the best studied classes of B-cell co-stimulatory proteins is the TNF-superfamily. Within this family CD40, CD27, and CD30 along with their respective ligands CD154, CD70, and CD153 have been found to regulate a variety of immune responses. Assays which allow for the detection and/or observation of the proliferation and differentiation of these B-cell populations and their precursors are valuable tools in determining the effects various proteins may have on these B-cell populations in terms of proliferation and differentiation. Listed below are two assays designed to allow for the detection of the differentiation, proliferation, or inhibition of B-cell populations and their precursors.

[0750] In vitro Assay—Agonists or antagonists of the invention can be assessed for its ability to induce activation, proliferation, differentiation or inhibition and/or death in B-cell populations and their precursors. The activity of the agonists or antagonists of the invention on purified human tonsillar B cells, measured qualitatively over the dose range from 0.1 to 10,000 ng/mL, is assessed in a standard B-lymphocyte co-stimulation assay in which purified tonsillar B cells are cultured in the presence of either formalin-fixed Staphylococcus aureus Cowan I (SAC) or immobilized anti-human IgM antibody as the priming agent. Second signals such as IL-2 and IL-15 synergize with SAC and IgM crosslinking to elicit B cell proliferation as measured by tritiated-thymidine incorporation. Novel synergizing agents can be readily identified using this assay. The assay involves isolating human tonsillar B cells by magnetic bead (MACS) depletion of CD3-positive cells. The resulting cell population is greater than 95% B cells as assessed by expression of CD45R(B220).

[0751] Various dilutions of each sample are placed into individual wells of a 96-well plate to which are added 10⁵ B-cells suspended in culture medium (RPMI 1640 containing 10% FBS, 5×10⁻⁵M 2ME, 100 U/ml penicillin, 10 ug/ml streptomycin, and 10⁻⁵ dilution of SAC) in a total volume of 150 ul. Proliferation or inhibition is quantitated by a 20 h pulse (1 uCi/well) with 3H-thymidine (6.7 Ci/mM) beginning 72 h post factor addition. The positive and negative controls are IL2 and medium respectively.

[0752] In vivo Assay—BALB/c mice are injected (i.p.) twice per day with buffer only, or 2 mg/Kg of agonists or antagonists of the invention, or truncated forms thereof. Mice receive this treatment for 4 consecutive days, at which time they are sacrificed and various tissues and serum collected for analyses. Comparison of H&E sections from normal spleens and spleens treated with agonists or antagonists of the invention identify the results of the activity of the agonists or antagonists on spleen cells, such as the diffusion of peri-arterial lymphatic sheaths, and/or significant increases in the nucleated cellularity of the red pulp regions, which may indicate the activation of the differentiation and proliferation of B-cell populations. Immunohistochemical studies using a B cell marker, anti-CD45R(B220), are used to determine whether any physiological changes to splenic cells, such as splenic disorganization, are due to increased B-cell representation within loosely defined B-cell zones that infiltrate established T-cell regions.

[0753] Flow cytometric analyses of the spleens from mice treated with agonist or antagonist is used to indicate whether the agonists or antagonists specifically increases the proportion of ThB+, CD45R(B220)dull B cells over that which is observed in control mice.

[0754] Likewise, a predicted consequence of increased mature B-cell representation in vivo is a relative increase in serum Ig titers. Accordingly, serum IgM and IgA levels are compared between buffer and agonists or antagonists-treated mice.

[0755] The studies described in this example tested activity of agonists or antagonists of the invention. However, one skilled in the art could easily modify the exemplified studies to test the activity of polynucleotides or polypeptides of the invention (e.g., gene therapy).

### Example 22

### T Cell Proliferation Assay

[0756] A CD3-induced proliferation assay is performed on PBMCs and is measured by the uptake of ³H-thymidine. The assay is performed as follows. Ninety-six well plates are coated with 100 μl/well of mAb to CD3 (HIT3a, Pharmingen) or isotype-matched control mAb (B33.1) overnight at 4 degrees C. (1 μg/ml in 0.05M bicarbonate buffer, pH 9.5), then washed three times with PBS. PBMC are isolated by F/H gradient centrifugation from human peripheral blood and added to quadruplicate wells (5×10⁴/well) of mAb coated plates in RPMI containing 10% FCS and P/S in the presence of varying concentrations of agonists or antagonists of the invention (total volume 200 ul). Relevant protein buffer and medium alone are controls. After 48 hr. culture at 37 degrees C., plates are spun for 2 min. at 1000 rpm and 100 μl of supernatant is removed and stored −20 degrees C. for measurement of IL-2 (or other cytokines) if effect on proliferation is observed. Wells are supplemented with 100 ul of medium containing 0.5 uCi of ³H-thymidine and cultured at 37 degrees C. for 18-24 hr. Wells are harvested and incorporation of ³H-thymidine used as a measure of proliferation. Anti-CD3 alone is the positive control for proliferation. IL-2 (100 U/ml) is also used as a control which enhances proliferation. Control antibody which does not induce proliferation of T cells is used as the negative control for the effects of agonists or antagonists of the invention.

[0757] The studies described in this example tested activity of agonists or antagonists of the invention. However, one skilled in the art could easily modify the exemplified studies to test the activity of polynucleotides or polypeptides of the invention (e.g., gene therapy).

### Example 23

### Effect of Agonists or Antagonists of the Invention on the Expression of MHC Class II, Costimulatory and Adhesion Molecules and Cell Differentiation of Monocytes and Monocyte-derived Human Dendritic Cells

[0758] Dendritic cells are generated by the expansion of proliferating precursors found in the peripheral blood: adherent PBMC or elutriated monocytic fractions are cultured for 7-10 days with GM-CSF (50 ng/ml) and IL-4 (20 ng/ml). These dendritic cells have the characteristic phenotype of immature cells (expression of CD1, CD80, CD86, CD40 and MHC class II antigens). Treatment with activating factors, such as TNF-α, causes a rapid change in surface phenotype (increased expression of MHC class I and II, costimulatory and adhesion molecules, downregulation of FCγRII, upregulation of CD83). These changes correlate with increased antigen-presenting capacity and with functional maturation of the dendritic cells.

[0759] FACS analysis of surface antigens is performed as follows. Cells are treated 1-3 days with increasing concentrations of agonist or antagonist of the invention or LPS (positive control), washed with PBS containing 1% BSA and 0.02 mM sodium azide, and then incubated with 1:20 dilution of appropriate FITC- or PE-labeled monoclonal antibodies for 30 minutes at 4 degrees C. After an additional wash, the labeled cells are analyzed by flow cytometry on a FACScan (Becton Dickinson).

[0760] Effect on the Production of Cytokines.

[0761] Cytokines generated by dendritic cells, in particular IL-12, are important in the initiation of T-cell dependent immune responses. IL-12 strongly influences the development of Thl helper T-cell immune response, and induces cytotoxic T and NK cell function. An ELISA is used to measure the IL-12 release as follows. Dendritic cells (10⁶/ml) are treated with increasing concentrations of agonists or antagonists of the invention for 24 hours. LPS (100 ng/ml) is added to the cell culture as positive control. Supernatants from the cell cultures are then collected and analyzed for IL-12 content using commercial ELISA kit (e.g., R & D Systems (Minneapolis, Minn.)). The standard protocols provided with the kits are used.

[0762] Effect on the Expression of MHC Class II, Costimulatory and Adhesion Molecules.

[0763] Three major families of cell surface antigens can be identified on monocytes: adhesion molecules, molecules involved in antigen presentation, and Fc receptor. Modulation of the expression of MHC class II antigens and other costimulatory molecules, such as B7 and ICAM-1, may result in changes in the antigen presenting capacity of monocytes and ability to induce T cell activation. Increased expression of Fc receptors may correlate with improved monocyte cytotoxic activity, cytokine release and phagocytosis.

[0764] FACS analysis is used to examine the surface antigens as follows. Monocytes are treated 1-5 days with increasing concentrations of agonists or antagonists of the invention or LPS (positive control), washed with PBS containing 1% BSA and 0.02 mM sodium azide, and then incubated with 1:20 dilution of appropriate FITC- or PE-labeled monoclonal antibodies for 30 minutes at 4 degrees C. After an additional wash, the labeled cells are analyzed by flow cytometry on a FACScan (Becton Dickinson).

[0765] Monocyte Activation and/or Increased Survival.

[0766] Assays for molecules that activate (or alternatively, inactivate) monocytes and/or increase monocyte survival (or alternatively, decrease monocyte survival) are known in the art and may routinely be applied to determine whether a molecule of the invention functions as an inhibitor or activator of monocytes. Agonists or antagonists of the invention can be screened using the three assays described below. For each of these assays, Peripheral blood mononuclear cells (PBMC) are purified from single donor leukopacks (American Red Cross, Baltimore, Md.) by centrifugation through a Histopaque gradient (Sigma). Monocytes are isolated from PBMC by counterflow centrifugal elutriation.

[0767] Monocyte Survival Assay.

[0768] Human peripheral blood monocytes progressively lose viability when cultured in absence of serum or other stimuli. Their death results from internally regulated processes (apoptosis). Addition to the culture of activating factors, such as TNF-alpha dramatically improves cell survival and prevents DNA fragmentation. Propidium iodide (PI) staining is used to measure apoptosis as follows. Monocytes are cultured for 48 hours in polypropylene tubes in serum-free medium (positive control), in the presence of 100 ng/ml TNF-alpha (negative control), and in the presence of varying concentrations of the compound to be tested. Cells are suspended at a concentration of 2×10⁶/ml in PBS containing PI at a final concentration of 5 μg/ml, and then incubated at room temperature for 5 minutes before FACScan analysis. PI uptake has been demonstrated to correlate with DNA fragmentation in this experimental paradigm.

[0769] Effect on Cytokine Release.

[0770] An important function of monocytes/macrophages is their regulatory activity on other cellular populations of the immune system through the release of cytokines after stimulation. An ELISA to measure cytokine release is performed as follows. Human monocytes are incubated at a density of 5×10⁵ cells/ml with increasing concentrations of agonists or antagonists of the invention and under the same conditions, but in the absence of agonists or antagonists. For IL-12 production, the cells are primed overnight with IFN (100 U/ml) in the presence of agonist or antagonist of the invention. LPS (10 ng/ml) is then added. Conditioned media are collected after 24 h and kept frozen until use. Measurement of TNF-alpha, IL-10, MCP-1 and IL-8 is then performed using a commercially available ELISA kit (e.g., R & D Systems (Minneapolis, Minn.)) and applying the standard protocols provided with the kit.

[0771] Oxidative Burst.

[0772] Purified monocytes are plated in 96-w plate at 2-1×10⁵ cell/well. Increasing concentrations of agonists or antagonists of the invention are added to the wells in a total volume of 0.2 ml culture medium (RPMI 1640+10% FCS, glutamine and antibiotics). After 3 days incubation, the plates are centrifuged and the medium is removed from the wells. To the macrophage monolayers, 0.2 ml per well of phenol red solution (140 mM NaCl, 10 mM potassium phosphate buffer pH 7.0, 5.5 mM dextrose, 0.56 mM phenol red and 19 U/ml of HRPO) is added, together with the stimulant (200 nM PMA). The plates are incubated at 37° C. for 2 hours and the reaction is stopped by adding 20 μl 1N NaOH per well. The absorbance is read at 610 nm. To calculate the amount of H₂O₂ produced by the macrophages, a standard curve of a H₂O₂ solution of known molarity is performed for each experiment.

[0773] The studies described in this example tested activity of agonists or antagonists of the invention. However, one skilled in the art could easily modify the exemplified studies to test the activity of polynucleotides or polypeptides of the invention (e.g., gene therapy).

### Example 24

### Biological Effects of Agonists or Antagonists of the Invention

[0774] Astrocyte and Neuronal Assays

[0775] Agonists or antagonists of the invention, expressed in Escherichia coli and purified as described above, can be tested for activity in promoting the survival, neurite outgrowth, or phenotypic differentiation of cortical neuronal cells and for inducing the proliferation of glial fibrillary acidic protein immunopositive cells, astrocytes. The selection of cortical cells for the bioassay is based on the prevalent expression of FGF-1 and FGF-2 in cortical structures and on the previously reported enhancement of cortical neuronal survival resulting from FGF-2 treatment. A thymidine incorporation assay, for example, can be used to elucidate an agonist or antagonist of the invention's activity on these cells.

[0776] Moreover, previous reports describing the biological effects of FGF-2 (basic FGF) on cortical or hippocampal neurons in vitro have demonstrated increases in both neuron survival and neurite outgrowth (Walicke et al., “Fibroblast growth factor promotes survival of dissociated hippocampal neurons and enhances neurite extension.” Proc. Natl. Acad. Sci. USA 83:3012-3016. (1986), assay herein incorporated by reference in its entirety). However, reports from experiments done on PC-12 cells suggest that these two responses are not necessarily synonymous and may depend on not only which FGF is being tested but also on which receptor(s) are expressed on the target cells. Using the primary cortical neuronal culture paradigm, the ability of an agonist or antagonist of the invention to induce neurite outgrowth can be compared to the response achieved with FGF-2 using, for example, a thymidine incorporation assay.

[0777] Fibroblast and Endothelial Cell Assays

[0778] Human lung fibroblasts are obtained from Clonetics (San Diego, Calif.) and maintained in growth media from Clonetics. Dermal microvascular endothelial cells are obtained from Cell Applications (San Diego, Calif.). For proliferation assays, the human lung fibroblasts and dermal microvascular endothelial cells can be cultured at 5,000 cells/well in a 96-well plate for one day in growth medium. The cells are then incubated for one day in 0. 1% BSA basal medium. After replacing the medium with fresh 0.1% BSA medium, the cells are incubated with the test proteins for 3 days. Alamar Blue (Alamar Biosciences, Sacramento, Calif.) is added to each well to a final concentration of 10%. The cells are incubated for 4 hr. Cell viability is measured by reading in a CytoFluor fluorescence reader. For the PGE₂ assays, the human lung fibroblasts are cultured at 5,000 cells/well in a 96-well plate for one day. After a medium change to 0.1% BSA basal medium, the cells are incubated with FGF-2 or agonists or antagonists of the invention with or without IL-1α for 24 hours. The supernatants are collected and assayed for PGE₂ by EIA kit (Cayman, Ann Arbor, Mich.). For the IL-6 assays, the human lung fibroblasts are cultured at 5,000 cells/well in a 96-well plate for one day. After a medium change to 0.1% BSA basal medium, the cells are incubated with FGF-2 or with or without agonists or antagonists of the invention IL-1α for 24 hours. The supernatants are collected and assayed for IL-6 by ELISA kit (Endogen, Cambridge, Mass.).

[0779] Human lung fibroblasts are cultured with FGF-2 or agonists or antagonists of the invention for 3 days in basal medium before the addition of Alamar Blue to assess effects on growth of the fibroblasts. FGF-2 should show a stimulation at 10-2500 ng/ml which can be used to compare stimulation with agonists or antagonists of the invention.

[0780] Parkinson Models.

[0781] The loss of motor function in Parkinson's disease is attributed to a deficiency of striatal dopamine resulting from the degeneration of the nigrostriatal dopaminergic projection neurons. An animal model for Parkinson's that has been extensively characterized involves the systemic administration of 1-methyl-4 phenyl 1,2,3,6-tetrahydropyridine (MPTP). In the CNS, MPTP is taken-up by astrocytes and catabolized by monoamine oxidase B to 1-methyl-4-phenyl pyridine (MPP⁺) and released. Subsequently, MPP⁺ is actively accumulated in dopaminergic neurons by the high-affinity reuptake transporter for dopamine. MPP⁺ is then concentrated in mitochondria by the electrochemical gradient and selectively inhibits nicotidamide adenine disphosphate: ubiquinone oxidoreductionase (complex I), thereby interfering with electron transport and eventually generating oxygen radicals.

[0782] It has been demonstrated in tissue culture paradigms that FGF-2 (basic FGF) has trophic activity towards nigral dopaminergic neurons (Ferrari et al., Dev. Biol. 1989). Recently, Dr. Unsicker's group has demonstrated that administering FGF-2 in gel foam implants in the striatum results in the near complete protection of nigral dopaminergic neurons from the toxicity associated with MPTP exposure (Otto and Unsicker, J. Neuroscience, 1990).

[0783] Based on the data with FGF-2, agonists or antagonists of the invention can be evaluated to determine whether it has an action similar to that of FGF-2 in enhancing dopaminergic neuronal survival in vitro and it can also be tested in vivo for protection of dopaminergic neurons in the striatum from the damage associated with MPTP treatment. The potential effect of an agonist or antagonist of the invention is first examined in vitro in a dopaminergic neuronal cell culture paradigm. The cultures are prepared by dissecting the midbrain floor plate from gestation day 14 Wistar rat embryos. The tissue is dissociated with trypsin and seeded at a density of 200,000 cells/cm² on polyorthinine-laminin coated glass coverslips. The cells are maintained in Dulbecco's Modified Eagle's medium and F12 medium containing hormonal supplements (N1). The cultures are fixed with paraformaldehyde after 8 days in vitro and are processed for tyrosine hydroxylase, a specific marker for dopaminergic neurons, immunohistochemical staining. Dissociated cell cultures are prepared from embryonic rats. The culture medium is changed every third day and the factors are also added at that time.

[0784] Since the dopaminergic neurons are isolated from animals at gestation day 14, a developmental time which is past the stage when the dopaminergic precursor cells are proliferating, an increase in the number of tyrosine hydroxylase immunopositive neurons would represent an increase in the number of dopaminergic neurons surviving in vitro. Therefore, if an agonist or antagonist of the invention acts to prolong the survival of dopaminergic neurons, it would suggest that the agonist or antagonist may be involved in Parkinson's Disease.

[0785] The studies described in this example tested activity of agonists or antagonists of the invention. However, one skilled in the art could easily modify the exemplified studies to test the activity of polynucleotides or polypeptides of the invention (e.g., gene therapy).

### Example 25

### The Effect of Agonists or Antagonists of the Invention on the Growth of Vascular Endothelial Cells

[0786] On day 1, human umbilical vein endothelial cells (HUVEC) are seeded at 2-5×10⁴ cells/35 mm dish density in M199 medium containing 4% fetal bovine serum (FBS), 16 units/ml heparin, and 50 units/ml endothelial cell growth supplements (ECGS, Biotechnique, Inc.). On day 2, the medium is replaced with M199 containing 10% FBS, 8 units/ml heparin. An agonist or antagonist of the invention, and positive controls, such as VEGF and basic FGF (bFGF) are added, at varying concentrations. On days 4 and 6, the medium is replaced. On day 8, cell number is determined with a Coulter Counter.

[0787] An increase in the number of HUVEC cells indicates that the compound of the invention may proliferate vascular endothelial cells, while a decrease in the number of HUVEC cells indicates that the compound of the invention inhibits vascular endothelial cells.

[0788] The studies described in this example tested activity of a polypeptide of the invention. However, one skilled in the art could easily modify the exemplified studies to test the activity of polynucleotides (e.g., gene therapy), agonists, and/or antagonists of the invention.

### Example 26

### Rat Corneal Wound Healing Model

[0789] This animal model shows the effect of an agonist or antagonist of the invention on neovascularization. The experimental protocol includes:

[0790] Making a 1-1.5 mm long incision from the center of cornea into the stromal layer.

[0791] Inserting a spatula below the lip of the incision facing the outer comer of the eye.

[0792] Making a pocket (its base is 1-1.5 mm form the edge of the eye).

[0793] Positioning a pellet, containing 50 ng- 5 ug of an agonist or antagonist of the invention, within the pocket.

[0794] Treatment with an agonist or antagonist of the invention can also be applied topically to the corneal wounds in a dosage range of 20 mg -500 mg (daily treatment for five days).

[0795] The studies described in this example tested activity of agonists or antagonists of the invention. However, one skilled in the art could easily modify the exemplified studies to test the activity of polynucleotides or polypeptides of the invention (e.g., gene therapy).

### Example 27

### Diabetic Mouse and Glucocorticoid-impaired Wound Healing Models

[0796] Diabetic db+/db+Mouse Model.

[0797] To demonstrate that an agonist or antagonist of the invention accelerates the healing process, the genetically diabetic mouse model of wound healing is used. The full thickness wound healing model in the db+/db+mouse is a well characterized, clinically relevant and reproducible model of impaired wound healing. Healing of the diabetic wound is dependent on formation of granulation tissue and re-epithelialization rather than contraction (Gartner, M. H. et al., J. Surg. Res. 52:389 (1992); Greenhalgh, D. G. et al, Am. J. Pathol. 136:1235 (1990)).

[0798] The diabetic animals have many of the characteristic features observed in Type II diabetes mellitus. Homozygous (db+/db+) mice are obese in comparison to their normal heterozygous (db+/+m) littermates. Mutant diabetic (db+/db+) mice have a single autosomal recessive mutation on chromosome 4 (db+) (Coleman et al. Proc. NatL Acad. Sci. USA 77:283-293 (1982)). Animals show polyphagia, polydipsia and polyuria. Mutant diabetic mice (db+/db+) have elevated blood glucose, increased or normal insulin levels, and suppressed cell-mediated immunity (Mandel et al., J. Immunol. 120:1375 (1978); Debray-Sachs, M. et al., Clin. Exp. Immunol. 51(1):1-7 (1983); Leiter et al., Am. J. of Pathol. 114:46-55 (1985)). Peripheral neuropathy, myocardial complications, and microvascular lesions, basement membrane thickening and glomerular filtration abnormalities have been described in these animals (Norido, F. et al., Exp. Neurol. 83(2):221-232 (1984); Robertson et al., Diabetes 29(1):60-67 (1980); Giacomelli et al., Lab Invest. 40(4):460-473 (1979); Coleman, D. L., Diabetes 31 (Suppl):1-6-(1982)). These homozygous diabetic mice develop hyperglycemia that is resistant to insulin analogous to human type II diabetes (Mandel et al., J. Immunol. 120:1375-1377 (1978)).

[0799] The characteristics observed in these animals suggests that healing in this model may be similar to the healing observed in human diabetes (Greenhalgh, et al., Am. J. of Pathol. 136:1235-1246 (1990)).

[0800] Genetically diabetic female C57BL/KsJ (db+/db+) mice and their non-diabetic (db+/+m) heterozygous littermates are used in this study (Jackson Laboratories). The animals are purchased at 6 weeks of age and are 8 weeks old at the beginning of the study. Animals are individually housed and received food and water ad libitum. All manipulations are performed using aseptic techniques. The experiments are conducted according to the rules and guidelines of Human Genome Sciences, Inc. Institutional Animal Care and Use Committee and the Guidelines for the Care and Use of Laboratory Animals.

[0801] Wounding protocol is performed according to previously reported methods (Tsuboi, R. and Rifkin, D. B., J. Exp. Med. 172:245-251 (1990)). Briefly, on the day of wounding, animals are anesthetized with an intraperitoneal injection of Avertin (0.01 mg/mL), 2,2,2-tribromoethanol and 2-methyl-2-butanol dissolved in deionized water. The dorsal region of the animal is shaved and the skin washed with 70% ethanol solution and iodine. The surgical area is dried with sterile gauze prior to wounding. An 8 mm full-thickness wound is then created using a Keyes tissue punch. Immediately following wounding, the surrounding skin is gently stretched to eliminate wound expansion. The wounds are left open for the duration of the experiment. Application of the treatment is given topically for 5 consecutive days commencing on the day of wounding. Prior to treatment, wounds are gently cleansed with sterile saline and gauze sponges.

[0802] Wounds are visually examined and photographed at a fixed distance at the day of surgery and at two day intervals thereafter. Wound closure is determined by daily measurement on days 1-5 and on day 8. Wounds are measured horizontally and vertically using a calibrated Jameson caliper. Wounds are considered healed if granulation tissue is no longer visible and the wound is covered by a continuous epithelium.

[0803] An agonist or antagonist of the invention is administered using at a range different doses, from 4 mg to 500 mg per wound per day for 8 days in vehicle. Vehicle control groups received 50 mL of vehicle solution.

[0804] Animals are euthanized on day 8 with an intraperitoneal injection of sodium pentobarbital (300 mg/kg). The wounds and surrounding skin are then harvested for histology and immunohistochemistry. Tissue specimens are placed in 10% neutral buffered formalin in tissue cassettes between biopsy sponges for further processing.

[0805] Three groups of 10 animals each (5 diabetic and 5 non-diabetic controls) are evaluated: 1) Vehicle placebo control, 2) untreated group, and 3) treated group.

[0806] Wound closure is analyzed by measuring the area in the vertical and horizontal axis and obtaining the total square area of the wound. Contraction is then estimated by establishing the differences between the initial wound area (day 0) and that of post treatment (day 8). The wound area on day 1 is 64 mm², the corresponding size of the dermal punch.

[0807] Calculations are made using the following formula:

[Open area on day 8]−[Open area on day 1]/[Open area on day 1]

[0808] Specimens are fixed in 10% buffered formalin and paraffin embedded blocks are sectioned perpendicular to the wound surface (5 mm) and cut using a Reichert-Jung microtome. Routine hematoxylin-eosin (H&E) staining is performed on cross-sections of bisected wounds. Histologic examination of the wounds are used to assess whether the healing process and the morphologic appearance of the repaired skin is altered by treatment with an agonist or antagonist of the invention. This assessment included verification of the presence of cell accumulation, inflammatory cells, capillaries, fibroblasts, re-epithelialization and epidermal maturity (Greenhalgh, D. G. et al., Am. J Pathol. 136:1235 (1990)). A calibrated lens micrometer is used by a blinded observer.

[0809] Tissue sections are also stained immunohistochemically with a polyclonal rabbit anti-human keratin antibody using ABC Elite detection system. Human skin is used as a positive tissue control while non-immune IgG is used as a negative control. Keratinocyte growth is determined by evaluating the extent of reepithelialization of the wound using a calibrated lens micrometer.

[0810] Proliferating cell nuclear antigen/cyclin (PCNA) in skin specimens is demonstrated by using anti-PCNA antibody (1:50) with an ABC Elite detection system. Human colon cancer served as a positive tissue control and human brain tissue is used as a negative tissue control. Each specimen included a section with omission of the primary antibody and substitution with non-immune mouse IgG. Ranking of these sections is based on the extent of proliferation on a scale of 0-8, the lower side of the scale reflecting slight proliferation to the higher side reflecting intense proliferation.

[0811] Experimental data are analyzed using an unpaired t test. A p value of <0.05 is considered significant.

[0812] Steroid Impaired Rat Model

[0813] The inhibition of wound healing by steroids has been well documented in various in vitro and in vivo systems (Wahl, Glucocorticoids and Wound healing. In: Anti-Inflammatory Steroid Action: Basic and Clinical Aspects. 280-302 (1989); Wahl et al., J. Immunol. 115: 476-481 (1975); Werb et al., J. Exp. Med. 147:1684-1694 (1978)). Glucocorticoids retard wound healing by inhibiting angiogenesis, decreasing vascular permeability (Ebert et al., An. Intern. Med. 37:701-705 (1952)), fibroblast proliferation, and collagen synthesis (Beck et al., Growth Factors. 5: 295-304 (1991); Haynes et al., J Clin. Invest. 61: 703-797 (1978)) and producing a transient reduction of circulating monocytes (Haynes et al., J. Clin. Invest. 61: 703-797 (1978); Wahl, “Glucocorticoids and wound healing”, In: Antiinflammatory Steroid Action: Basic and Clinical Aspects, Academic Press, New York, pp. 280-302 (1989)). The systemic administration of steroids to impaired wound healing is a well establish phenomenon in rats (Beck et al., Growth Factors. 5: 295-304 (1991); Haynes et al., J. Clin. Invest. 61: 703-797 (1978); Wahl, “Glucocorticoids and wound healing”, In: Antiinflammatory Steroid Action: Basic and Clinical Aspects, Academic Press, New York, pp. 280-302 (1989); Pierce et al., Proc. Natl. Acad. Sci. USA 86: 2229-2233 (1989)).

[0814] To demonstrate that an agonist or antagonist of the invention can accelerate the healing process, the effects of multiple topical applications of the agonist or antagonist on full thickness excisional skin wounds in rats in which healing has been impaired by the systemic administration of methylprednisolone is assessed.

[0815] Young adult male Sprague Dawley rats weighing 250-300 g (Charles River Laboratories) are used in this example. The animals are purchased at 8 weeks of age and are 9 weeks old at the beginning of the study. The healing response of rats is impaired by the systemic administration of methylprednisolone (17 mg/kg/rat intramuscularly) at the time of wounding. Animals are individually housed and received food and water ad libitum. All manipulations are performed using aseptic techniques. This study is conducted according to the rules and guidelines of Human Genome Sciences, Inc. Institutional Animal Care and Use Committee and the Guidelines for the Care and Use of Laboratory Animals.

[0816] The wounding protocol is followed according to section A, above. On the day of wounding, animals are anesthetized with an intramuscular injection of ketamine (50 mg/kg) and xylazine (5 mg/kg). The dorsal region of the animal is shaved and the skin washed with 70% ethanol and iodine solutions. The surgical area is dried with sterile gauze prior to wounding. An 8 mm full-thickness wound is created using a Keyes tissue punch. The wounds are left open for the duration of the experiment. Applications of the testing materials are given topically once a day for 7 consecutive days commencing on the day of wounding and subsequent to methylprednisolone administration. Prior to treatment, wounds are gently cleansed with sterile saline and gauze sponges.

[0817] Wounds are visually examined and photographed at a fixed distance at the day of wounding and at the end of treatment. Wound closure is determined by daily measurement on days 1-5 and on day 8. Wounds are measured horizontally and vertically using a calibrated Jameson caliper. Wounds are considered healed if granulation tissue is no longer visible and the wound is covered by a continuous epithelium.

[0818] The agonist or antagonist of the invention is administered using at a range different doses, from 4 mg to 500 mg per wound per day for 8 days in vehicle. Vehicle control groups received 50 mL of vehicle solution.

[0819] Animals are euthanized on day 8 with an intraperitoneal injection of sodium pentobarbital (300 mg/kg). The wounds and surrounding skin are then harvested for histology. Tissue specimens are placed in 10% neutral buffered formalin in tissue cassettes between biopsy sponges for further processing.

[0820] Three groups of 10 animals each (5 with methylprednisolone and 5 without glucocorticoid) are evaluated: 1) Untreated group 2) Vehicle placebo control 3) treated groups.

[0821] Wound closure is analyzed by measuring the area in the vertical and horizontal axis and obtaining the total area of the wound. Closure is then estimated by establishing the differences between the initial wound area (day 0) and that of post treatment (day 8). The wound area on day 1 is 64 mm², the corresponding size of the dermal punch. Calculations are made using the following formula:

[Open area on day 8]−[Open area on day 1]/[Open area on day 1]

[0822] Specimens are fixed in 10% buffered formalin and paraffin embedded blocks are sectioned perpendicular to the wound surface (5 mm) and cut using an Olympus microtome. Routine hematoxylin-eosin (H&E) staining is performed on cross-sections of bisected wounds. Histologic examination of the wounds allows assessment of whether the healing process and the morphologic appearance of the repaired skin is improved by treatment with an agonist or antagonist of the invention. A calibrated lens micrometer is used by a blinded observer to determine the distance of the wound gap.

[0823] Experimental data are analyzed using an unpaired t test. A p value of <0.05 is considered significant.

[0824] The studies described in this example tested activity of agonists or antagonists of the invention. However, one skilled in the art could easily modify the exemplified studies to test the activity of polynucleotides or polypeptides of the invention (e.g., gene therapy).

### Example 28

### Lymphadema Animal Model

[0825] The purpose of this experimental approach is to create an appropriate and consistent lymphedema model for testing the therapeutic effects of an agonist or antagonist of the invention in lymphangiogenesis and re-establishment of the lymphatic circulatory system in the rat hind limb. Effectiveness is measured by swelling volume of the affected limb, quantification of the amount of lymphatic vasculature, total blood plasma protein, and histopathology. Acute lymphedema is observed for 7-10 days. Perhaps more importantly, the chronic progress of the edema is followed for up to 3-4 weeks.

[0826] Prior to beginning surgery, blood sample is drawn for protein concentration analysis. Male rats weighing approximately ˜350 g are dosed with Pentobarbital. Subsequently, the right legs are shaved from knee to hip. The shaved area is swabbed with gauze soaked in 70% EtOH. Blood is drawn for serum total protein testing. Circumference and volumetric measurements are made prior to injecting dye into paws after marking 2 measurement levels (0.5 cm above heel, at mid-pt of dorsal paw). The intradermal dorsum of both right and left paws are injected with 0.05 ml of 1% Evan's Blue. Circumference and volumetric measurements are then made following injection of dye into paws.

[0827] Using the knee joint as a landmark, a mid-leg inguinal incision is made circumferentially allowing the femoral vessels to be located. Forceps and hemostats are used to dissect and separate the skin flaps. After locating the femoral vessels, the lymphatic vessel that runs along side and underneath the vessel(s) is located. The main lymphatic vessels in this area are then electrically coagulated or suture ligated.

[0828] Using a microscope, muscles in back of the leg (near the semitendinosis and adductors) are bluntly dissected. The popliteal lymph node is then located. The 2 proximal and 2 distal lymphatic vessels and distal blood supply of the popliteal node are then ligated by suturing. The popliteal lymph node, and any accompanying adipose tissue, is then removed by cutting connective tissues.

[0829] Care is taken to control any mild bleeding resulting from this procedure. After lymphatics are occluded, the skin flaps are sealed by using liquid skin (Vetbond) (AJ Buck). The separated skin edges are sealed to the underlying muscle tissue while leaving a gap of ˜0.5 cm around the leg. Skin also may be anchored by suturing to underlying muscle when necessary.

[0830] To avoid infection, animals are housed individually with mesh (no bedding). Recovering animals are checked daily through the optimal edematous peak, which typically occurred by day 5-7. The plateau edematous peak are then observed. To evaluate the intensity of the lymphedema, the circumference and volumes of 2 designated places on each paw before operation and daily for 7 days are measured. The effect of plasma proteins on lymphedema is determined and whether protein analysis is a useful testing perimeter is also investigated. The weights of both control and edematous limbs are evaluated at 2 places. Analysis is performed in a blind manner.

[0831] Circumference Measurements:

[0832] Under brief gas anesthetic to prevent limb movement, a cloth tape is used to measure limb circumference. Measurements are done at the ankle bone and dorsal paw by 2 different people and those 2 readings are averaged. Readings are taken from both control and edematous limbs.

[0833] Volumetric Measurements:

[0834] On the day of surgery, animals are anesthetized with Pentobarbital and are tested prior to surgery. For daily volumetrics animals are under brief halothane anesthetic (rapid immobilization and quick recovery), and both legs are shaved and equally marked using waterproof marker on legs. Legs are first dipped in water, then dipped into instrument to each marked level, then measured by Buxco edema software(Chen/Victor). Data is recorded by one person, while the other is dipping the limb to marked area.

[0835] Blood-plasma Protein Measurements:

[0836] Blood is drawn, spun, and serum separated prior to surgery and then at conclusion for total protein and Ca²⁺ comparison.

[0837] Limb Weight Comparison:

[0838] After drawing blood, the animal is prepared for tissue collection. The limbs are amputated using a quillitine, then both experimental and control legs are cut at the ligature and weighed. A second weighing is done as the tibio-cacaneal joint is disarticulated and the foot is weighed.

[0839] Histological Preparations:

[0840] The transverse muscle located behind the knee (popliteal) area is dissected and arranged in a metal mold, filled with freezeGel, dipped into cold methylbutane, placed into labeled sample bags at −80EC until sectioning. Upon sectioning, the muscle is observed under fluorescent microscopy for lymphatics.

[0841] The studies described in this example tested activity of agonists or antagonists of the invention. However, one skilled in the art could easily modify the exemplified studies to test the activity of polynucleotides or polypeptides of the invention (e.g., gene therapy).

### Example 29

### Suppression of TNF Alpha-induced Adhesion Molecule Expression by a Agonist or Antagonist of the Invention

[0842] The recruitment of lymphocytes to areas of inflammation and angiogenesis involves specific receptor-ligand interactions between cell surface adhesion molecules (CAMs) on lymphocytes and the vascular endothelium. The adhesion process, in both normal and pathological settings, follows a multi-step cascade that involves intercellular adhesion molecule-1 (ICAM-1), vascular cell adhesion molecule-1 (VCAM-1), and endothelial leukocyte adhesion molecule-1 (E-selectin) expression on endothelial cells (EC). The expression of these molecules and others on the vascular endothelium determines the efficiency with which leukocytes may adhere to the local vasculature and extravasate into the local tissue during the development of an inflammatory response. The local concentration of cytokines and growth factor participate in the modulation of the expression of these CAMs.

[0843] Tumor necrosis factor alpha (TNF-a), a potent proinflammatory cytokine, is a stimulator of all three CAMs on endothelial cells and may be involved in a wide variety of inflammatory responses, often resulting in a pathological outcome.

[0844] The potential of an agonist or antagonist of the invention to mediate a suppression of TNF-a induced CAM expression can be examined. A modified ELISA assay which uses ECs as a solid phase absorbent is employed to measure the amount of CAM expression on TNF-a treated ECs when co-stimulated with a member of the FGF family of proteins.

[0845] To perform the experiment, human umbilical vein endothelial cell (HUVEC) cultures are obtained from pooled cord harvests and maintained in growth medium (EGM-2; Clonetics, San Diego, Calif.) supplemented with 10% FCS and 1% penicillin/streptomycin in a 37 degree C. humidified incubator containing 5% CO₂. HUVECs are seeded in 96-well plates at concentrations of 1×10⁴ cells/well in EGM medium at 37 degree C. for 18-24 hrs or until confluent. The monolayers are subsequently washed 3 times with a serum-free solution of RPMI-1640 supplemented with 100 U/ml penicillin and 100 mg/ml streptomycin, and treated with a given cytokine and/or growth factor(s) for 24 h at 37 degree C. Following incubation, the cells are then evaluated for CAM expression.

[0846] Human Umbilical Vein Endothelial cells (HUVECs) are grown in a standard 96 well plate to confluence. Growth medium is removed from the cells and replaced with 90 ul of 199 Medium (10% FBS). Samples for testing and positive or negative controls are added to the plate in triplicate (in 10 ul volumes). Plates are incubated at 37 degree C. for either 5 h (selectin and integrin expression) or 24 h (integrin expression only). Plates are aspirated to remove medium and 100 μl of 0.1% paraformaldehyde-PBS(with Ca++ and Mg++) is added to each well. Plates are held at 4° C. for 30 min.

[0847] Fixative is then removed from the wells and wells are washed 1× with PBS(+Ca,Mg)+0.5% BSA and drained. Do not allow the wells to dry. Add 10 μl of diluted primary antibody to the test and control wells. Anti-ICAM-1-Biotin, Anti-VCAM-1-Biotin and Anti-E-selectin-Biotin are used at a concentration of 10 μg/ml (1:10 dilution of 0.1 mg/ml stock antibody). Cells are incubated at 37° C. for 30 min. in a humidified environment. Wells are washed ×3 with PBS(+Ca,Mg)+0.5% BSA.

[0848] Then add 20 μl of diluted ExtrAvidin-Alkaline Phosphotase (1:5,000 dilution) to each well and incubated at 37° C. for 30 min. Wells are washed ×3 with PBS(+Ca,Mg)+0.5% BSA. 1 tablet of p-Nitrophenol Phosphate pNPP is dissolved in 5 ml of glycine buffer (pH 10.4). 100 μl of pNPP substrate in glycine buffer is added to each test well. Standard wells in triplicate are prepared from the working dilution of the ExtrAvidin-Alkaline Phosphotase in glycine buffer: 1:5,000 (10⁰)>10^{-0.5}>10⁻¹>10^{-1.5} 0.5 of each dilution is added to triplicate wells and the resulting AP content in each well is 5.50 ng, 1.74 ng, 0.55 ng, 0.18 ng. 100 pl of pNNP reagent must then be added to each of the standard wells. The plate must be incubated at 37° C. for 4h. A volume of 50 μl of 3M NaOH is added to all wells. The results are quantified on a plate reader at 405 nm. The background subtraction option is used on blank wells filled with glycine buffer only. The template is set up to indicate the concentration of AP-conjugate in each standard well [5.50 ng; 1.74 ng; 0.55 ng; 0.18 ng]. Results are indicated as amount of bound AP-conjugate in each sample.

[0849] The studies described in this example tested activity of agonists or antagonists of the invention. However, one skilled in the art could easily modify the exemplified studies to test the activity of polynucleotides or polypeptides of the invention (e.g., gene therapy).

### Example 30

### Production of Polypeptide of the Invention For High-throughput Screening Assays

[0850] The following protocol produces a supernatant containing polypeptide of the present invention to be tested. This supernatant can then be used in the Screening Assays described in Examples 32-41.

[0851] First, dilute Poly-D-Lysine (644 587 Boehringer-Mannheim) stock solution (1 mg/ml in PBS) 1:20 in PBS (w/o calcium or magnesium 17-516F Biowhittaker) for a working solution of 50 ug/ml. Add 200 ul of this solution to each well (24 well plates) and incubate at RT for 20 minutes. Be sure to distribute the solution over each well (note: a 12-channel pipetter may be used with tips on every other channel). Aspirate off the Poly-D-Lysine solution and rinse with 1 ml PBS (Phosphate Buffered Saline). The PBS should remain in the well until just prior to plating the cells and plates may be poly-lysine coated in advance for up to two weeks.

[0852] Plate 293T cells (do not carry cells past P+20) at 2×10⁵ cells/well in 0.5 ml DMEM(Dulbecco's Modified Eagle Medium)(with 4.5 G/L glucose and L-glutamine (12-604F Biowhittaker))/10% heat inactivated FBS(14-503F Biowhittaker)/1× Penstrep(17-602E Biowhittaker). Let the cells grow overnight.

[0853] The next day, mix together in a sterile solution basin: 300 ul Lipofectamine (18324-012 Gibco/BRL) and 5 ml Optimem 1 (31985070 Gibco/BRL)/96-well plate. With a small volume multi-channel pipetter, aliquot approximately 2 ug of an expression vector containing a polynucleotide insert, produced by the methods described in Examples 8-10, into an appropriately labeled 96-well round bottom plate. With a multi-channel pipetter, add 50 ul of the Lipofectamine/Optimem I mixture to each well. Pipette up and down gently to mix. Incubate at RT 15-45 minutes. After about 20 minutes, use a multi-channel pipetter to add 150 ul Optimem I to each well. As a control, one plate of vector DNA lacking an insert should be transfected with each set of transfections.

[0854] Preferably, the transfection should be performed by tag-teaming the following tasks. By tag-teaming, hands on time is cut in half, and the cells do not spend too much time on PBS. First, person A aspirates off the media from four 24-well plates of cells, and then person B rinses each well with 0.5-1 ml PBS. Person A then aspirates off PBS rinse, and person B, using a 12-channel pipetter with tips on every other channel, adds the 200 ul of DNA/Lipofectamine/Optimem I complex to the odd wells first, then to the even wells, to each row on the 24-well plates. Incubate at 37 degree C. for 6 hours.

[0855] While cells are incubating, prepare appropriate media, either 1%BSA in DMEM with 1× penstrep, or HGS CHO-5 media (116.6 mg/L of CaCl2 (anhyd); 0.00130 mg/L CuSO₄-5H₂O; 0.050 mg/L of Fe(NO₃)₃-9H₂O; 0.417 mg/L of FeSO₄-7H₂O; 311.80 mg/L of Kcl; 28.64 mg/L of MgCl₂; 48.84 mg/L of MgSO₄; 6995.50 mg/L of NaCl; 2400.0 mg/L of NaHCO₃; 62.50 mg/L of NaH₂PO₄-H₂O; 71.02 mg/L of Na₂HPO4; 0.4320 mg/L of ZnSO₄-7H₂O; 0.002 mg/L of Arachidonic Acid; 1.022 mg/L of Cholesterol; 0.070 mg/L of DL-alpha-Tocopherol-Acetate; 0.0520 mg/L of Linoleic Acid; 0.010 mg/L of Linolenic Acid; 0.010 mg/L of Myristic Acid; 0.010 mg/L of Oleic Acid; 0.010 mg/L of Palmitric Acid; 0.010 mg/L of Palmitic Acid; 100 mg/L of Pluronic F-68; 0.010 mg/L of Stearic Acid; 2.20 mg/L of Tween 80; 4551 mg/L of D-Glucose; 130.85 mg/ml of L-Alanine; 147.50 mg/ml of L-Arginine-HCL; 7.50 mg/ml of L-Asparagine-H₂O; 6.65 mg/ml of L-Aspartic Acid; 29.56 mg/ml of L-Cystine-2HCL-H₂O; 31.29 mg/ml of L-Cystine-2HCL; 7.35 mg/ml of L-Glutamic Acid; 365.0 mg/ml of L-Glutamine; 18.75 mg/ml of Glycine; 52.48 mg/ml of L-Histidine-HCl-H₂O; 106.97 mg/ml of L-Isoleucine; 111.45 mg/ml of L-Leucine; 163.75 mg/ml of L-Lysine HCL; 32.34 mg/ml of L-Methionine; 68.48 mg/ml of L-Phenylalainine; 40.0 mg/ml of L-Proline; 26.25 mg/ml of L-Serine; 101.05 mg/ml of L-Threonine; 19.22 mg/ml of L-Tryptophan; 91.79 mg/ml of L-Tryrosine-2Na-2H₂O; and 99.65 mg/ml of L-Valine; 0.0035 mg/L of Biotin; 3.24 mg/L of D-Ca Pantothenate; 11.78 mg/L of Choline Chloride; 4.65 mg/L of Folic Acid; 15.60 mg/L of i-Inositol; 3.02 mg/L of Niacinamide; 3.00 mg/L of Pyridoxal HCL; 0.031 mg/L of Pyridoxine HCL; 0.319 mg/L of Riboflavin; 3.17 mg/L of Thiamine HCL; 0.365 mg/L of Thymidine; 0.680 mg/L of Vitamin B₁₂; 25 mM of HEPES Buffer; 2.39 mg/L of Na Hypoxanthine; 0.105 mg/L of Lipoic Acid; 0.081 mg/L of Sodium Putrescine-2HCL; 55.0 mg/L of Sodium Pyruvate; 0.0067 mg/L of Sodium Selenite; 20 uM of Ethanolamine; 0.122 mg/L of Ferric Citrate; 41.70 mg/L of Methyl-B-Cyclodextrin complexed with Linoleic Acid; 33.33 mg/L of Methyl-B-Cyclodextrin complexed with Oleic Acid; 10 mg/L of Methyl-B-Cyclodextrin complexed with Retinal Acetate. Adjust osmolarity to 327 mOsm) with 2 mm glutamine and 1× penstrep. (BSA (81-068-3 Bayer) 100 gm dissolved in 1 L DMEM for a 10% BSA stock solution). Filter the media and collect 50 ul for endotoxin assay in 15 ml polystyrene conical.

[0856] The transfection reaction is terminated, preferably by tag-teaming, at the end of the incubation period. Person A aspirates off the transfection media, while person B adds 1.5 ml appropriate media to each well. Incubate at 37 degree C. for 45 or 72 hours depending on the media used: 1% BSA for 45 hours or CHO-5 for 72 hours.

[0857] On day four, using a 300 ul multichannel pipetter, aliquot 600 ul in one 1 ml deep well plate and the remaining supernatant into a 2 ml deep well. The supernatants from each well can then be used in the assays described in Examples 32-39.

[0858] It is specifically understood that when activity is obtained in any of the assays described below using a supernatant, the activity originates from either the polypeptide of the present invention directly (e.g., as a secreted protein) or by polypeptide of the present invention inducing expression of other proteins, which are then secreted into the supernatant. Thus, the invention further provides a method of identifying the protein in the supernatant characterized by an activity in a particular assay.

### Example 31

### Construction of GAS Reporter Construct

[0859] One signal transduction pathway involved in the differentiation and proliferation of cells is called the Jaks-STATs pathway. Activated proteins in the Jaks-STATs pathway bind to gamma activation site “GAS” elements or interferon-sensitive responsive element (“ISRE”), located in the promoter of many genes. The binding of a protein to these elements alter the expression of the associated gene.

[0860] GAS and ISRE elements are recognized by a class of transcription factors called Signal Transducers and Activators of Transcription, or “STATs.” There are six members of the STATs family. Stat1 and Stat3 are present in many cell types, as is Stat2 (as response to IFN-alpha is widespread). Stat4 is more restricted and is not in many cell types though it has been found in T helper class I, cells after treatment with IL-12. Stat5 was originally called mammary growth factor, but has been found at higher concentrations in other cells including myeloid cells. It can be activated in tissue culture cells by many cytokines.

[0861] The STATs are activated to translocate from the cytoplasm to the nucleus upon tyrosine phosphorylation by a set of kinases known as the Janus Kinase (“Jaks”) family. Jaks represent a distinct family of soluble tyrosine kinases and include Tyk2, Jak1, Jak2, and Jak3. These kinases display significant sequence similarity and are generally catalytically inactive in resting cells.

[0862] The Jaks are activated by a wide range of receptors summarized in the Table below. (Adapted from review by Schidler and Darnell, Ann. Rev. Biochem. 64:621-51 (1995).) A cytokine receptor family, capable of activating Jaks, is divided into two groups: (a) Class 1 includes receptors for IL-2, IL-3, IL-4, IL-6, IL-7,IL-9, IL-11, IL-12, IL-15, Epo, PRL, GH, G-CSF, GM-CSF, LIF, CNTF, and thrombopoietin; and (b) Class 2 includes IFN-a, IFN-g, and IL-10. The Class 1 receptors share a conserved cysteine motif (a set of four conserved cysteines and one tryptophan) and a WSXWS motif (a membrane proximal region encoding Trp-Ser-Xaa-Trp-Ser (SEQ ID NO:2)).

[0863] Thus, on binding of a ligand to a receptor, Jaks are activated, which in turn activate STATs, which then translocate and bind to GAS elements. This entire process is encompassed in the Jaks-STATs signal transduction pathway.

[0864] Therefore, activation of the Jaks-STATs pathway, reflected by the binding of the GAS or the ISRE element, can be used to indicate proteins involved in the proliferation and differentiation of cells. For example, growth factors and cytokines are known to activate the Jaks-STATs pathway. (See Table below.) Thus, by using GAS elements linked to reporter molecules, activators of the Jaks-STATs pathway can be identified.

| | | GAS (elements) | | | | |
|---|---|---|---|---|---|---|
| JAKs | STATS | or ISRE | | | | |
| Ligand | tyk2 | Jak1 | Jak2 | Jak3 | | |
| IFN family | | | | | | |
| IFN-a/B | + | + | − | − | 1, 2, 3 | ISRE |
| IFN-g | | + | + | − | 1 | GAS (IRF1 > Lys6 > IFP) |
| IL-10 | + | ? | ? | − | 1, 3 | |
| gp130 family | | | | | | |
| IL-6 (Pleiotropic)+ | + | + | ? | 1, 3 | | GAS (IRF1 > Lys6 > IFP) |
| Il-11 (Pleiotropic)? | + | ? | ? | 1, 3 | | |
| OnM (Pleiotropic)? | + | + | ? | 1, 3 | | |
| LIF (Pleiotropic)? | + | + | ? | 1, 3 | | |
| CNTF (Pleiotropic) | −/+ | + | + | 1, 3 | | |
| G-CSF (Pleiotropic) | ? | + | ? | ? | 1, 3 | |
| IL-12 (Pleiotropic) | + | − | + | + | 1, 3 | |
| g-C family | | | | | | |
| IL-2 (lymphocytes) | − | + | − | + | 1, 3, 5 | GAS |
| IL-4 (lymph/myeloid) | − | + | − | + | 6 | GAS (IRFI = IFP >> Ly6)(IgH) |
| IL-7 (lymphocytes) | − | + | − | + | 5 | GAS |
| IL-9 (lymphocytes) | − | + | − | + | 5 | GAS |
| IL-13 (lymphocyte) | − | + | ? | ? | 6 | GAS |
| IL-15 | + | ? | ? | + | 5 | GAS |
| gp140 family | | | | | | |
| IL-3 (myeloid) | − | − | + | − | 5 | GAS (IRF1 > IFP >> Ly6) |
| IL-5 (myeloid) | − | − | + | − | 5 | GAS |
| GM-CSF (myeloid) | − | − | + | − | 5 | GAS |
| Growth hormone family | | | | | | |
| GH | ? | − | + | − | | |
| PRL | ? | +/− | + | − | 1, 3, 5 | |
| EPO | ? | − | + | − | 5 | GAS(B− |
| CAS > IRF1 = IFP >> Ly6) | | | | | | |
| Receptor Tyrosine Kinases | | | | | | |
| EGF | ? | + | + | − | 1, 3 | GAS (IRF1) |
| PDGF | ? | + | + | − | 1, 3 | |
| CSF-1 | ? | + | + | − | 1, 3 | GAS (not IRF1) |

[0865] To construct a synthetic GAS containing promoter element, which is used in the Biological Assays described in Examples 32-33, a PCR based strategy is employed to generate a GAS-SV40 promoter sequence. The 5′ primer contains four tandem copies of the GAS binding site found in the IRF1 promoter and previously demonstrated to bind STATs upon induction with a range of cytokines (Rothman et al., Immunity 1:457-468 (1994).), although other GAS or ISRE elements can be used instead. The 5′ primer also contains 18 bp of sequence complementary to the SV40 early promoter sequence and is flanked with an XhoI site. The sequence of the 5′ primer is:

| | |
|---|---|
| 5′:GCGCCTCGAGATTTCCCCGAAATCTAGATTTC | (SEQ ID NO: 3) |
| CCCGAAATGATTTCCCCGAAATGATTTCCCCGAAA | |
| TATCTGCCATCTCAATTAG:3′ | |

[0866] The downstream primer is complementary to the SV40 promoter and is flanked with a Hind III site: 5′:GCGGCAAGCTTTTTGCAAAGCCTAGGC:3′ (SEQ ID NO:4)

[0867] PCR amplification is performed using the SV40 promoter template present in the B-gal:promoter plasmid obtained from Clontech. The resulting PCR fragment is digested with XhoI/Hind III and subcloned into BLSK2−. (Stratagene.) Sequencing with forward and reverse primers confirms that the insert contains the following sequence:

| | |
|---|---|
| 5′:CTCGAGATTTCCCCGAAATCTAGATTTCCCCGAAATGATTTCCCCGAAATGATT | (SEQ ID NO: 5) |
| TCCCCGAAATATCTGCCATCTCAATTAGTCAGCAACCATAGTCCCGCCCCTAACT | |
| CCGCCCATCCCGCCCCTAACTCCGCCCAGTTCCGCCCATTCTCCGCCCCATGGCTG | |
| ACTAATTTTTTTTATTTATGCAGAGGCCGAGGCCGCCTCGGCCTCTGAGCTATTCC | |
| AGAAGTAGTGAGGAGGCTTTTTTGGAGGCCTAGGCTTTTGCAAAAAGCTT:3′ | |

[0868] With this GAS promoter element linked to the SV40 promoter, a GAS:SEAP2 reporter construct is next engineered. Here, the reporter molecule is a secreted alkaline phosphatase, or “SEAP.” Clearly, however, any reporter molecule can be used instead of SEAP, in this or in any of the other Examples. Well known reporter molecules that can be used instead of SEAP include chloramphenicol acetyltransferase (CAT), luciferase, alkaline phosphatase, B-galactosidase, green fluorescent protein (GFP), or any protein detectable by an antibody.

[0869] The above sequence confirmed synthetic GAS-SV40 promoter element is subcloned into the pSEAP-Promoter vector obtained from Clontech using HindIII and XhoI, effectively replacing the SV40 promoter with the amplified GAS:SV40 promoter element, to create the GAS-SEAP vector. However, this vector does not contain a neomycin resistance gene, and therefore, is not preferred for mammalian expression systems.

[0870] Thus, in order to generate mammalian stable cell lines expressing the GAS-SEAP reporter, the GAS-SEAP cassette is removed from the GAS-SEAP vector using SalI and NotI, and inserted into a backbone vector containing the neomycin resistance gene, such as pGFP-1 (Clontech), using these restriction sites in the multiple cloning site, to create the GAS-SEAP/Neo vector. Once this vector is transfected into mammalian cells, this vector can then be used as a reporter molecule for GAS binding as described in Examples 32-33.

[0871] Other constructs can be made using the above description and replacing GAS with a different promoter sequence. For example, construction of reporter molecules containing NFK-B and EGR promoter sequences are described in Examples 34 and 35. However, many other promoters can be substituted using the protocols described in these Examples. For instance, SRE, IL-2, NFAT, or Osteocalcin promoters can be substituted, alone or in combination (e.g., GAS/NF-KB/EGR, GAS/NF-KB, Il-2/NFAT, or NF-KB/GAS). Similarly, other cell lines can be used to test reporter construct activity, such as HELA (epithelial), HUVEC (endothelial), Reh (B-cell), Saos-2 (osteoblast), HUVAC (aortic), or Cardiomyocyte.

### Example 32

### High-throughput Screening Assay for T-cell Activity

[0872] The following protocol is used to assess T-cell activity by identifying factors, and determining whether supemate containing a polypeptide of the invention proliferates and/or differentiates T-cells. T-cell activity is assessed using the GAS/SEAP/Neo construct produced in Example 31. Thus, factors that increase SEAP activity indicate the ability to activate the Jaks-STATS signal transduction pathway. The T-cell used in this assay is Jurkat T-cells (ATCC Accession No. TIB-152), although Molt-3 cells (ATCC Accession No. CRL-1552) and Molt-4 cells (ATCC Accession No. CRL-1582) cells can also be used.

[0873] Jurkat T-cells are lymphoblastic CD4+Th1 helper cells. In order to generate stable cell lines, approximately 2 million Jurkat cells are transfected with the GAS-SEAP/neo vector using DMRIE-C (Life Technologies)(transfection procedure described below). The transfected cells are seeded to a density of approximately 20,000 cells per well and transfectants resistant to 1 mg/ml genticin selected. Resistant colonies are expanded and then tested for their response to increasing concentrations of interferon gamma. The dose response of a selected clone is demonstrated.

[0874] Specifically, the following protocol will yield sufficient cells for 75 wells containing 200 ul of cells. Thus, it is either scaled up, or performed in multiple to generate sufficient cells for multiple 96 well plates. Jurkat cells are maintained in RPMI +10% serum with 1%Pen-Strep. Combine 2.5 mls of OPTI-MEM (Life Technologies) with 10 ug of plasmid DNA in a T25 flask. Add 2.5 ml OPTI-MEM containing 50 ul of DMRIE-C and incubate at room temperature for 15-45 mins.

[0875] During the incubation period, count cell concentration, spin down the required number of cells (10⁷ per transfection), and resuspend in OPTI-MEM to a final concentration of 10⁷ cells/ml. Then add 1 ml of 1×10⁷ cells in OPTI-MEM to T25 flask and incubate at 37 degree C. for 6 hrs. After the incubation, add 10⁷ ml of RPMI +15% serum.

[0876] The Jurkat:GAS-SEAP stable reporter lines are maintained in RPMI +10% serum, 1 mg/ml Genticin, and 1% Pen-Strep. These cells are treated with supernatants containing polypeptide of the present invention or polypeptide of the present invention induced polypeptides as produced by the protocol described in Example 30.

[0877] On the day of treatment with the supernatant, the cells should be washed and resuspended in fresh RPMI +10% serum to a density of 500,000 cells per ml. The exact number of cells required will depend on the number of supernatants being screened. For one 96 well plate, approximately 10 million cells (for 10 plates, 100 million cells) are required.

[0878] Transfer the cells to a triangular reservoir boat, in order to dispense the cells into a 96 well dish, using a 12 channel pipette. Using a 12 channel pipette, transfer 200 ul of cells into each well (therefore adding 100,000 cells per well).

[0879] After all the plates have been seeded, 50 ul of the supernatants are transferred directly from the 96 well plate containing the supernatants into each well using a 12 channel pipette. In addition, a dose of exogenous interferon gamma (0.1, 1.0, 10 ng) is added to wells H9, H10, and H11 to serve as additional positive controls for the assay.

[0880] The 96 well dishes containing Jurkat cells treated with supernatants are placed in an incubator for 48 hrs (note: this time is variable between 48-72 hrs). 35 ul samples from each well are then transferred to an opaque 96 well plate using a 12 channel pipette. The opaque plates should be covered (using sellophene covers) and stored at −20 degree C. until SEAP assays are performed according to Example 36. The plates containing the remaining treated cells are placed at 4 degree C. and serve as a source of material for repeating the assay on a specific well if desired.

[0881] As a positive control, 100 Unit/ml interferon gamma can be used which is known to activate Jurkat T cells. Over 30 fold induction is typically observed in the positive control wells.

[0882] The above protocol may be used in the generation of both transient, as well as stable, transfected cells, which would be apparent to those of skill in the art.

### Example 33

### High-throughput Screening Assay Identifying Myeloid Activity

[0883] The following protocol is used to assess myeloid activity of polypeptide of the present invention by determining whether polypeptide of the present invention proliferates and/or differentiates myeloid cells. Myeloid cell activity is assessed using the GAS/SEAP/Neo construct produced in Example 31. Thus, factors that increase SEAP activity indicate the ability to activate the Jaks-STATS signal transduction pathway. The myeloid cell used in this assay is U937, a pre-monocyte cell line, although TF-1, HL60, or KG1 can be used.

[0884] To transiently transfect U937 cells with the GAS/SEAP/Neo construct produced in Example 31, a DEAE-Dextran method (Kharbanda et. al., 1994, Cell Growth & Differentiation, 5:259-265) is used. First, harvest 2×10⁷ U937 cells and wash with PBS. The U937 cells are usually grown in RPMI 1640 medium containing 10% heat-inactivated fetal bovine serum (FBS) supplemented with 100 units/ml penicillin and 100 mg/ml streptomycin.

[0885] Next, suspend the cells in 1 ml of 20 mM Tris-HCl (pH 7.4) buffer containing 0.5 mg/ml DEAE-Dextran, 8 ug GAS-SEAP2 plasmid DNA, 140 mM NaCl, 5 mM KCl, 375 uM Na₂HPO₄.7H₂O, 1 mM MgCl₂, and 675 uM CaCl₂. Incubate at 37 degrees C. for 45 min.

[0886] Wash the cells with RPMI 1640 medium containing 10% FBS and then resuspend in 10 ml complete medium and incubate at 37 degree C. for 36 hr.

[0887] The GAS-SEAP/U937 stable cells are obtained by growing the cells in 400 ug/ml G418. The G418-free medium is used for routine growth but every one to two months, the cells should be re-grown in 400 ug/ml G418 for couple of passages.

[0888] These cells are tested by harvesting 1×10⁸ cells (this is enough for ten 96-well plates assay) and wash with PBS. Suspend the cells in 200 ml above described growth medium, with a final density of 5×10⁵ cells/ml. Plate 200 ul cells per well in the 96-well plate (or 1×10⁵ cells/well).

[0889] Add 50 ul of the supernatant prepared by the protocol described in Example 30. Incubate at 37 degee C. for 48 to 72 hr. As a positive control, 100 Unit/ml interferon gamma can be used which is known to activate U937 cells. Over 30 fold induction is typically observed in the positive control wells. SEAP assay the supernatant according to the protocol described in Example 36.

### Example 34

### High-throughput Screening Assay Identifying Neuronal Activity

[0890] When cells undergo differentiation and proliferation, a group of genes are activated through many different signal transduction pathways. One of these genes, EGR1 (early growth response gene 1), is induced in various tissues and cell types upon activation. The promoter of EGR1 is responsible for such induction. Using the EGR1 promoter linked to reporter molecules, activation of cells can be assessed by polypeptide of the present invention.

[0891] Particularly, the following protocol is used to assess neuronal activity in PC12 cell lines. PC12 cells (rat phenochromocytoma cells) are known to proliferate and/or differentiate by activation with a number of mitogens, such as TPA (tetradecanoyl phorbol acetate), NGF (nerve growth factor), and EGF (epidermal growth factor). The EGRl gene expression is activated during this treatment. Thus, by stably transfecting PC12 cells with a construct containing an EGR promoter linked to SEAP reporter, activation of PC12 cells by polypeptide of the present invention can be assessed.

[0892] The EGR/SEAP reporter construct can be assembled by the following protocol. The EGR-1 promoter sequence (−633 to +1)(Sakamoto K et al., Oncogene 6:867-871 (1991)) can be PCR amplified from human genomic DNA using the following primers:

| | |
|---|---|
| 5′ GCGCTCGAGGGATGACAGCGATAGAACCCCGG-3′ | (SEQ ID |
| | NO: 6) |
| 5′ GCGAAGCTTCGCGACTCCCCGGATCCGCCTC-3′ | (SEQ ID |
| | NO: 7) |

[0893] Using the GAS:SEAP/Neo vector produced in Example 31, EGR1 amplified product can then be inserted into this vector. Linearize the GAS:SEAP/Neo vector using restriction enzymes XhoI/HindIII, removing the GAS/SV40 stuffer. Restrict the EGR1 amplified product with these same enzymes. Ligate the vector and the EGR1 promoter.

[0894] To prepare 96 well-plates for cell culture, two mls of a coating solution (1:30 dilution of collagen type I (Upstate Biotech Inc. Cat#08-115) in 30% ethanol (filter sterilized)) is added per one 10 cm plate or 50 ml per well of the 96-well plate, and allowed to air dry for 2 hr.

[0895] PC12 cells are routinely grown in RPMI-1640 medium (Bio Whittaker) containing 10% horse serum (JRH BIOSCIENCES, Cat. # 12449-78P), 5% heat-inactivated fetal bovine serum (FBS) supplemented with 100 units/ml penicillin and 100 ug/ml streptomycin on a precoated 10 cm tissue culture dish. One to four split is done every three to four days. Cells are removed from the plates by scraping and resuspended with pipetting up and down for more than 15 times.

[0896] Transfect the EGR/SEAP/Neo construct into PC12 using the Lipofectamine protocol described in Example 30. EGR-SEAP/PC12 stable cells are obtained by growing the cells in 300 ug/ml G418. The G418-free medium is used for routine growth but every one to two months, the cells should be re-grown in 300 ug/ml G418 for couple of passages.

[0897] To assay for neuronal activity, a 10 cm plate with cells around 70 to 80% confluent is screened by removing the old medium. Wash the cells once with PBS (Phosphate buffered saline). Then starve the cells in low serum medium (RPMI-1640 containing 1% horse serum and 0.5% FBS with antibiotics) overnight.

[0898] The next morning, remove the medium and wash the cells with PBS. Scrape off the cells from the plate, suspend the cells well in 2 ml low serum medium. Count the cell number and add more low serum medium to reach final cell density as 5×10⁵ cells/ml.

[0899] Add 200 ul of the cell suspension to each well of 96-well plate (equivalent to 1×10⁵ cells/well). Add 50 ul supernatant produced by Example 30, 37 degree C. for 48 to 72 hr. As a positive control, a growth factor known to activate PC12 cells through EGR can be used, such as 50 ng/ul of Neuronal Growth Factor (NGF). Over fifty-fold induction of SEAP is typically seen in the positive control wells. SEAP assay the supernatant according to Example 36.

### Example 35

### High-throughput Screening Assay for T-cell Activity

[0900] NF-KB Nuclear Factor KB) is a transcription factor activated by a wide variety of agents including the inflammatory cytokines IL-1 and TNF, CD30 and CD40, lymphotoxin-alpha and lymphotoxin-beta, by exposure to LPS or thrombin, and by expression of certain viral gene products. As a transcription factor, NF-KB regulates the expression of genes involved in immune cell activation, control of apoptosis (NF-KB appears to shield cells from apoptosis), B and T-cell development, anti-viral and antimicrobial responses, and multiple stress responses.

[0901] In non-stimulated conditions, NF-KB is retained in the cytoplasm with I-KB (Inhibitor KB). However, upon stimulation, I-KB is phosphorylated and degraded, causing NF-KB to shuttle to the nucleus, thereby activating transcription of target genes. Target genes activated by NF-KB include IL-2, IL-6, GM-CSF, ICAM-1 and class 1 MHC.

[0902] Due to its central role and ability to respond to a range of stimuli, reporter constructs utilizing the NF-KB promoter element are used to screen the supernatants produced in Example 30. Activators or inhibitors of NF-KB would be useful in treating, preventing, and/or diagnosing diseases. For example, inhibitors of NF-KB could be used to treat those diseases related to the acute or chronic activation of NF-KB, such as rheumatoid arthritis.

[0903] To construct a vector containing the NF-KB promoter element, a PCR based strategy is employed. The upstream primer contains four tandem copies of the NF-KB binding site (GGGGACTTTCCC) (SEQ ID NO:8), 18 bp of sequence complementary to the 5′ end of the SV40 early promoter sequence, and is flanked with an XhoI site:

| | |
|---|---|
| 5′:GCGGCCTCGAGGGGACTTTCCCGGGGACTTTC | (SEQ ID NO: 9) |
| CGGGGACTTTCCGGGACTTTCCATCCTGCCATCTC | |
| AATTAG:3′ | |

[0904] The downstream primer is complementary to the 3′ end of the SV40 promoter and is flanked with a Hind III site:

| | |
|---|---|
| 5′:GCGGCAAGCTTTTTGCAAAGCCTAGGC:3′ | (SEQ ID NO: 4) |

[0905] PCR amplification is performed using the SV40 promoter template present in the pB-gal:promoter plasmid obtained from Clontech. The resulting PCR fragment is digested with XhoI and Hind III and subcloned into BLSK2−. (Stratagene) Sequencing with the T7 and T3 primers confirms the insert contains the following sequence:

| | |
|---|---|
| 5′:CTCGAGGGGACTTTCCCGGGGACTTTCCGGGGACTTTCCGGGACTTTCCATCTG | (SEQ ID NO: 10) |
| CCATCTCAATTAGTCAGCAACCATAGTCCCGCCCCTAACTCCGCCCATCCCGCCC | |
| CTAACTCCGCCCAGTTCCGCCCATTCTCCGCCCCATGGCTGACTAATTTTTTTTAT | |
| TTATGCAGAGGCCGAGGCCGCCTCGGCCTCTGAGCTATTCCAGAAGTAGTGAGG | |
| AGGCTTTTTTGGAGGCCTAGGCTTTTGCAAAAAGCTT:3′ | |

[0906] Next, replace the SV40 minimal promoter element present in the pSEAP2-promoter plasmid (Clontech) with this NF-KB/SV40 fragment using XhoI and HindIII. However, this vector does not contain a neomycin resistance gene, and therefore, is not preferred for mammalian expression systems.

[0907] In order to generate stable mammalian cell lines, the NF-KB/SV40/SEAP cassette is removed from the above NF-KB/SEAP vector using restriction enzymes SalI and NotI, and inserted into a vector containing neomycin resistance. Particularly, the NF-KB/SV40/SEAP cassette was inserted into pGFP-1 (Clontech), replacing the GFP gene, after restricting pGFP-1 with SalI and NotI. Once NF-KB/SV40/SEAP/Neo vector is created, stable Jurkat T-cells are created and maintained according to the protocol described in Example 32. Similarly, the method for assaying supernatants with these stable Jurkat T-cells is also described in Example 32. As a positive control, exogenous TNF alpha (0.1,1, 10 ng) is added to wells H9, H10, and H 11, with a 5-10 fold activation typically observed.

### Example 36

### Assay for SEAP Activity

[0908] As a reporter molecule for the assays described in Examples 32-35, SEAP activity is assayed using the Tropix Phospho-light Kit (Cat. BP-400) according to the following general procedure. The Tropix Phospho-light Kit supplies the Dilution, Assay, and Reaction Buffers used below.

[0909] Prime a dispenser with the 2.5× Dilution Buffer and dispense 15 ul of 2.5× dilution buffer into Optiplates containing 35 ul of a supernatant. Seal the plates with a plastic sealer and incubate at 65 degree C. for 30 min. Separate the Optiplates to avoid uneven heating.

[0910] Cool the samples to room temperature for 15 minutes. Empty the dispenser and prime with the Assay Buffer. Add 50 ml Assay Buffer and incubate at room temperature 5 min. Empty the dispenser and prime with the Reaction Buffer (see the Table below). Add 50 ul Reaction Buffer and incubate at room temperature for 20 minutes. Since the intensity of the chemiluminescent signal is time dependent, and it takes about 10 minutes to read 5 plates on a luminometer, thus one should treat 5 plates at each time and start the second set 10 minutes later.

[0911] Read the relative light unit in the luminometer. Set H12 as blank, and print the results. An increase in chemiluminescence indicates reporter activity.

[01196] Reaction Buffer Formulation:

| # of plates | Rxn buffer diluent (ml) | CSPD (ml) |
|---|---|---|
| 10 | 60 | 3 |
| 11 | 65 | 3.25 |
| 12 | 70 | 3.5 |
| 13 | 75 | 3.75 |
| 14 | 80 | 4 |
| 15 | 85 | 4.25 |
| 16 | 90 | 4.5 |
| 17 | 95 | 4.75 |
| 18 | 100 | 5 |
| 19 | 105 | 5.25 |
| 20 | 110 | 5.5 |
| 21 | 115 | 5.75 |
| 22 | 120 | 6 |
| 23 | 125 | 6.25 |
| 24 | 130 | 6.5 |
| 25 | 135 | 6.75 |
| 26 | 140 | 7 |
| 27 | 145 | 7.25 |
| 28 | 150 | 7.5 |
| 29 | 155 | 7.75 |
| 30 | 160 | 8 |
| 31 | 165 | 8.25 |
| 32 | 170 | 8.5 |
| 33 | 175 | 8.75 |
| 34 | 180 | 9 |
| 35 | 185 | 9.25 |
| 36 | 190 | 9.5 |
| 37 | 195 | 9.75 |
| 38 | 200 | 10 |
| 39 | 205 | 10.25 |
| 40 | 210 | 10.5 |
| 41 | 215 | 10.75 |
| 42 | 220 | 11 |
| 43 | 225 | 11.25 |
| 44 | 230 | 11.5 |
| 45 | 235 | 11.75 |
| 46 | 240 | 12 |
| 47 | 245 | 12.25 |
| 48 | 250 | 12.5 |
| 49 | 255 | 12.75 |
| 50 | 260 | 13 |

### Example 37

### High-throughput Screening Assay Identifying Changes in Small Molecule Concentration and Membrane Permeability

[0912] Binding of a ligand to a receptor is known to alter intracellular levels of small molecules, such as calcium, potassium, sodium, and pH, as well as alter membrane potential. These alterations can be measured in an assay to identify supernatants which bind to receptors of a particular cell. Although the following protocol describes an assay for calcium, this protocol can easily be modified to detect changes in potassium, sodium, pH, membrane potential, or any other small molecule which is detectable by a fluorescent probe.

[0913] The following assay uses Fluorometric Imaging Plate Reader (“FLIPR”) to measure changes in fluorescent molecules (Molecular Probes) that bind small molecules. Clearly, any fluorescent molecule detecting a small molecule can be used instead of the calcium fluorescent molecule, fluo-4 (Molecular Probes, Inc.; catalog no. F-14202), used here.

[0914] For adherent cells, seed the cells at 10,000-20,000 cells/well in a Co-star black 96-well plate with clear bottom. The plate is incubated in a CO₂ incubator for 20 hours. The adherent cells are washed two times in Biotek washer with 200 ul of HBSS (Hank's Balanced Salt Solution) leaving 100 ul of buffer after the final wash.

[0915] A stock solution of 1 mg/ml fluo-4 is made in 10% pluronic acid DMSO. To load the cells with fluo-4, 50 ul of 12 ug/ml fluo-4 is added to each well. The plate is incubated at 37 degrees C. in a CO₂ incubator for 60 min. The plate is washed four times in the Biotek washer with HBSS leaving 100 ul of buffer.

[0916] For non-adherent cells, the cells are spun down from culture media. Cells are re-suspended to 2-5×10⁶ cells/ml with HBSS in a 50-ml conical tube. 4 ul of 1 mg/ml fluo-4 solution in 10% pluronic acid DMSO is added to each ml of cell suspension. The tube is then placed in a 37 degrees C. water bath for 30-60 min. The cells are washed twice with HBSS, resuspended to 1×10⁶ cells/ml, and dispensed into a microplate, 100 ul/well. The plate is centrifuged at 1000 rpm for 5 min. The plate is then washed once in Denley Cell Wash with 200 ul, followed by an aspiration step to 100 ul final volume.

[0917] For a non-cell based assay, each well contains a fluorescent molecule, such as fluo-4. The supernatant is added to the well, and a change in fluorescence is detected.

[0918] To measure the fluorescence of intracellular calcium, the FLIPR is set for the following parameters: (1) System gain is 300-800 mW; (2) Exposure time is 0.4 second; (3) Camera F/stop is F/2; (4) Excitation is 488 nm; (5) Emission is 530 nm; and (6) Sample addition is 50 ul. Increased emission at 530 nm indicates an extracellular signaling event caused by the a molecule, either polypeptide of the present invention or a molecule induced by polypeptide of the present invention, which has resulted in an increase in the intracellular Ca⁺⁺ concentration.

### Example 38

### High-throughput Screening Assay Identifying Tyrosine Kinase Activity

[0919] The Protein Tyrosine Kinases (PTK) represent a diverse group of transmembrane and cytoplasmic kinases. Within the Receptor Protein Tyrosine Kinase RPTK) group are receptors for a range of mitogenic and metabolic growth factors including the PDGF, FGF, EGF, NGF, HGF and Insulin receptor subfamilies. In addition there are a large family of RPTKs for which the corresponding ligand is unknown. Ligands for RPTKs include mainly secreted small proteins, but also membrane-bound and extracellular matrix proteins.

[0920] Activation of RPTK by ligands involves ligand-mediated receptor dimerization, resulting in transphosphorylation of the receptor subunits and activation of the cytoplasmic tyrosine kinases. The cytoplasmic tyrosine kinases include receptor associated tyrosine kinases of the src-family (e.g., src, yes, Ick, lyn, fyn) and non-receptor linked and cytosolic protein tyrosine kinases, such as the Jak family, members of which mediate signal transduction triggered by the cytokine superfamily of receptors (e.g., the Interleukins, Interferons, GM-CSF, and Leptin).

[0921] Because of the wide range of known factors capable of stimulating tyrosine kinase activity, identifying whether polypeptide of the present invention or a molecule induced by polypeptide of the present invention is capable of activating tyrosine kinase signal transduction pathways is of interest. Therefore, the following protocol is designed to identify such molecules capable of activating the tyrosine kinase signal transduction pathways.

[0922] Seed target cells (e.g., primary keratinocytes) at a density of approximately 25,000 cells per well in a 96 well Loprodyne Silent Screen Plates purchased from Nalge Nunc (Naperville, Ill.). The plates are sterilized with two 30 minute rinses with 100% ethanol, rinsed with water and dried overnight. Some plates are coated for 2 hr with 100 ml of cell culture grade type I collagen (50 mg/ml), gelatin (2%) or polylysine (50 mg/ml), all of which can be purchased from Sigma Chemicals (St. Louis, Mo.) or 10% Matrigel purchased from Becton Dickinson (Bedford, Mass.), or calf serum, rinsed with PBS and stored at 4 degree C. Cell growth on these plates is assayed by seeding 5,000 cells/well in growth medium and indirect quantitation of cell number through use of alamarBlue as described by the manufacturer Alamar Biosciences, Inc. (Sacramento, Calif.) after 48 hr. Falcon plate covers #3071 from Becton Dickinson (Bedford, Mass.) are used to cover the Loprodyne Silent Screen Plates. Falcon Microtest III cell culture plates can also be used in some proliferation experiments.

[0923] To prepare extracts, A431 cells are seeded onto the nylon membranes of Loprodyne plates (20,000/200 ml/well) and cultured overnight in complete medium. Cells are quiesced by incubation in serum-free basal medium for 24 hr. After 5-20 minutes treatment with EGF (60 ng/ml) or 50 ul of the supernatant produced in Example 30, the medium was removed and 100 ml of extraction buffer ((20 mM HEPES pH 7.5, 0.15 M NaCl, 1% Triton X-100, 0.1% SDS, 2 mM Na3VO4, 2 mM Na4P207 and a cocktail of protease inhibitors (# 1836170) obtained from Boeheringer Mannheim (Indianapolis, Ind.) is added to each well and the plate is shaken on a rotating shaker for 5 minutes at 4° C. The plate is then placed in a vacuum transfer manifold and the extract filtered through the 0.45 mm membrane bottoms of each well using house vacuum. Extracts are collected in a 96-well catch/assay plate in the bottom of the vacuum manifold and immediately placed on ice. To obtain extracts clarified by centrifugation, the content of each well, after detergent solubilization for 5 minutes, is removed and centrifuged for 15 minutes at 4 degree C. at 16,000× g.

[0924] Test the filtered extracts for levels of tyrosine kinase activity. Although many methods of detecting tyrosine kinase activity are known, one method is described here.

[0925] Generally, the tyrosine kinase activity of a supernatant is evaluated by determining its ability to phosphorylate a tyrosine residue on a specific substrate (a biotinylated peptide). Biotinylated peptides that can be used for this purpose include PSK1 (corresponding to amino acids 6-20 of the cell division kinase cdc2-p34) and PSK2 (corresponding to amino acids 1-17 of gastrin). Both peptides are substrates for a range of tyrosine kinases and are available from Boehringer Mannheim.

[0926] The tyrosine kinase reaction is set up by adding the following components in order. First, add 10 ul of 5 uM Biotinylated Peptide, then 10 ul ATP/Mg₂₊ (5 mM ATP/50 mM MgCl₂), then 10 ul of 5× Assay Buffer (40 mM imidazole hydrochloride, pH7.3, 40 mM beta-glycerophosphate, 1 mM EGTA, 100 nM MgCl₂, 5 mM MnCl₂, 0.5 mg/ml BSA), then 5 ul of Sodium Vanadate (1 mM), and then 5 ul of water. Mix the components gently and preincubate the reaction mix at 30 degree C. for 2 min. Initial the reaction by adding 10 ul of the control enzyme or the filtered supernatant.

[0927] The tyrosine kinase assay reaction is then terminated by adding 10 ul of 120 mm EDTA and place the reactions on ice.

[0928] Tyrosine kinase activity is determined by transferring 50 ul aliquot of reaction mixture to a microtiter plate (MTP) module and incubating at 37 degree C. for 20 min. This allows the streptavidin coated 96 well plate to associate with the biotinylated peptide. Wash the MTP module with 300 ul/well of PBS four times. Next add 75 ul of anti-phospotyrosine antibody conjugated to horse radish peroxidase (anti-P-Tyr-POD (0.5 u/ml)) to each well and incubate at 37 degree C. for one hour. Wash the well as above.

[0929] Next add 100 ul of peroxidase substrate solution (Boehringer Mannheim) and incubate at room temperature for at least 5 mins (up to 30 min). Measure the absorbance of the sample at 405 nm by using ELISA reader. The level of bound peroxidase activity is quantitated using an ELISA reader and reflects the level of tyrosine kinase activity.

### Example 39

### High-throughput Screening Assay Identifying Phosphorylation Activity

[0930] As a potential alternative and/or complement to the assay of protein tyrosine kinase activity described in Example 38, an assay which detects activation (phosphorylation) of major intracellular signal transduction intermediates can also be used. For example, as described below one particular assay can detect tyrosine phosphorylation of the Erk-1 and Erk-2 kinases. However, phosphorylation of other molecules, such as Raf, JNK, p38 MAP, Map kinase kinase (MEK), MEK kinase, Src, Muscle specific kinase (MuSK), IRAK, Tec, and Janus, as well as any other phosphoserine, phosphotyrosine, or phosphothreonine molecule, can be detected by substituting these molecules for Erk-1 or Erk-2 in the following assay.

[0931] Specifically, assay plates are made by coating the wells of a 96-well ELISA plate with 0.1 ml of protein G (1 ug/ml) for 2 hr at room temp, (RT). The plates are then rinsed with PBS and blocked with 3% BSA/PBS for 1 hr at RT. The protein G plates are then treated with 2 commercial monoclonal antibodies (100 ng/well) against Erk-1 and Erk-2 (1 hr at RT) (Santa Cruz Biotechnology). (To detect other molecules, this step can easily be modified by substituting a monoclonal antibody detecting any of the above described molecules.) After 3-5 rinses with PBS, the plates are stored at 4 degree C. until use.

[0932] A431 cells are seeded at 20,000/well in a 96-well Loprodyne filterplate and cultured overnight in growth medium. The cells are then starved for 48 hr in basal medium (DMEM) and then treated with EGF (6 ng/well) or 50 ul of the supernatants obtained in Example 30 for 5-20 minutes. The cells are then solubilized and extracts filtered directly into the assay plate.

[0933] After incubation with the extract for 1 hr at RT, the wells are again rinsed. As a positive control, a commercial preparation of MAP kinase (10 ng/well) is used in place of A431 extract. Plates are then treated with a commercial polyclonal (rabbit) antibody (lug/ml) which specifically recognizes the phosphorylated epitope of the Erk-1 and Erk-2 kinases (1 hr at RT). This antibody is biotinylated by standard procedures. The bound polyclonal antibody is then quantitated by successive incubations with Europium-streptavidin and Europium fluorescence enhancing reagent in the Wallac DELFIA instrument (time-resolved fluorescence). An increased fluorescent signal over background indicates a phosphorylation by polypeptide of the present invention or a molecule induced by polypeptide of the present invention.

### Example 40

### Assay for the Stimulation of Bone Marrow CD34+ Cell Proliferation

[0934] This assay is based on the ability of human CD34+ to proliferate in the presence of hematopoietic growth factors and evaluates the ability of isolated polypeptides expressed in mammalian cells to stimulate proliferation of CD34+ cells.

[0935] It has been previously shown that most mature precursors will respond to only a single signal. More immature precursors require at least two signals to respond. Therefore, to test the effect of polypeptides on hematopoietic activity of a wide range of progenitor cells, the assay contains a given polypeptide in the presence or absence of other hematopoietic growth factors. Isolated cells are cultured for 5 days in the presence of Stem Cell Factor (SCF) in combination with tested sample. SCF alone has a very limited effect on the proliferation of bone marrow (BM) cells, acting in such conditions only as a “survival” factor. However, combined with any factor exhibiting stimulatory effect on these cells (e.g., IL-3), SCF will cause a synergistic effect. Therefore, if the tested polypeptide has a stimulatory effect on hematopoietic progenitors, such activity can be easily detected. Since normal BM cells have a low level of cycling cells, it is likely that any inhibitory effect of a given polypeptide, or agonists or antagonists thereof, might not be detected. Accordingly, assays for an inhibitory effect on progenitors is preferably tested in cells that are first subjected to in vitro stimulation with SCF+IL+3, and then contacted with the compound that is being evaluated for inhibition of such induced proliferation.

[0936] Briefly, CD34+ cells are isolated using methods known in the art. The cells are thawed and resuspended in medium (QBSF 60 serum-free medium with 1% L-glutamine (500 ml) Quality Biological, Inc., Gaithersburg, Md. Cat# 160-204-101). After several gentle centrifugation steps at 200× g, cells are allowed to rest for one hour. The cell count is adjusted to 2.5×10⁵ cells/ml. During this time, 100 μl of sterile water is added to the peripheral wells of a 96-well plate. The cytokines that can be tested with a given polypeptide in this assay is rhSCF (R&D Systems, Minneapolis, Minn., Cat# 255-SC) at 50 ng/ml alone and in combination with rhSCF and rhIL-3 (R&D Systems, Minneapolis, Minn., Cat# 203-ML) at 30 ng/ml. After one hour, 10 μl of prepared cytokines, 50 μl of the supernatants prepared in Example 30 (supernatants at 1:2 dilution=50 μl) and 20 μl of diluted cells are added to the media which is already present in the wells to allow for a final total volume of 100 μl. The plates are then placed in a 37° C./5% CO₂ incubator for five days.

[0937] Eighteen hours before the assay is harvested, 0.5 μCi/well of [3H] Thymidine is added in a 10 μl volume to each well to determine the proliferation rate. The experiment is terminated by harvesting the cells from each 96-well plate to a filtermat using the Tomtec Harvester 96. After harvesting, the filtermats are dried, trimmed and placed into OmniFilter assemblies consisting of one OmniFilter plate and one OmniFilter Tray. 60 μl Microscint is added to each well and the plate sealed with TopSeal-A press-on sealing film A bar code 15 sticker is affixed to the first plate for counting. The sealed plates are then loaded and the level of radioactivity determined via the Packard Top Count and the printed data collected for analysis. The level of radioactivity reflects the amount of cell proliferation.

[0938] The studies described in this example test the activity of a given polypeptide to stimulate bone marrow CD34+ cell proliferation. One skilled in the art could easily modify the exemplified studies to test the activity of polynucleotides (e.g., gene therapy), antibodies, agonists, and/or antagonists and fragments and variants thereof. As a nonlimiting example, potential antagonists tested in this assay would be expected to inhibit cell proliferation in the presence of cytokines and/or to increase the inhibition of cell proliferation in the presence of cytokines and a given polypeptide. In contrast, potential agonists tested in this assay would be expected to enhance cell proliferation and/or to decrease the inhibition of cell proliferation in the presence of cytokines and a given polypeptide.

[0939] The ability of a gene to stimulate the proliferation of bone marrow CD34+ cells indicates that polynucleotides and polypeptides corresponding to the gene are useful for the diagnosis and treatment of disorders affecting the immune system and hematopoiesis. Representative uses are described in the “Immune Activity” and “Infectious Disease” sections above, and elsewhere herein.

### Example 41

### Assay for Extracellular Matrix Enhanced Cell Response (EMECR)

[0940] The objective of the Extracellular Matrix Enhanced Cell Response (EMECR) assay is to identify gene products (e.g., isolated polypeptides) that act on the hematopoietic stem cells in the context of the extracellular matrix (ECM) induced signal.

[0941] Cells respond to the regulatory factors in the context of signal(s) received from the surrounding microenvironment. For example, fibroblasts, and endothelial and epithelial stem cells fail to replicate in the absence of signals from the ECM. Hematopoietic stem cells can undergo self-renewal in the bone marrow, but not in in vitro suspension culture. The ability of stem cells to undergo self-renewal in vitro is dependent upon their interaction with the stromal cells and the ECM protein fibronectin (fn). Adhesion of cells to fn is mediated by the α₅·β₁ and α₄·β₁ integrin receptors, which are expressed by human and mouse hematopoietic stem cells. The factor(s) which integrate with the ECM environment and are responsible for stimulating stem cell self-renewal have not yet been identified. Discovery of such factors should be of great interest in gene therapy and bone marrow transplant applications

[0942] Briefly, polystyrene, non tissue culture treated, 96-well plates are coated with fn fragment at a coating concentration of 0.2 μg/cm². Mouse bone marrow cells are plated (1,000 cells/well ) in 0.2 ml of serum-free medium. Cells cultured in the presence of IL-3 (5 ng/ml ) +SCF (50 ng/ml ) would serve as the positive control, conditions under which little self-renewal but pronounced differentiation of the stem cells is to be expected. Gene products of the invention (e.g., including, but not limited to, polynucleotides and polypeptides of the present invention, and supernatants produced in Example 30), are tested with appropriate negative controls in the presence and absence of SCF(5.0 ng/ml), where test factor supernatants represent 10% of the total assay volume. The plated cells are then allowed to grow by incubating in a low oxygen environment ( 5% CO₂, 7% O₂, and 88% N₂ ) tissue culture incubator for 7 days. The number of proliferating cells within the wells is then quantitated by measuring thymidine incorporation into cellular DNA. Verification of the positive hits in the assay will require phenotypic characterization of the cells, which can be accomplished by scaling up of the culture system and using appropriate antibody reagents against cell surface antigens and FACScan.

[0943] One skilled in the art could easily modify the exemplified studies to test the activity of polynucleotides (e.g., gene therapy), antibodies, agonists, and/or antagonists and fragments and variants thereof.

[0944] If a particular polypeptide of the present invention is found to be a stimulator of hematopoietic progenitors, polynucleotides and polypeptides corresponding to the gene encoding said polypeptide may be useful for the diagnosis and treatment of disorders affecting the immune system and hematopoiesis. Representative uses are described in the “Immune Activity” and “Infectious Disease” sections above, and elsewhere herein. The gene product may also be useful in the expansion of stem cells and committed progenitors of various blood lineages, and in the differentiation and/or proliferation of various cell types.

[0945] Additionally, the polynucleotides and/or polypeptides of the gene of interest and/or agonists and/or antagonists thereof, may also be employed to inhibit the proliferation and differentiation of hematopoietic cells and therefore may be employed to protect bone marrow stem cells from chemotherapeutic agents during chemotherapy. This antiproliferative effect may allow administration of higher doses of chemotherapeutic agents and, therefore, more effective chemotherapeutic treatment.

[0946] Moreover, polynucleotides and polypeptides corresponding to the gene of interest may also be useful for the treatment and diagnosis of hematopoietic related disorders such as, for example, anemia, pancytopenia, leukopenia, thrombocytopenia or leukemia since stromal cells are important in the production of cells of hematopoietic lineages. The uses include bone marrow cell ex-vivo culture, bone marrow transplantation, bone marrow reconstitution, radiotherapy or chemotherapy of neoplasia.

### Example 42

### Human Dermal Fibroblast and Aortic Smooth Muscle Cell Proliferation

[0947] The polypeptide of interest is added to cultures of normal human dermal fibroblasts (NHDF) and human aortic smooth muscle cells (AoSMC) and two co-assays are performed with each sample. The first assay examines the effect of the polypeptide of interest on the proliferation of normal human dermal fibroblasts (NHDF) or aortic smooth muscle cells (AoSMC). Aberrant growth of fibroblasts or smooth muscle cells is a part of several pathological processes, including fibrosis, and restenosis. The second assay examines IL6 production by both NHDF and SMC. IL6 production is an indication of functional activation. Activated cells will have increased production of a number of cytokines and other factors, which can result in a proinflammatory or immunomodulatory outcome. Assays are run with and without co-TNFa stimulation, in order to check for costimulatory or inhibitory activity.

[0948] Briefly, on day 1, 96-well black plates are set up with 1000 cells/well (NHDF) or 2000 cells/well (AoSMC) in 100 μl culture media. NHDF culture media contains: Clonetics FB basal media, 1 mg/ml hFGF, 5 mg/ml insulin, 50 mg/ml gentamycin, 2% FBS, while AoSMC culture media contains Clonetics SM basal media, 0.5 μg/ml hEGF, 5 mg/ml insulin, 1 μg/ml hFGF, 50 mg/ml gentamycin, 50 μg/ml Amphotericin B, 5% FBS. After incubation at 37° C. for at least 4-5 hours culture media is aspirated and replaced with growth arrest media. Growth arrest media for NHDF contains fibroblast basal media, 50 mg/ml gentamycin, 2% FBS, while growth arrest media for AoSMC contains SM basal media, 50 mg/ml gentamycin, 50 μg/ml Amphotericin B, 0.4% FBS. Incubate at 37° C. until day 2.

[0949] On day 2, serial dilutions and templates of the polypeptide of interest are designed such that they always include media controls and known-protein controls. For both stimulation and inhibition experiments, proteins are diluted in growth arrest media. For inhibition experiments, TNFa is added to a final concentration of 2 ng/ml (NHDF) or 5 ng/ml (AoSMC). Add ⅓ vol media containing controls or polypeptides of the present invention and incubate at 37 degrees C./5% CO₂ until day 5.

[0950] Transfer 60 μl from each well to another labeled 96-well plate, cover with a plate-sealer, and store at 4 degrees C. until Day 6 (for IL6 ELISA). To the remaining 100 μl in the cell culture plate, aseptically add Alamar Blue in an amount equal to 10% of the culture volume (10 μl). Return plates to incubator for 3 to 4 hours. Then measure fluorescence with excitation at 530 nm and emission at 590 nm using the CytoFluor. This yields the growth stimulation/inhibition data.

[0951] On day 5, the IL6 ELISA is performed by coating a 96 well plate with 50-100 ul/well of Anti-Human IL6 Monoclonal antibody diluted in PBS, pH 7.4, incubate ON at room temperature.

[0952] On day 6, empty the plates into the sink and blot on paper towels. Prepare Assay Buffer containing PBS with 4% BSA. Block the plates with 200 μl/well of Pierce Super Block blocking buffer in PBS for 1-2 hr and then wash plates with wash buffer (PBS, 0.05% Tween-20). Blot plates on paper towels. Then add 50 μl/well of diluted Anti-Human IL-6 Monoclonal, Biotin-labeled antibody at 0.50 mg/ml. Make dilutions of IL-6 stock in media (30, 10, 3, 1, 0.3, 0 ng/ml). Add duplicate samples to top row of plate. Cover the plates and incubate for 2 hours at RT on shaker.

[0953] Plates are washed with wash buffer and blotted on paper towels. Dilute EU-labeled Streptavidin 1:1000 in Assay buffer, and add 100 μl/well. Cover the plate and incubate 1 h at RT. Plates are again washed with wash buffer and blotted on paper towels.

[0954] Add 100 μl/well of Enhancement Solution. Shake for 5 minutes. Read the plate on the Wallac DELFIA Fluorometer. Readings from triplicate samples in each assay were tabulated and averaged.

[0955] A positive result in this assay suggests AoSMC cell proliferation and that the polypeptide of the present invention may be involved in dermal fibroblast proliferation and/or smooth muscle cell proliferation. A positive result also suggests many potential uses of polypeptides, polynucleotides, agonists and/or antagonists of the polynucleotide/polypeptide of the present invention which gives a positive result. For example, inflammation and immune responses, wound healing, and angiogenesis, as detailed throughout this specification. Particularly, polypeptides of the present invention and polynucleotides of the present invention may be used in wound healing and dermal regeneration, as well as the promotion of vasculogenesis, both of the blood vessels and lymphatics. The growth of vessels can be used in the treatment of, for example, cardiovascular diseases. Additionally, antagonists of polypeptides and polynucleotides of the invention may be useful in treating diseases, disorders, and/or conditions which involve angiogenesis by acting as an anti-vascular agent (e.g., anti-angiogenesis). These diseases, disorders, and/or conditions are known in the art and/or are described herein, such as, for example, malignancies, solid tumors, benign tumors, for example hemangiomas, acoustic neuromas, neurofibromas, trachomas, and pyogenic granulomas; artheroscleric plaques; ocular angiogenic diseases, for example, diabetic retinopathy, retinopathy of prematurity, macular degeneration, corneal graft rejection, neovascular glaucoma, retrolental fibroplasia, rubeosis, retinoblastoma, uvietis and Pterygia (abnormal blood vessel growth) of the eye; rheumatoid arthritis; psoriasis; delayed wound healing; endometriosis; vasculogenesis; granulations; hypertrophic scars (keloids); nonunion fractures; scleroderma; trachoma; vascular adhesions; myocardial angiogenesis; coronary collaterals; cerebral collaterals; arteriovenous malformations; ischemic limb angiogenesis; Osler-Webber Syndrome; plaque neovascularization; telangiectasia; hemophiliac joints; angiofibroma; fibromuscular dysplasia; wound granulation; Crohn's disease; and atherosclerosis. Moreover, antagonists of polypeptides and polynucleotides of the invention may be useful in treating anti-hyperproliferative diseases and/or anti-inflammatory known in the art and/or described herein.

[0956] One skilled in the art could easily modify the exemplified studies to test the activity of polynucleotides (e.g., gene therapy), antibodies, agonists, and/or antagonists and fragments and variants thereof.

### Example 43

### Cellular Adhesion Molecule (CAM) Expression on Endothelial Cells

[0957] The recruitment of lymphocytes to areas of inflammation and angiogenesis involves specific receptor-ligand interactions between cell surface adhesion molecules (CAMs) on lymphocytes and the vascular endothelium. The adhesion process, in both normal and pathological settings, follows a multi-step cascade that involves intercellular adhesion molecule-1 (ICAM-1), vascular cell adhesion molecule-1 (VCAM-1), and endothelial leukocyte adhesion molecule-1 (E-selectin) expression on endothelial cells (EC). The expression of these molecules and others on the vascular endothelium determines the efficiency with which leukocytes may adhere to the local vasculature and extravasate into the local tissue during the development of an inflammatory response. The local concentration of cytokines and growth factor participate in the modulation of the expression of these CAMs.

[0958] Briefly, endothelial cells (e.g., Human Umbilical Vein Endothelial cells (HUVECs)) are grown in a standard 96 well plate to confluence, growth medium is removed from the cells and replaced with 100 μl of 199 Medium (10% fetal bovine serum (FBS)). Samples for testing and positive or negative controls are added to the plate in triplicate (in 10 μl volumes). Plates are then incubated at 37° C. for either 5 h (selectin and integrin expression) or 24 h (integrin expression only). Plates are aspirated to remove medium and 100 μl of 0.1% paraformaldehyde-PBS(with Ca++ and Mg++) is added to each well. Plates are held at 4° C. for 30 min. Fixative is removed from the wells and wells are washed 1× with PBS(+Ca,Mg)+0.5% BSA and drained. 10 μl of diluted primary antibody is added to the test and control wells. Anti-ICAM-1-Biotin, Anti-VCAM-1-Biotin and Anti-E-selectin-Biotin are used at a concentration of 10 μg/ml (1:10 dilution of 0.1 mg/ml stock antibody). Cells are incubated at 37° C. for 30 min. in a humidified environment. Wells are washed three times with PBS(+Ca,Mg)+0.5% BSA. 20 μl of diluted ExtrAvidin-Alkaline Phosphatase (1:5,000 dilution, referred to herein as the working dilution) are added to each well and incubated at 37° C. for 30 min. Wells are washed three times with PBS(+Ca,Mg)+0.5% BSA. Dissolve 1 tablet of p-Nitrophenol Phosphate pNPP per 5 ml of glycine buffer (pH 10.4). 100 μl of pNPP substrate in glycine buffer is added to each test well. Standard wells in triplicate are prepared from the working dilution of the ExtrAvidin-Alkaline Phosphotase in glycine buffer: 1:5,000 (10⁰)>10^{-0.5}>10⁻¹>10^{-1.5} 0.5 μl of each dilution is added to triplicate wells and the resulting AP content in each well is 5.50 ng, 1.74 ng, 0.55 ng, 0.18 ng. 100 μl of pNNP reagent is then added to each of the standard wells. The plate is incubated at 37° C. for 4h. A volume of 50 μl of 3M NaOH is added to all wells. The plate is read on a plate reader at 405 nm using the background subtraction option on blank wells filled with glycine buffer only. Additionally, the template is set up to indicate the concentration of AP-conjugate in each standard well [5.50 ng; 1.74 ng; 0.55 ng; 0.18 ng]. Results are indicated as amount of bound AP-conjugate in each sample.

### Example 44

### Alamar Blue Endothelial Cells Proliferation Assay

[0959] This assay may be used to quantitatively determine protein mediated inhibition of bFGF-induced proliferation of Bovine Lymphatic Endothelial Cells (LECs), Bovine Aortic Endothelial Cells (BAECs) or Human Microvascular Uterine Myometrial Cells (UTMECs). This assay incorporates a fluorometric growth indicator based on detection of metabolic activity. A standard Alamar Blue Proliferation Assay is prepared in EGM-2MV with 10 ng/ml of bFGF added as a source of endothelial cell stimulation. This assay may be used with a variety of endothelial cells with slight changes in growth medium and cell concentration. Dilutions of the protein batches to be tested are diluted as appropriate. Serum-free medium (GIBCO SFM) without bFGF is used as a non-stimulated control and Angiostatin or TSP-1 are included as a known inhibitory controls.

[0960] Briefly, LEC, BAECs or UTMECs are seeded in growth media at a density of 5000 to 2000 cells/well in a 96 well plate and placed at 37degrees C. overnight. After the overnight incubation of the cells, the growth media is removed and replaced with GIBCO EC-SFM. The cells are treated with the appropriate dilutions of the protein of interest or control protein sample(s) (prepared in SFM ) in triplicate wells with additional bFGF to a concentration of 10 ng/ml. Once the cells have been treated with the samples, the plate(s) is/are placed back in the 37° C. incubator for three days. After three days 10 ml of stock alamar blue (Biosource Cat# DAL 1100) is added to each well and the plate(s) is/are placed back in the 37° C. incubator for four hours. The plate(s) are then read at 530 nm excitation and 590 nm emission using the CytoFluor fluorescence reader. Direct output is recorded in relative fluorescence units.

[0961] Alamar blue is an oxidation-reduction indicator that both fluoresces and changes color in response to chemical reduction of growth medium resulting from cell growth. As cells grow in culture, innate metabolic activity results in a chemical reduction of the immediate surrounding environment. Reduction related to growth causes the indicator to change from oxidized (non-fluorescent blue) form to reduced (fluorescent red) form (i.e., stimulated proliferation will produce a stronger signal and inhibited proliferation will produce a weaker signal and the total signal is proportional to the total number of cells as well as their metabolic activity). The background level of activity is observed with the starvation medium alone. This is compared to the output observed from the positive control samples (bFGF in growth medium) and protein dilutions.

### Example 45

### Detection of Inhibition of a Mixed Lymphocyte Reaction

[0962] This assay can be used to detect and evaluate inhibition of a Mixed Lymphocyte Reaction (MLR) by gene products (e.g., isolated polypeptides). Inhibition of a MLR may be due to a direct effect on cell proliferation and viability, modulation of costimulatory molecules on interacting cells, modulation of adhesiveness between lymphocytes and accessory cells, or modulation of cytokine production by accessory cells. Multiple cells may be targeted by these polypeptides since the peripheral blood mononuclear fraction used in this assay includes T, B and natural killer lymphocytes, as well as monocytes and dendritic cells.

[0963] Polypeptides of interest found to inhibit the MLR may find application in diseases associated with lymphocyte and monocyte activation or proliferation. These include, but are not limited to, diseases such as asthma, arthritis, diabetes, inflammatory skin conditions, psoriasis, eczema, systemic lupus erythematosus, multiple sclerosis, glomerulonephritis, inflammatory bowel disease, crohn's disease, ulcerative colitis, arteriosclerosis, cirrhosis, graft vs. host disease, host vs. graft disease, hepatitis, leukemia and lymphoma.

[0964] Briefly, PBMCs from human donors are purified by density gradient centrifugation using Lymphocyte Separation Medium (LSM®, density 1.0770 g/ml, Organon Teknika Corporation, West Chester, PA). PBMCs from two donors are adjusted to 2×10⁶ cells/ml in RPMI-1640 (Life Technologies, Grand Island, N.Y.) supplemented with 10% FCS and 2 mM glutamine. PBMCs from a third donor is adjusted to 2×10⁵ cells/ml. Fifty microliters of PBMCs from each donor is added to wells of a 96-well round bottom microtiter plate. Dilutions of test materials (50 μl) is added in triplicate to microtiter wells. Test samples (of the protein of interest) are added for final dilution of 1:4; rhuIL-2 (R&D Systems, Minneapolis, Minn., catalog number 202-IL) is added to a final concentration of 1 μg/ml; anti-CD4 mAb (R&D Systems, clone 34930.11, catalog number MAB379) is added to a final concentration of 10 μg/ml. Cells are cultured for 7-8 days at 37° C. in 5% CO₂, and 1 μC of [³H] thymidine is added to wells for the last 16 hrs of culture. Cells are harvested and thymidine incorporation determined using a Packard TopCount. Data is expressed as the mean and standard deviation of triplicate determinations.

[0965] Samples of the protein of interest are screened in separate experiments and compared to the negative control treatment, anti-CD4 mAb, which inhibits proliferation of lymphocytes and the positive control treatment, IL-2 (either as recombinant material or supernatant), which enhances proliferation of lymphocytes.

[0966] One skilled in the art could easily modify the exemplified studies to test the activity of polynucleotides (e.g., gene therapy), antibodies, agonists, and/or antagonists and fragments and variants thereof.

### Example 46

### Assays for Protease Activity

[0967] The following assay may be used to assess protease activity of the polypeptides of the invention.

[0968] Gelatin and casein zymography are performed essentially as described (Heusen et al., Anal. Biochem., 102:196-202 (1980); Wilson et al., Journal of Urology, 149:653-658 (1993)). Samples are run on 10% polyacryamide/0.1% SDS gels containing 1% gelain orcasein, soaked in 2.5% triton at room temperature for 1 hour, and in 0.1M glycine, pH 8.3 at 37° C. 5 to 16 hours. After staining in amido black areas of proteolysis apear as clear areas agains the blue-black background. Trypsin (Sigma T8642) is used as a positive control.

[0969] Protease activity is also determined by monitoring the cleavage of n-a-benzoyl-L-arginine ethyl ester (BAEE) (Sigma B-4500. Reactions are set up in (25 mM NaPO_{4, 1} mM EDTA, and 1 mM BAEE), pH 7.5. Samples are added and the change in adsorbance at 260 nm is monitored on the Beckman DU-6 spectrophotometer in the time-drive mode. Trypsin is used as a positive control.

[0970] Additional assays based upon the release of acid-soluble peptides from casein or hemoglobin measured as adsorbance at 280 nm or colorimetrically using the Folin method are performed as described in Bergmeyer, et al., Methods of Enzymatic Analysis, 5 (1984). Other assays involve the solubilization of chromogenic substrates (Ward, Applied Science, 251-317 (1983).

### Example 47

### Identifying Serine Protease Substrate Specificity

[0971] Methods known in the art or described herein may be used to determine the substrate specificity of the polypeptides of the present invention having serine protease activity. A preferred method of determining substrate specificity is by the use of positional scanning synthetic combinatorial libraries as described in GB 2 324 529 (incorporated herein in its entirety).

### Example 48

### Ligand Binding Assays

[0972] The following assay may be used to assess ligand binding activity of the polypeptides of the invention. Ligand binding assays provide a direct method for ascertaining receptor pharmacology and are adaptable to a high throughput format. The purified ligand for a polypeptide is radiolabeled to high specific activity (50-2000 Ci/mmol) for binding studies. A determination is then made that the process of radiolabeling does not diminish the activity of the ligand towards its polypeptide. Assay conditions for buffers, ions, pH and other modulators such as nucleotides are optimized to establish a workable signal to noise ratio for both membrane and whole cell polypeptide sources. For these assays, specific polypeptide binding is defined as total associated radioactivity minus the radioactivity measured in the presence of an excess of unlabeled competing ligand. Where possible, more than one competing ligand is used to define residual nonspecific binding.

### Example 49

### Functional Assay in Xenopus Oocytes

[0973] Capped RNA transcripts from linearized plasmid templates encoding the polypeptides of the invention are synthesized in vitro with RNA polymerases in accordance with standard procedures. In vitro transcripts are suspended in water at a final concentration of 0.2 mg/mi. Ovarian lobes are removed from adult female toads, Stage V defolliculated oocytes are obtained, and RNA transcripts (10 ng/oocytc) are injected in a 50 nl bolus using a microinjection apparatus. Two electrode voltage clamps are used to measure the currents from individual Xenopus oocytes in response polypeptides and polypeptide agonist exposure. Recordings are made in Ca2+ free Barth's medium at room temperature. The Xenopus system can be used to screen known ligands and tissue/cell extracts for activating ligands.

### Example 50

### Microphysiometric Assays

[0974] Activation of a wide variety of secondary messenger systems results in extrusion of small amounts of acid from a cell. The acid formed is largely as a result of the increased metabolic activity required to fuel the intracellular signaling process. The pH changes in the media surrounding the cell are very small but are detectable by the CYTOSENSOR microphysiometer (Molecular Devices Ltd., Menlo Park, Calif.). The CYTOSENSOR is thus capable of detecting the activation of polypeptide which is coupled to an energy utilizing intracellular signaling pathway.

### Example 51

### Extract/Cell Supernatant Screening

[0975] A large number of mammalian receptors exist for which there remains, as yet, no cognate activating ligand (agonist). Thus, active ligands for these receptors may not be included within the ligands banks as identified to date. Accordingly, the polypeptides of the invention can also be functionally screened (using calcium, cAMP, microphysiometer, oocyte electrophysiology, etc., functional screens) against tissue extracts to identify its natural ligands. Extracts that produce positive functional responses can be sequentially subfractionated until an activating ligand is isolated and identified.

### Example 52

### Calcium and cAMP Functional Assays

[0976] Seven transmembrane receptors which are expressed in HEK 293 cells have been shown to be coupled functionally to activation of PLC and calcium mobilization and/or cAMP stimulation or inhibition. Basal calcium levels in the HEK 293 cells in receptor-transfected or vector control cells were observed to be in the normal, 100 nM to 200 nM, range. HEK 293 cells expressing recombinant receptors are loaded with fura 2 and in a single day >150 selected ligands or tissue/cell extracts are evaluated for agonist induced calcium mobilization. Similarly, HEK 293 cells expressing recombinant receptors are evaluated for the stimulation or inhibition of cAMP production using standard cAMP quantitation assays. Agonists presenting a calcium transient or cAMP fluctuation are tested in vector control cells to determine if the response is unique to the transfected cells expressing receptor.

### Example 53

### ATP-binding Assay

[0977] The following assay may be used to assess ATP-binding activity of polypeptides of the invention.

[0978] ATP-binding activity of the polypeptides of the invention may be detected using the ATP-binding assay described in U.S. Pat. No. 5,858,719, which is herein incorporated by reference in its entirety. Briefly, ATP-binding to polypeptides of the invention is measured via photoaffinity labeling with 8-azido-ATP in a competition assay. Reaction mixtures containing 1 mg/ml of the ABC transport protein of the present invention are incubated with varying concentrations of ATP, or the non-hydrolyzable ATP analog adenyl-5′-imidodiphosphate for 10 minutes at 4° C. A mixture of 8-azido-ATP (Sigma Chem. Corp., St. Louis, Mo.) plus 8-azido-ATP (³²P-ATP) (5 mCi/mmol, ICN, Irvine Calif.) is added to a final concentration of 100 μM and 0.5 ml aliquots are placed in the wells of a porcelain spot plate on ice. The plate is irradiated using a short wave 254 nm UV lamp at a distance of 2.5 cm from the plate for two one-minute intervals with a one-minute cooling interval in between. The reaction is stopped by addition of dithiothreitol to a final concentration of 2 mM. The incubations are subjected to SDS-PAGE electrophoresis, dried, and autoradiographed. Protein bands corresponding to the particular polypeptides of the invention are excised, and the radioactivity quantified. A decrease in radioactivity with increasing ATP or adenly-5′-imidodiphosphate provides a measure of ATP affinity to the polypeptides.

### Example 54

### Small Molecule Screening

[0979] This invention is particularly useful for screening therapeutic compounds by using the polypeptides of the invention, or binding fragments thereof, in any of a variety of drug screening techniques. The polypeptide or fragment employed in such a test may be affixed to a solid support, expressed on a cell surface, free in solution, or located intracellularly. One method of drug screening utilizes eukaryotic or prokaryotic host cells which are stably transformed with recombinant nucleic acids expressing the polypeptide or fragment. Drugs are screened against such transformed cells in competitive binding assays. One may measure, for example, the formulation of complexes between the agent being tested and polypeptide of the invention.

[0980] Thus, the present invention provides methods of screening for drugs or any other agents which affect activities mediated by the polypeptides of the invention. These methods comprise contacting such an agent with a polypeptide of the invention or fragment thereof and assaying for the presence of a complex between the agent and the polypeptide or fragment thereof, by methods well known in the art. In such a competitive binding assay, the agents to screen are typically labeled. Following incubation, free agent is separated from that present in bound form, and the amount of free or uncomplexed label is a measure of the ability of a particular agent to bind to the polypeptides of the invention.

[0981] Another technique for drug screening provides high throughput screening for compounds having suitable binding affinity to the polypeptides of the invention, and is described in great detail in European Patent Application 84/03564, published on Sep. 13, 1984, which is herein incorporated by reference in its entirety. Briefly stated, large numbers of different small molecule test compounds are synthesized on a solid substrate, such as plastic pins or some other surface. The test compounds are reacted with polypeptides of the invention and washed. Bound polypeptides are then detected by methods well known in the art. Purified polypeptides are coated directly onto plates for use in the aforementioned drug screening techniques. In addition, non-neutralizing antibodies may be used to capture the peptide and immobilize it on the solid support.

[0982] This invention also contemplates the use of competitive drug screening assays in which neutralizing antibodies capable of binding polypeptides of the invention specifically compete with a test compound for binding to the polypeptides or fragments thereof. In this manner, the antibodies are used to detect the presence of any peptide which shares one or more antigenic epitopes with a polypeptide of the invention.

### Example 55

### Phosphorylation Assay

[0983] In order to assay for phosphorylation activity of the polypeptides of the invention, a phosphorylation assay as described in U.S. Pat. No. 5,958,405 (which is herein incorporated by reference) is utilized. Briefly, phosphorylation activity may be measured by phosphorylation of a protein substrate using gamma-labeled ³²P-ATP and quantitation of the incorporated radioactivity using a gamma radioisotope counter. The polypeptides of the invention are incubated with the protein substrate, ³²P-ATP, and a kinase buffer. The ³²P incorporated into the substrate is then separated from free ³²P-ATP by electrophoresis, and the incorporated ³²P is counted and compared to a negative control. Radioactivity counts above the negative control are indicative of phosphorylation activity of the polypeptides of the invention.

### Example 56

### Detection of Phosphorylation Activity (Activation) of the Polypeptides of the Invention in the Presence of Polypeptide Ligands

[0984] Methods known in the art or described herein may be used to determine the phosphorylation activity of the polypeptides of the invention. A preferred method of determining phosphorylation activity is by the use of the tyrosine phosphorylation assay as described in U.S. Pat. No. 5,817,471 (incorporated herein by reference).

### Example 57

### Identification of Signal Transduction Proteins that Interact With Polypeptides of the Present Invention

[0985] The purified polypeptides of the invention are research tools for the identification, characterization and purification of additional signal transduction pathway proteins or receptor proteins. Briefly, labeled receptor PTK polypeptide is useful as a reagent for the purification of molecules with which it interacts. In one embodiment of affinity purification, receptor PTK polypeptide is covalently coupled to a chromatography column. Cell-free extract derived from putative target cells, such as carcinoma tissues, is passed over the column, and molecules with appropriate affinity bind to the receptor PTK polypeptides, or specific phosphotyrosine-recognition domains thereof. The receptor PTK polypeptide interacting protein-complex is recovered from the column, dissociated, and the recovered molecule subjected to N-terminal protein sequencing. This amino acid sequence is then used to identify the captured molecule or to design degenerate oligonucleotide probes for cloning the relevant gene from an appropriate cDNA library.

### Example 58

### IL-6 Bioassay

[0986] To test the proliferative effects of the polypeptides of the invention, the IL-6 Bioassay as described by Marz et al is utilized (Proc. Natl. Acad. Sci., U.S.A., 95:3251-56 (1998), which is herein incorporated by reference). Briefly, IL-6 dependent B9 murine cells are washed three times in IL-6 free medium and plated at a concentration of 5,000 cells per well in 50 μl, and 50 μl of the IL-6-like polypeptide is added. After 68 hrs. at 37° C., the number of viable cells is measured by adding the tetrazolium salt thiazolyl blue (MTT) and incubating for a further 4 hrs. at 37° C. B9 cells are lysed by SDS and optical density is measured at 570 nm. Controls containing IL-6 (positive) and no cytokine (negative) are utilized. Enhanced proliferation in the test sample(s) relative to the negative control is indicative of proliferative effects mediated by polypeptides of the invention.

### Example 59

### Support of Chicken Embryo Neuron Survival

[0987] To test whether sympathetic neuronal cell viability is supported by polypeptides of the invention, the chicken embryo neuronal survival assay of Senaldi et al is utilized (Proc. Natl. Acad. Sci., U.S.A., 96:11458-63 (1998), which is herein incorporated by reference). Briefly, motor and sympathetic neurons are isolated from chicken embryos, resuspended in L15 medium (with 10% FCS, glucose, sodium selenite, progesterone, conalbumin, putrescine, and insulin; Life Technologies, Rockville, Md.) and Dulbecco's modified Eagles medium [with 10% FCS, glutamine, penicillin, and 25 mM Hepes buffer (pH 7.2); Life Technologies, Rockville, Md.], respectively, and incubated at 37° C. in 5% CO₂ in the presence of different concentrations of the purified IL-6-like polypeptide, as well as a negative control lacking any cytokine. After 3 days, neuron survival is determined by evaluation of cellular morphology, and through the use of the calorimetric assay of Mosmann (Mossman, T., J. Immunol. Methods, 65:55-63 (1983)). Enhanced neuronal cell viability as compared to the controls lacking cytokine is indicative of the ability of the inventive purified IL-6-like polypeptide(s) to enhance the survival of neuronal cells.

### Example 60

### Assay for Phosphatase Activity

[0988] The following assay may be used to assess serine/threonine phosphatase (PTPase) activity of the polypeptides of the invention.

[0989] In order to assay for serine/threonine phosphatase (PTPase) activity, assays can be utilized which are widely known to those skilled in the art. For example, the serine/threonine phosphatase (PSPase) activity is measured using a PSPase assay kit from New England Biolabs, Inc. Myelin basic protein (MyBP), a substrate for PSPase, is phosphorylated on serine and threonine residues with cAMP-dependent Protein Kinase in the presence of [³²P]ATP. Protein serine/threonine phosphatase activity is then determined by measuring the release of inorganic phosphate from 32P-labeled MyBP.

### Example 61

### Interaction of Serine/Threonine Phosphatases with Other Proteins

[0990] The polypeptides of the invention with serine/threonine phosphatase activity as determined in Example 60 are research tools for the identification, characterization and purification of additional interacting proteins or receptor proteins, or other signal transduction pathway proteins. Briefly, labeled polypeptide(s) of the invention is useful as a reagent for the purification of molecules with which it interacts. In one embodiment of affinity purification, polypeptide of the invention is covalently coupled to a chromatography column. Cell-free extract derived from putative target cells, such as neural or liver cells, is passed over the column, and molecules with appropriate affinity bind to the polypeptides of the invention. The polypeptides of the invention complex is recovered from the column, dissociated, and the recovered molecule subjected to N-terminal protein sequencing. This amino acid sequence is then used to identify the captured molecule or to design degenerate oligonucleotide probes for cloning the relevant gene from an appropriate cDNA library.

### Example 62

### Assaying for Heparanase Activity

[0991] In order to assay for heparanase activity of the polypeptides of the invention, the heparanase assay described by Vlodavsky et al is utilized (Vlodavsky, I., et al., Nat. Med., 5:793-802 (1999)). Briefly, cell lysates, conditioned media or intact cells (1×10⁶ cells per 35-mm dish) are incubated for 18 hrs at 37° C., pH 6.2-6.6, with ³⁵S-labeled ECM or soluble ECM derived peak I proteoglycans. The incubation medium is centrifuged and the supernatant is analyzed by gel filtration on a Sepharose CL-6B column (0.9×30 cm). Fractions are eluted with PBS and their radioactivity is measured. Degradation fragments of heparan sulfate side chains are eluted from Sepharose 6B at 0.5<Kₐᵥ<0.8 (peak II). Each experiment is done at least three times. Degradation fragments corresponding to “peak II,” as described by Vlodavsky et al., is indicative of the activity of the polypeptides of the invention in cleaving heparan sulfate.

### Example 63

### Immobilization of Biomolecules

[0992] This example provides a method for the stabilization of polypeptides of the invention in non-host cell lipid bilayer constucts (see, e.g., Bieri et al., Nature Biotech 17:1105-1108 (1999), hereby incorporated by reference in its entirety herein) which can be adapted for the study of polypeptides of the invention in the various functional assays described above. Briefly, carbohydrate-specific chemistry for biotinylation is used to confine a biotin tag to the extracellular domain of the polypeptides of the invention, thus allowing uniform orientation upon immobilization. A 50 uM solution of polypeptides of the invention in washed membranes is incubated with 20 mM NaIO4 and 1.5 mg/ml (4 mM) BACH or 2 mg/ml (7.5 mM) biotin-hydrazide for 1 hr at room temperature (reaction volume, 150 ul). Then the sample is dialyzed (Pierce Slidealizer Cassett, 10 kDa cutoff; Pierce Chemical Co., Rockford Ill.) at 4 C. first for 5 h, exchanging the buffer after each hour, and finally for 12 h against 500 ml buffer R (0.15 M NaCl, 1 mM MgCl2, 10 mM sodium phosphate, pH7). Just before addition into a cuvette, the sample is diluted 1:5 in buffer ROG50 (Buffer R supplemented with 50 mM octylglucoside).

### Example 64

### TAQMAN

[0993] Quantitative PCR (QPCR). Total RNA from cells in culture are extracted by Trizol separation as recommended by the supplier (LifeTechnologies). (Total RNA is treated with DNase I (Life Technologies) to remove any contaminating genomic DNA before reverse transcription.) Total RNA (50 ng) is used in a one-step, 50 ul, RT-QPCR, consisting of Taqman Buffer A (Perkin-Elmer; 50 mM KCl/10 mM Tris, pH 8.3), 5.5 mM MgCl₂, 240 μM each dNTP, 0.4 units RNase inhibitor(Promega), 8% glycerol, 0.012% Tween-20, 0.05% gelatin, 0.3 uM primers, 0.1 uM probe, 0.025 units Amplitaq Gold (Perkin-Elmer) and 2.5 units Superscript II reverse transcriptase (Life Technologies). As a control for genomic contamination, parallel reactions are setup without reverse transcriptase. The relative abundance of (unknown) and 18S RNAs are assessed by using the Applied Biosystems Prism 7700 Sequence Detection System (Livak, K. J., Flood, S. J., Marmaro, J., Giusti, W. & Deetz, K. (1995) PCR Methods Appl. 4, 357-362). Reactions are carried out at 48° C. for 30 min, 95° C. for 10 min, followed by 40 cycles of 95° C. for 15 s, 60° C. for 1 min. Reactions are performed in triplicate.

[0994] Primers (f & r) and FRET probes sets are designed using Primer Express Software (Perkin-Elmer). Probes are labeled at the 5′-end with the reporter dye 6-FAM and on the 3′-end with the quencher dye TAMRA (Biosource International, Camarillo, Calif. or Perkin-Elmer).

### Example 65

### Assays for Metalloproteinase Activity

[0995] Metalloproteinases (EC 3.4.24.−) are peptide hydrolases which use metal ions, such as Zn²⁺, as the catalytic mechanism. Metalloproteinase activity of polypeptides of the present invention can be assayed according to the following methods.

[0996] Proteolysis of Alpha-2-macroglobulin

[0997] To confirm protease activity, purified polypeptides of the invention are mixed with the substrate alpha-2-macroglobulin (0.2 unit/ml; Boehringer Mannheim, Germany) in 1× assay buffer (50 mM HEPES, pH 7.5, 0.2 M NaCl, 10 mM CaCl₂, 25 μM ZnCl₂ and 0.05% Brij-35) and incubated at 37° C. for 1-5 days. Trypsin is used as positive control. Negative controls contain only alpha-2-macroglobulin in assay buffer. The samples are collected and boiled in SDS-PAGE sample buffer containing 5% 2-mercaptoethanol for 5-min, then loaded onto 8% SDS-polyacrylamide gel. After electrophoresis the proteins are visualized by silver staining. Proteolysis is evident by the appearance of lower molecular weight bands as compared to the negative control.

[0998] Inhibition of Alpha-2-macroglobulin Proteolysis by Inhibitors of Metalloproteinases

[0999] Known metalloproteinase inhibitors (metal chelators (EDTA, EGTA, AND HgCl₂), peptide metalloproteinase inhibitors (TIMP-1 and TIMP-2), and commercial small molecule MMP inhibitors) are used to characterize the proteolytic activity of polypeptides of the invention. The three synthetic MMP inhibitors used are: MMP inhibitor I, [IC₅₀=1.0 μM against MMP-1 and MMP-8; IC₅₀=30 μM against MMP-9; IC₅₀=150 μM against MMP-3]; MMP-3 (stromelysin-1) inhibitor I [IC₅₀=5 μM against MMP-3], and MMP-3 inhibitor II [Kᵢ=130 nM against MMP-3]; inhibitors available through Calbiochem, catalog # 444250, 444218, and 444225, respectively). Briefly, different concentrations of the small molecule MMP inhibitors are mixed with purified polypeptides of the invention (50 μg/ml) in 22.9 μl of 1× HEPES buffer (50 mM HEPES, pH 7.5, 0.2 M NaCl, 10 mM CaCl₂, 25 μM ZnCl₂ and 0.05% Brij-35) and incubated at room temperature (24° C.) for 2-hr, then 7.1 μl of substrate alpha-2-macroglobulin (0.2 unit/ml) is added and incubated at 37° C. for 20-hr. The reactions are stopped by adding 4× sample buffer and boiled immediately for 5 minutes. After SDS-PAGE, the protein bands are visualized by silver stain.

[1000] Synthetic Fluorogenic Peptide Substrates Cleavage Assay

[1001] The substrate specificity for polypeptides of the invention with demonstrated metalloproteinase activity can be determined using synthetic fluorogenic peptide substrates (purchased from BACHEM Bioscience Inc). Test substrates include, M-1985, M-2225, M-2105, M-2110, and M-2255. The first four are MMP substrates and the last one is a substrate of tumor necrosis factor-α (TNF-α) converting enzyme (TACE). All the substrates are prepared in 1:1 dimethyl sulfoxide (DMSO) and water. The stock solutions are 50-500 μM. Fluorescent assays are performed by using a Perkin Elmer LS 50B luminescence spectrometer equipped with a constant temperature water bath. The excitation λ is 328 nm and the emission λ is 393 nm. Briefly, the assay is carried out by incubating 176 μl 1× HEPES buffer (0.2 M NaCl, 10 mM CaCl₂, 0.05% Brij-35 and 50 mM HEPES, pH 7.5) with 4 μl of substrate solution (50 μM) at 25° C. for 15 minutes, and then adding 20 μl of a purified polypeptide of the invention into the assay cuvett. The final concentration of substrate is 1 μM. Initial hydrolysis rates are monitored for 30-min.

### Example 66

### Characterization of the cDNA Contained in a Deposited Plasmid

[1002] The size of the cDNA insert contained in a deposited plasmid may be routinely determined using techniques known in the art, such as PCR amplification using synthetic primers hybridizable to the 3′ and 5′ ends of the cDNA sequence. For example, two primers of 17-30 nucleotides derived from each end of the cDNA (i.e., hybridizable to the absolute 5′ nucleotide or the 3′ nucleotide end of the sequence of SEQ ID NO:X, respectively) are synthesized and used to amplify the cDNA using the deposited cDNA plasmid as a template. The polymerase chain reaction is carried out under routine conditions, for instance, in 25 ul of reaction mixture with 0.5 ug of the above cDNA template. A convenient reaction mixture is 1.5-5 mM MgCl₂, 0.01% (w/v) gelatin, 20 uM each of dATP, dCTP, dGTP, dTTP, 25 pmol of each primer and 0.25 Unit of Taq polymerase. Thirty five cycles of PCR (denaturation at 94 degree C. for 1 min; annealing at 55 degree C. for 1 min; elongation at 72 degree C. for 1 min) are performed with a Perkin-Elmer Cetus automated thermal cycler. The amplified product is analyzed by agarose gel electrophoresis. The PCR product is verified to be the selected sequence by subcloning and sequencing the DNA product.

[1003] Use of the above methodologies and/or other methodologies known in the art generates fragments from the clone corresponding to the approximate fragments described in Table 8, below. Accordingly, Table 8 provides a physical characterization of certain clones encompassed by the invention. The first column provides the unique clone identifier, “Clone ID NO:Z”, for cDNA clones of the invention, as described in Table 1A. The second column provides the approximate size of the cDNA insert contained in the corresponding cDNA clone.

TABLE 8

| | cDNA |
|---|---|
| Clone ID | Insert |
| NO:Z | Size |
| HADCK83 | 700 |
| HOUFB87 | 1300 |
| HKADG12 | 400 |
| HFEAJ78 | 600 |
| HERAH85 | 500 |
| HERAD26 | 500 |

[1004] It will be clear that the invention may be practiced otherwise than as particularly described in the foregoing description and examples. Numerous modifications and variations of the present invention are possible in light of the above teachings and, therefore, are within the scope of the appended claims.

[1005] The entire disclosure of each document cited (including patents, patent applications, journal articles, abstracts, laboratory manuals, books, or other disclosures) in the Background of the Invention, Detailed Description, and Examples is hereby incorporated herein by reference. In addition, the CD-R copy of the sequence listing submitted herewith and the corresponding computer readable form are both incorporated herein by reference in their entireties. The specification and Sequence Listing of each of the following U.S. applications are herein incorporated by reference in their entirety: Application No. 60/179,065, filed on Jan. 31, 2000; Application No. 60/180,628, filed on Feb. 4, 2000; Application No. 60/214,886, filed on Jun. 28, 2000; Application No. 60/217,487, filed on Jul. 11, 2000; Application No. 60/225,758, filed on Aug. 14, 2000; Application No. 60/220,963, filed on Jul. 26, 2000; Application No. 60/217,496, filed on Jul. 11, 2000; Application No. 60/225,447, filed on Aug. 14, 2000; Application No. 60/218,290, filed on Jul. 14, 2000; Application No. 60/225,757 , filed on Aug. 14, 2000; Application No. 60/226,868, filed on Aug. 22, 2000; Application No. 60/216,647, filed on Jul. 7, 2000; Application No. 60/225,267, filed on Aug. 14, 2000; Application No. 60/216,880, filed on Jul. 7, 2000; Application No. 60/225,270, filed on Aug. 14, 2000; Application No. 60/251,869, filed on Dec. 8, 2000; Application No. 60/235,834, filed on Sep. 27, 2000; Application No. 60/234,274, filed on Sep. 21, 2000; Application No. 60/234,223, filed on Sep. 21, 2000; Application No. 60/228,924, filed on Aug. 30, 2000; Application No. 60/224,518, filed on Aug. 14, 2000; Application No. 60/236,369, filed on Sep. 29, 2000; Application No. 60/224,519, filed on Aug. 14, 2000; Application No. 60/220,964, filed on Jul. 26, 2000; Application No. 60/241,809, filed on Oct. 20, 2000; Application No. 60/249,299, filed on Nov. 17, 2000; Application No. 60/236,327, filed on Sep. 29, 2000; Application No. 60/241,785, filed on Oct. 20, 2000; Application No. 60/244,617, filed on Nov. 1, 2000; Application No. 60/225,268, filed on Aug. 14, 2000; Application No. 60/236,368, filed on Sep. 29, 2000; Application No. 60/251,856, filed on Dec. 8, 2000; Application No. 60/251,868, filed on Dec. 8, 2000; Application No. 60/229,344, filed on Sep. 1, 2000; Application No. 60/234,997, filed on Sep. 25, 2000; Application No. 60/229,343, filed on Sep. 1, 2000; Application No. 60/229,345, filed on Sep. 1, 2000; Application No. 60/229,287, filed on Sep. 1, 2000; Application No. 60/229,513, filed on Sep. 5, 2000; Application No. 60/231,413, filed on Sep. 8, 2000; Application No. 60/229,509, filed on Sep. 5, 2000; Application No. 60/236,367, filed on Sep. 29, 2000; Application No. 60/237,039, filed on Oct. 2, 2000; Application No. 60/237,038, filed on Oct. 2, 2000; Application No. 60/236,370, filed on Sep. 29, 2000; Application No. 60/236,802, filed on Oct. 2, 2000; Application No. 60/237,037, filed on Oct. 2, 2000; Application No. 60/237,040, filed on Oct. 2, 2000; Application No. 60/240,960, filed on Oct. 20, 2000; Application No. 60/239,935, filed on Oct. 13, 2000; Application No. 60/239,937, filed on Oct. 13, 2000; Application No. 60/241,787, filed on Oct. 20, 2000; Application No. 60/246,474, filed on Nov. 8, 2000; Application No. 60/246,532, filed on Nov. 8, 2000; Application No. 60/249,216, filed on Nov. 17, 2000; Application No. 60/249,210, filed on Nov. 17, 2000; Application No. 60/226,681, filed on Aug. 22, 2000; Application No. 60/225,759, filed on Aug. 14, 2000; Application No. 60/225,213, filed on Aug. 14, 2000; Application No. 60/227,182, filed on Aug. 22, 2000; Application No. 60/225,214, filed on Aug. 14, 2000; Application No. 60/235,836, filed on Sep. 27, 2000; Application No. 60/230,438, filed on Sep. 6, 2000; Application No. 60/215,135, filed on Jun. 30, 2000; Application No. 60/225,266, filed on Aug. 14, 2000; Application No. 60/249,218, filed on Nov. 17, 2000; Application No. 60/249,208, filed on Nov. 17, 2000; Application No. 60/249,213, filed on Nov. 17, 2000; Application No. 60/249,212, filed on Nov. 17, 2000; Application No. 60/249,207, filed on Nov. 17, 2000; Application No. 60/249,245, filed on Nov. 17, 2000; Application No. 60/249,244, filed on Nov. 17, 2000; Application No. 60/249,217, filed on Nov. 17, 2000; Application No. 60/249,211, filed on Nov. 17, 2000; Application No. 60/249,215, filed on Nov. 17, 2000; Application No. 60/249,264, filed on Nov. 17, 2000; Application No. 60/249,214, filed on Nov. 17, 2000; Application No. 60/249,297, filed on Nov. 17, 2000; Application No. 60/232,400, filed on Sep. 14, 2000; Application No. 60/231,242, filed on Sep. 8, 2000; Application No. 60/232,081, filed on Sep. 8, 2000; Application No. 60/232,080, filed on Sep. 8, 2000; Application No. 60/231,414, filed on Sep. 8, 2000; Application No. 60/231,244, filed on Sep. 8, 2000; Application No. 60/233,064, filed on Sep. 14, 2000; Application No. 60/233,063, filed on Sep. 14, 2000; Application No 60/232,397, filed on Sep. 14, 2000; Application No. 60/232,399, filed on Sep. 14, 2000; Application No. 60/232,401, filed on Sep. 14, 2000; Application No. 60/241,808, filed on Oct. 20, 2000; Application No. 60/241,826, filed on Oct. 20, 2000; Application No. 60/241,786, filed on Oct. 20, 2000; Application No. 60/241,221, filed on Oct. 20, 2000; Application No. 60/246,475, filed on Nov. 8, 2000; Application No. 60/231,243, filed on Sep. 8, 2000; Application No. 60/233,065, filed on Sep. 14, 2000; Application No. 60/232,398, filed on Sep. 14, 2000; Application No. 60/234,998, filed on Sep. 25, 2000; Application No. 60/246,477, filed on Nov. 8, 2000; Application No. 60/246,528, filed on Nov. 8, 2000; Application No.60/246,525, filed on Nov. 8, 2000; Application No.60/246,476, filed on Nov. 8, 2000; Application No. 60/246,526, filed on Nov. 8, 2000; Application No. PT172, filed on Nov. 17, 2000; Application No. 60/246,527, filed on Nov. 8, 2000; Application No.60/246,523, filed on Nov. 8, 2000; Application No.60/246,524, filed on Nov. 8, 2000; Application No. 60/246,478, filed on Nov. 8, 2000; Application No. 60/246,609, filed on Nov. 8, 2000; Application No. 60/246,613, filed on Nov. 8, 2000; Application No. 60/249,300, filed on Nov. 17, 2000; Application No. 60/249,265, filed on Nov. 17, 2000; Application No. 60/246,610, filed on Nov. 8, 2000; Application No. 60/246,611, filed on Nov. 8, 2000; Application No. 60/230,437, filed on Sep. 6, 2000; Application No. 60/251,990, filed on Dec. 8, 2000; Application No. 60/251,988, filed on Dec. 5, 2000; Application No. 60/251,030, filed on Dec. 5, 2000; Application No. 60/251,479, filed on Dec. 6, 2000; Application No. PJ0005, filed on Dec. 5, 2000; Application No. PJ0006, filed on Dec. 1, 2000; Application No. 60/251,989, filed on Dec. 8, 2000; Application No. 60/250,391, filed on Dec. 1, 2000; and Application No. 60/254,097, filed on Dec. 11, 2000.

[1006] Moreover, the microfiche copy and the corresponding computer readable form of the Sequence Listing of U.S. Application Ser. No. 60/179,065, and the hard copy of and the corresponding computer readable form of the Sequence Listing of U.S. Application Ser. No. 60/180,628 are also incorporated herein by reference in their entireties.

What is claimed is:

1. An isolated nucleic acid molecule comprising a polynucleotide having a nucleotide sequence at least 95% identical to a sequence selected from the group consisting of:
(a) a polynucleotide fragment of SEQ ID NO:X or a polynucleotide fragment of the cDNA sequence contained in Clone ID NO:Z, which is hybridizable to SEQ ID NO:X;
(b) a polynucleotide encoding a polypeptide fragment of SEQ ID NO:Y or a polypeptide fragment encoded by the cDNA sequence contained in cDNA Clone ID NO:Z, which is hybridizable to SEQ ID NO:X;
(c) a polynucleotide encoding a polypeptide fragment of a polypeptide encoded by SEQ ID NO:X or a polypeptide fragment encoded by the cDNA sequence contained in cDNA Clone ID NO:Z, which is hybridizable to SEQ ID NO:X;
(d) a polynucleotide encoding a polypeptide domain of SEQ ID NO:Y or a polypeptide domain encoded by the cDNA sequence contained in cDNA Clone ID NO:Z, which is hybridizable to SEQ ID NO:X;
(e) a polynucleotide encoding a polypeptide epitope of SEQ ID NO:Y or a polypeptide epitope encoded by the cDNA sequence contained in cDNA Clone ID NO:Z, which is hybridizable to SEQ ID NO:X;
(f) a polynucleotide encoding a polypeptide of SEQ ID NO:Y or the cDNA sequence contained in cDNA Clone ID NO:Z, which is hybridizable to SEQ ID NO:X, having biological activity;
(g) a polynucleotide which is a variant of SEQ ID NO:X;
(h) a polynucleotide which is an allelic variant of SEQ ID NO:X;
(i) a polynucleotide which encodes a species homologue of the SEQ ID NO:Y;
(j) a polynucleotide capable of hybridizing under stringent conditions to any one of the polynucleotides specified in (a)-(i), wherein said polynucleotide does not hybridize under stringent conditions to a nucleic acid molecule having a nucleotide sequence of only A residues or of only T residues.

2. The isolated nucleic acid molecule of claim 1, wherein the polynucleotide fragment comprises a nucleotide sequence encoding a protein.

3. The isolated nucleic acid molecule of claim 1, wherein the polynucleotide fragment comprises a nucleotide sequence encoding the sequence identified as SEQ ID NO:Y or the polypeptide encoded by the cDNA sequence contained in cDNA Clone ID NO:Z, which is hybridizable to SEQ ID NO:X.

4. The isolated nucleic acid molecule of claim 1, wherein the polynucleotide fragment comprises the entire nucleotide sequence of SEQ ID NO:X or the cDNA sequence contained in cDNA Clone ID NO:Z, which is hybridizable to SEQ ID NO:X.

5. The isolated nucleic acid molecule of claim 2, wherein the nucleotide sequence comprises sequential nucleotide deletions from either the C-terminus or the N-terminus.

6. The isolated nucleic acid molecule of claim 3, wherein the nucleotide sequence comprises sequential nucleotide deletions from either the C-terminus or the N-terminus.

7. A recombinant vector comprising the isolated nucleic acid molecule of claim 1.

8. A method of making a recombinant host cell comprising the isolated nucleic acid molecule of claim 1.

9. A recombinant host cell produced by the method of claim 8.

10. The recombinant host cell of claim 9 comprising vector sequences.

11. An isolated polypeptide comprising an amino acid sequence at least 90% identical to a sequence selected from the group consisting of:
(a) a polypeptide fragment of SEQ ID NO:Y or the encoded sequence contained in cDNA Clone ID NO:Z;
(b) a polypeptide fragment of SEQ ID NO:Y or the encoded sequence contained in cDNA Clone ID NO:Z, having biological activity;
(c) a polypeptide domain of SEQ ID NO:Y or the encoded sequence contained in cDNA Clone ID NO:Z;
(d) a polypeptide epitope of SEQ ID NO:Y or the encoded sequence contained in cDNA Clone ID NO:Z;
(e) a full length protein of SEQ ID NO:Y or the encoded sequence contained in cDNA Clone ID NO:Z;
(f) a variant of SEQ ID NO:Y;
(g) an allelic variant of SEQ ID NO:Y; or
(h) a species homologue of the SEQ ID NO:Y.

12. The isolated polypeptide of claim 11, wherein the full length protein comprises sequential amino acid deletions from either the C-terminus or the N-terminus.

13. An isolated antibody that binds specifically to the isolated polypeptide of claim 11.

14. A recombinant host cell that expresses the isolated polypeptide of claim 11.

15. A method of making an isolated polypeptide comprising:
(a) culturing the recombinant host cell of claim 14 under conditions such that said polypeptide is expressed; and
(b) recovering said polypeptide.

16. The polypeptide produced by claim 15.

17. A method for preventing, treating, or ameliorating a medical condition, comprising administering to a mammalian subject a therapeutically effective amount of the polynucleotide of claim 1.

18. A method of diagnosing a pathological condition or a susceptibility to a pathological condition in a subject comprising:
(a) determining the presence or absence of a mutation in the polynucleotide of claim 1; and
(b) diagnosing a pathological condition or a susceptibility to a pathological condition based on the presence or absence of said mutation.

19. A method of diagnosing a pathological condition or a susceptibility to a pathological condition in a subject comprising:
(a) determining the presence or amount of expression of the polypeptide of claim 11 in a biological sample; and
(b) diagnosing a pathological condition or a susceptibility to a pathological condition based on the presence or amount of expression of the polypeptide.

20. A method for identifying a binding partner to the polypeptide of claim 11 comprising:
(a) contacting the polypeptide of claim 11 with a binding partner; and
(b) determining whether the binding partner effects an activity of the polypeptide.

21. The gene corresponding to the cDNA sequence of SEQ ID NO:Y.

22. A method of identifying an activity in a biological assay, wherein the method comprises:
(a) expressing SEQ ID NO:X in a cell;
(b) isolating the supernatant;
(c) detecting an activity in a biological assay; and
(d) identifying the protein in the supernatant having the activity.

23. The product produced by the method of claim 20.

24. A method for preventing, treating, or ameliorating a medical condition, comprising administering to a mammalian subject a therapeutically effective amount of the polypeptide of claim 11.

The application's sequence listing, which the Patent Office published only in electronic form, follows.

SEQUENCE LISTING (2003 sequences)

SEQ ID NO: 1 - DNA, 733 bp, Homo sapiens
gggatccggagcccaaatcttctgacaaaactcacacatgcccaccgtgcccagcacctgaattcgagggtgcaccgtcagtcttcctcttccccccaaaacccaaggacaccctcatgatctcccggactcctgaggtcacatgcgtggtggtggacgtaagccacgaagaccctgaggtcaagttcaactggtacgtggacggcgtggaggtgcataatgccaagacaaagccgcgggaggagcagtacaacagcacgtaccgtgtggtcagcgtcctcaccgtcctgcaccaggactggctgaatggcaaggagtacaagtgcaaggtctccaacaaagccctcccaacccccatcgagaaaaccatctccaaagccaaagggcagccccgagaaccacaggtgtacaccctgcccccatcccgggatgagctgaccaagaaccaggtcagcctgacctgcctggtcaaaggcttctatccaagcgacatcgccgtggagtgggagagcaatgggcagccggagaacaactacaagaccacgcctcccgtgctggactccgacggctccttcttcctctacagcaagctcaccgtggacaagagcaggtggcagcaggggaacgtcttctcatgctccgtgatgcatgaggctctgcacaaccactacacgcagaagagcctctccctgtctccgggtaaatgagtgcgacggccgcgactctagaggat

SEQ ID NO: 2 - protein, 5 aa, Homo sapiens
  Site (3): Xaa equals any of the twenty naturally ocurring L-amino acids
WSXWS

SEQ ID NO: 3 - DNA, 86 bp, Artificial Sequence
  Primer_Bind: Synthetic sequence with 4 tandem copies of the GAS binding site found in the IRF1 promoter (Rothman et al., Immunity 1:457-468 (1994)), 18 nucleotides complementary to the SV40 early promoter, and a Xho I restriction site.
gcgcctcgagatttccccgaaatctagatttccccgaaatgatttccccgaaatgatttccccgaaatatctgccatctcaattag

SEQ ID NO: 4 - DNA, 27 bp, Artificial Sequence
  Primer_Bind: Synthetic sequence complementary to the SV40 promter; includes a Hind III restriction site.
gcggcaagctttttgcaaagcctaggc

SEQ ID NO: 5 - DNA, 271 bp, Artificial Sequence
  Protein_Bind: Synthetic promoter for use in biological assays; includes GAS binding sites found in the IRF1 promoter (Rothman et al., Immunity 1:457-468 (1994)).
ctcgagatttccccgaaatctagatttccccgaaatgatttccccgaaatgatttccccgaaatatctgccatctcaattagtcagcaaccatagtcccgcccctaactccgcccatcccgcccctaactccgcccagttccgcccattctccgccccatggctgactaattttttttatttatgcagaggccgaggccgcctcggcctctgagctattccagaagtagtgaggaggcttttttggaggcctaggcttttgcaaaaagctt

SEQ ID NO: 6 - DNA, 32 bp, Artificial Sequence
  Primer_Bind: Synthetic primer complementary to human genomic EGR-1 promoter sequence (Sakamoto et al., Oncogene 6:867-871 (1991)); includes a Xho I restriction site.
gcgctcgagggatgacagcgatagaaccccgg

SEQ ID NO: 7 - DNA, 31 bp, Artificial Sequence
  Primer_Bind: Synthetic primer complementary to human genomic EGR-1 promoter sequence (Sakamoto et al., Oncogene 6:867-871 (1991)); includes a Hind III restriction site.
gcgaagcttcgcgactccccggatccgcctc

SEQ ID NO: 8 - DNA, 12 bp, Homo sapiens
ggggactttccc

SEQ ID NO: 9 - DNA, 73 bp, Artificial Sequence
  Primer_Bind: Synthetic primer with 4 tandem copies of the NF-KB binding site (GGGGACTTTCCC), 18 nucleotides complementary to the 5' end of the SV40 early promoter sequence, and a XhoI restriction site.
gcggcctcgaggggactttcccggggactttccggggactttccgggactttccatcctgccatctcaattag

SEQ ID NO: 10 - DNA, 256 bp, Artificial Sequence
  Protein_Bind: Synthetic promoter for use in biological assays; includes NF-KB binding sites.
ctcgaggggactttcccggggactttccggggactttccgggactttccatctgccatctcaattagtcagcaaccatagtcccgcccctaactccgcccatcccgcccctaactccgcccagttccgcccattctccgccccatggctgactaattttttttatttatgcagaggccgaggccgcctcggcctctgagctattccagaagtagtgaggaggcttttttggaggcctaggcttttgcaaaaagctt

SEQ ID NO: 11 - DNA, 156 bp, Homo sapiens
  SITE (141): n equals a,t,g, or c
ggggtttgcggctcgcccgstggctccggcccggttcccccgggccgtccctcgcgcccgtggtcggtcttccttttctcccggtgctgctggtggggctgccgttggtcccggtgctgctgttggggctgccggtgctgnccgcgcccgcccctg

SEQ ID NO: 12 - DNA, 443 bp, Homo sapiens
  SITE (354): n equals a,t,g, or c
  SITE (429): n equals a,t,g, or c
  SITE (431): n equals a,t,g, or c
ggcacagcggggcgcaggtagccaagctgctgccgctgctgctgcttctgcgggcgactggtttcacatgtgcacagacagatggccggaagtacacggcggtcatcgaagtgaccagcgggggtccctggggcgactgggcctggcctgagatgtgtcccgatggattcttcgccagcgggttctcgctcaaggtggagcctccccaaggcattcctggcgacgacactgcactgaatgggatcaggctgcactgcgcgcgcggraacgtcctaggcaatacgcacgtggtagagtcccagtctggaaggtggggcgcaggggtcgaggatcccttggggtgatgctggggcnaatggagtgagcccgctgtggtgtcgcggcggcgcctacctagtggctttctcgcttcgcgtggaggcacccacnancctcggtgacaa

SEQ ID NO: 13 - DNA, 201 bp, Homo sapiens
  SITE (17): n equals a,t,g, or c
  SITE (131): n equals a,t,g, or c
tgatcattaatgcagangcatattctctgccaaccaccatggaagcatatggcataacagcagctggtttcttccaacagctaaggaaagccatagccacaccgtcacaacaggagcacacggaasgcatncactttggcatcatacagaatatttcattgatgatccagcctgtgctccatcccaccaatgataattgca

SEQ ID NO: 14 - DNA, 428 bp, Homo sapiens
  SITE (333): n equals a,t,g, or c
  SITE (334): n equals a,t,g, or c
  SITE (363): n equals a,t,g, or c
  SITE (374): n equals a,t,g, or c
ataattttgttgcggcatgtgatcttccttaatgctataggtaattaaggcgagcgtttagtaaataataatgtactgatattaaggctaagcgtgcgggggaatttaaactgtgaaaagattcacaaatagctgcggttaggaatgtgatatccgcagcttatcagtgaagtaataattattctcmataattaactggagaggggaatattaacgatagaaaataagataaacaatcatgccgatagataaaattccgaagccgatatatgccaccatataagcgaaaaagatccggggatttttgctcgccagacatacaccggttccggnncattttttaacccgtttatccatcgcgcnggggcccagcntttcccaggcttcgcgggaaccaatttcggggttagggaaaaaacgggcaagac

SEQ ID NO: 15 - DNA, 356 bp, Homo sapiens
  SITE (347): n equals a,t,g, or c
cccaagaagcccacccccagcggagagctcgccagctgagatctgttccttgggcacaaacgttggccttctagaagaaactggagtcagtaaatccagccatggttagcccttcagcagggcatgggatgggggacatgagacctgcacccaggcacaatgacctggtcaggcttttgagcaggtgtaggagagagttggagcagagggacggccarggaaargtgacacggagaaggcagggtcatggtggcatagcctggccatgtgggggccccgcttgggctttccgttctcttcacatgtctcatcattggccattctgatcttggttaagattttgtggncttctccaa

SEQ ID NO: 16 - DNA, 356 bp, Homo sapiens
  SITE (354): n equals a,t,g, or c
ccaggaggctgtgagggggagaatgttcttttggccactgtraagcctcaggaaggggctcggattgctcaaggacccatgggagagaggaggctttgactgggctgcctgcctgtgaggtctctggactagaggtccaacgcatccagctgacaaggatggaatacgccatgaagtcccttagccttctstaccccaagtccctctccaggcatgtgtcagtgcgtacctctgtggtgacccagcagctgctgtcggagcccagccccaaggcccccaggcccggscctgccgcgttaacacggcggrttcgaascttgaggaagggctcatgggtttacatctttgaggacntc

SEQ ID NO: 17 - DNA, 406 bp, Homo sapiens
  SITE (264): n equals a,t,g, or c
  SITE (390): n equals a,t,g, or c
  SITE (395): n equals a,t,g, or c
  SITE (397): n equals a,t,g, or c
gtcgctttcctgacaccactggctcttggtttccctcctactttcctcaccattctttctcagtctctcatgcttctcttcctgcccacacttaagatgttgcagccctgggaagacttcatccttagaccttttctgttcttactctaaactatggtaattcttattttgcaagagtagatctccatggagtacaagagaagagaactttccttttcttccaattgccctttcatatctgctctgtgaggctcattttccccngatccttggaatgaagtccaaagccattctctgcaattctggatcactctgccaatagtgcaatgtgcctctggtgaactttagtgcacaaaagtctccaggagaatgaattgaacatgggccaangagtnangaagcagga

SEQ ID NO: 18 - DNA, 465 bp, Homo sapiens
gaatgaattaaaacctttccaccccttggtataaacatgtaattaacaaaacagagcttgaaccacacagagcagaaagcagaatcacacttcctggtcttttcctacatgaacaatttcctccatttaaagagcaggagacaaaaagcataacagactgacagggaaagagaaaggcaactgatctctcaaggtgaatccaagaaaatacaggacccactaatacagtaatctgtaaactacacagcctaatcacaatcaaagccttgccactagagaagcttaaagagggcactaagatgtggtcgtttctgctcgctgcattgttcctgcaagctaacattttttttccttaagtatttcagaagactaaactaaagatcaaagagagcaaggaggcctaccaatatgtgggtctctgatgactttccatcttagtggaaaataactgttagctaagtattg

SEQ ID NO: 19 - DNA, 460 bp, Homo sapiens
  SITE (460): n equals a,t,g, or c
gcctgtccaaaagcaaagcttttaaagctttaaggctagttagaccatttttcaacataatgataaaatgttctgttccatctttccaacttaatggtcagttggagacacgtgagagaaaggagaccatccagcaaattaggctacctctgataatctagttatggaaaaataacagtgaggaaarggtataaattcagagtttaggactacagatttccatcttgcttaaaccttttcaatataatctttaagcaagatggaaatctgtagtcctaaactctgaatttataccttgcttaaagattatattgaaaaggtttaattcttttatgtttctgaacttcttttgaactgcttcacatacgactacagagatatctgagttggttggatgcagtggctcatgcctgctcacacctgtaatcccagcacttttgggaggcggaggtgggcagan

SEQ ID NO: 20 - DNA, 682 bp, Homo sapiens
ccacgcgtccgactgaaatagccccaaatcacatggaccaatgcagtggtcagggccctggggaaactgcgtccctgtacctcattcatttctcttccatcattcaggtgcctgaagtgtgaggaatggtatgggcctcctgctctcaggttcttcctacacccagtataagtctgtcttacactgcaggttaaatttcctcctcctcagaagctcctcccttttgtttgcgtgcttcactgtgtcatgcagcacttgtcacaggttggctttccaacattattgagcactctttttttttttttgagatggagtctcgctctgtctcctgggctggagtgcagtggcgccatctctgctcactgcaacctccactttctgggttcaagcgattctctttgcagcctggtcaacatggtgaaacccatctctactaaaaatacaaaaattagccaggcatggtggtgcacacctgtaatcccagctactcagggggctgaggcaggaaaatctcttgaacccaggaggcagaggttgcattgagccgagattgtgccactgtacgccagcctgggcgacagagtgagaccctgtctcaaaaaaaaaaaaaaaaaaaaaaaaaaaaaaaaaaaaaaaaaaaaaaaaaaaaaaaaaaaaaaaaaaaaaaaaaaaaaaaaaaaaa

SEQ ID NO: 21 - DNA, 416 bp, Homo sapiens
  SITE (367): n equals a,t,g, or c
ggctgcgttggttttgaggctcacatatggtaaaagtggttggaaatctggaaatattgctgtgtatctgcaaagcagcttgatatagtggaaaaggtattaggtcattaatcatgagatttggattctagccccttagctgctgcctgccaggcctggagacctttgttctcttctttaaactgctgctttctcatcagaaaatgaagttcctctccataccacctctctgaagggctgtgaagctcgaagtggcagctttaaaaaactgcccatctcagggaggtgtcttaagaagggaggacataccgctgggctcctgcctttcttcacttagccaggtctggatacctgtgttgtttttcangtgggccatttaaggrattttccaaaggctttcagaaagcaacaggcca

SEQ ID NO: 22 - DNA, 309 bp, Homo sapiens
  SITE (297): n equals a,t,g, or c
  SITE (302): n equals a,t,g, or c
gcatacaattatcacatgagctagcccttccacatgtagatatttaccaaagagaagtgaaaatatttgtccacacaaagacttgcacacacatgtttatggcagctgaacattgggaacgtggccatcaacaagcagatggatgaacagactggggtgcacccttctgtggggatactgctcagccaggaaagggagcacctggtaacctgcagcatatgggcgaatctggaaagaattgtgcccaagtgcaggaggccacacaaagaaggatgtcctctaaagatctgacttacngagantctagat

SEQ ID NO: 23 - DNA, 334 bp, Homo sapiens
  SITE (328): n equals a,t,g, or c
  SITE (332): n equals a,t,g, or c
agaaatttctcataaggttgtagaaagagattgtaactttaactctacaatcataaggttgtagaaagagactgcctcctttaactttaccactctccacattggcatttactctaggagaggagatatagaggtttgtgctcttttaatattttgtatttccacattgctgattggggaaatccttttggtgactgatacctagagccttgaaaaatgtttatacattgttgagaatctttcctaaggagctaaatggaaaaattctatgcccacagatgtacttagcagtattattaataatagagaaaaatagaatacatccaangttnca

SEQ ID NO: 24 - DNA, 401 bp, Homo sapiens
  SITE (275): n equals a,t,g, or c
  SITE (310): n equals a,t,g, or c
  SITE (322): n equals a,t,g, or c
  SITE (331): n equals a,t,g, or c
gctgaattataaaagttcttaaggtaccacacaattctgaagtaccttctgaattatcaaaaaaaagttacgttatatagatttagatttatgtattcagttctttggaagctgcggttttgtatatggcaattcgtgattagaatattcaccagcttgcacagtgtaaagaaaatagttttgtaaattatgccatttggagaggtagctgctttttttaaaacatattctgaaatttgctctttgaactatagtctactgtagtttcactgtcnggcatcattttggaggaacgctacccctgaggttnccttttccagtnccatttccnagtttggagaatatccggttggaatccttgaatcccctggaaactggggttgttccatttggttaaaaag

SEQ ID NO: 25 - DNA, 369 bp, Homo sapiens
  SITE (298): n equals a,t,g, or c
gaaaaaaaattaataaataaaaataaaaataatttttttaatctgataaagccagacacttctgtagcctgagaggggcaggcaaatggggtggaaatttagtccctgggcacccactctaattaggaaatgtcatgggagacccttcccacaagaaactgggaccccaaagagctacaccctcagagtaaaagtgaaccagaactaaacttaccatggggggttgtggaaagggcagcgttggcactgagcagaataggagaagaaaaagacgggagraaaattacatattgacaantgtggttcacagaaaggcccactgtggatttgcccccgggacttacwtactcagggttagacggggaaact

SEQ ID NO: 26 - DNA, 331 bp, Homo sapiens
  SITE (325): n equals a,t,g, or c
  SITE (328): n equals a,t,g, or c
  SITE (331): n equals a,t,g, or c
gtaaaaattaactgttctttgttgaagactctatataagctgaaatcaaggctacctcttggagaattactcattctctgggtgtcttatatgtcatgtatatacaagacatacatgttcataagcttctgtttgtttttctcttgttaatctgtctttagttctaaggagtccattccaactaagaacctatgggggttgaagaaaaaatattcttcccctacacatctaaaggagtgactctttgagatctcctggcacacactaaatcgactgctactcgaccatkcggtgtcccttgmaatgtggtgttggttcagggaancgnggn

SEQ ID NO: 27 - DNA, 847 bp, Homo sapiens
  SITE (540): n equals a,t,g, or c
  SITE (715): n equals a,t,g, or c
  SITE (780): n equals a,t,g, or c
cacggccaagaccgtgctgaccggcaccaaggacacagtcactactgggctcatgggggcagtgaatgtcgccaaagggaccgtccagaccagtgtggacaccaccaagactgtcctaactggtaccaaggacaccgtctgcagtggggtgaccggtgctgcgaatgtggccaagggggccgtccaggggggcctggacactacaaagtctgtcctgactggcactaaagacaccgtatccactgggctcacaggggctgtgaacttggccaaagggactgtccagaccggcgtggacaccagcaagactgtcctgaccggtaccaaggacaccgtctgcagtggagtcactggtgccgtaaatgtggccaaaggcaccgtccagacaggtgtggacacagccaagacggtkctgagtggcgctaargatgcagtgactactggagtcacgggggcagtgaatgtggccaaaggaaccgtgcagaccggcgtggacgctcccaaggctgtgcttatgggtacaaggacactgtcttcatnggggttaccggtgccatgagcatggccaaaggggccgtccagggggcctggacaccaccaagacagtgctgaccggaaccaaagacgcatgttccgctgggctcatggggttcagggaacgtggcgacaggggccacccacactggcctcagcacctttccagaactggtttacnaattacccccgccacttctggggtggaattcaccatttccaggaccacagacaatggtggggganccaaattgcccttgagccccccaagaaggcccctttttttgggcatttccaaggcccccggatgttg

SEQ ID NO: 28 - DNA, 450 bp, Homo sapiens
  SITE (424): n equals a,t,g, or c
  SITE (443): n equals a,t,g, or c
ggacacggggcttttggccaccacacacggccccgaagaagccccacgcttggcaatgctgcagaatgagttggaggggctgggggacatcttccaccccatgaatgcggaggagcaagctcagctggctgcctcccagcccgggccaaaggtgctgtcggcggaacaggggagctacttcgttcgtttaggtgacctgggtcccagcttccgccagcgggcatttgaacacgcggtgagccacctgcagcacggccagttccaagccagggacactctggcccagctccaggactgcttcaggctgattgaaaaggcccagcaggctccagaagggcagccacgtctggaccagggctcaggtgccagtgcggaggacgctgctgtccaggaagagcgggatgcggggttctgtccaggtctncggcttctcggcactgcanacggcta

SEQ ID NO: 29 - DNA, 302 bp, Homo sapiens
  SITE (152): n equals a,t,g, or c
  SITE (177): n equals a,t,g, or c
  SITE (300): n equals a,t,g, or c
ggacaaatgtcagcttatatgaaaataacattttcccttcagttgctccctagatgtggagagccctctccctcatggaggctccttctatagcccttggactggattaacatgtcctcctcctcctctccctgtacccctccctaaatagnagtctggctctgtgtggctccaggntgctggtcttgggctccttcctgcttctcttctgtggccttctctgctgtgtcactgctatgtgcttccacccgcgccgggagttcccactggtctagaacccggctctgaggggcaatgggnct

SEQ ID NO: 30 - DNA, 440 bp, Homo sapiens
  SITE (368): n equals a,t,g, or c
ggttttaaagttccacagaaattactagctatttaatattattattatattagttcactttaatttacactaattttatagagaaataaatacttttaaaaagatgttttccagcagcctgagaatgactacaggatttagcagtagtgtcttgttttgaatggcatttaaacacttcagtcatagttttaatttgagaaatcaggattcagatttcctaagcaggcagtgtatcagctcttgtttttttctcagattaattattttgcagtgtgattgttgtctgtacttttggccaaccgtgggcctcaaattatttgagaattaggtgttgtatttaaaaaaaaaaagccaacaggagtcttgtnttctccgtgcgtaagggagtggccgaggggagcggatgagaacagtggcagcacgagtgccccggcctgggg

SEQ ID NO: 31 - DNA, 477 bp, Homo sapiens
  SITE (62): n equals a,t,g, or c
aattcccgggtcgacccacgcgtccgtgccaggaccgttccccgccctctgccccacgctgnaccgccacgagtgagcctgggtctgcagaccgttccccgccctctgccccacgctgacccccacgagtgagcctgggtctgcagactgttccccgccctctgccccagctgaccgccacgagtgagcctgggtctgcagactgttccccgccctctgccccacgctaacccaagccagcatcctctgctccatcacggatcccccagccagtgtcgtcagtgttctggctcccaccctctccctgacccttccctggtgcccatctgctgtctccccttgctttgcctgcctggggtccccttcctccagcccgtctgtcttgcttagaaaccctgaacactggggaacaggtcaaggaccttgtggctcctgaggtcaccaggagggcttctcagcctttcctcgtgaccagtt

SEQ ID NO: 32 - DNA, 487 bp, Homo sapiens
cccacgcgtccgtttgagtttactttttttcttatggccgctggtgaggggggatcttggaaacaagaaaatctgactattgtttagtatttttcctggtaggtgtctcttgccactgagtagaccttttgtaaaggggatggggtctttacaaacaatattgaggttaaactgaatcagttcttatgaattcagaccagtcagtgaataaaaacgttaaaatctgttctagccaaacattattggttcatagtattgatttattagtgttatatggatggtcagtcccctcacataattagcaaatctttcttgcagaacttttggctctttccagactatataattcaggtttttccaaattgtttgcagaattgttgaaaaaattctaccctaatactagacttaaaataatggtttawttccttgctctgggatggtggctgcctcaaagtgaaaattttacctccataaaaagctattttag

SEQ ID NO: 33 - DNA, 321 bp, Homo sapiens
  SITE (263): n equals a,t,g, or c
  SITE (284): n equals a,t,g, or c
  SITE (315): n equals a,t,g, or c
ggtcatttcagagaatacaaaaacataaacccaccttactgtcaacaaagagtcaaactgtgtaaaatagatttattctgagccaaatatgggtgaccagggcctgagtcacagtctcaagaagtcctgagaaaatgtgcccaagatggttgggttacagcttgattttatacattttacggggatagaagttacagggcaaacatcaatcaatatatgtaaggtatacattccatttggatccagaaagagggacagcttgnaattaggggcttccaggtccngggggggatcaaaagatttttggatggccantggttg

SEQ ID NO: 34 - DNA, 408 bp, Homo sapiens
gggcaggagaatggcgtgaacctaggaggcggaacttgcagtgagccgagatcgcgccactgcactccagcctgggcaacagagcgagactccatctcaaaaagaaaaaaaagagagaccctctttttcttaacatcggcatatcaagcctttaaatggctttgctaggtcacatgcttatccccgagaccaggagatcatggcactactgtgggtggtctcgctaggaagatttggggagtaggggcagaatactggcaggcagtcatatatatccaccgtgcacttcaagatagtgatgtgatctgcagcttttagttgaagtaattacatatgttcacctttkggaatttttatgaaagagtaatgkttaatgatacaaagtgttgttcatttagttcctggcat

SEQ ID NO: 35 - DNA, 386 bp, Homo sapiens
  SITE (332): n equals a,t,g, or c
  SITE (366): n equals a,t,g, or c
  SITE (375): n equals a,t,g, or c
ggaactcctgacatctagtgatccacctgccttggcctcctaaagtggtaggattacaggcatgacccaccaggcccagctgtatcttaattttaaaagacctttactgatagctgagttgagtgtagagaaggaatcttaaatcttcttgttggagtatatactgtgtgtgtagaaaacaaatatcatttaagcaaatggtgaagaattgtagaatcagggctggaagaagttttgttcaatacatgtttttttttgttgttgttgtttttgagatgggagtctcgctctgtcgcccaggctggagtgcaatggtgccatcttgggctcangcagcctctgcctcccgggctctagcaattcccnggcctcagnatttcagcagg

SEQ ID NO: 36 - DNA, 475 bp, Homo sapiens
gaactggacaactgagctcagggtggagtccataaagaaacagagccaacaaagtatttgcagtttttagggcctaataatgtaaacatgtgaaaaacatgcacagctggaaggcagaccgtctagatctttaaaaaataaagaatttcacttttacacggaatcctgggttccccacaaaagggaaccaccatgggactggacagagcaatcctttcacaatgaaatttgctacaaagacatttctttaagtgtttaaatcatgcctttcttatccaaatgcacaaagaaaggagtagcctcctgtagtaataaccatttactgtaaacaactgctgtcagctacctccaaaactgcagctctcaccagtgacttgtcagccatcacagatacaaaggtcaagtgttctctcatagtacaaagtaatctctggtacccacaaaagccaaagcgatcgggtaatgtaatacaaaa

SEQ ID NO: 37 - DNA, 299 bp, Homo sapiens
  SITE (245): n equals a,t,g, or c
  SITE (291): n equals a,t,g, or c
tgattgaagaactgagtgtggacagagcacctgtctcgccagcgcccagctrgagctagttatttgtggctgcagcattccaacgcacacaccaccagaaatccccttcagcatactggcctcagacctaccaggcagagaccttgtcttgtttgctgctagaacccaggatcgctggaaaatcacctagcagcagccaggtgcggtgactcacgcctgtaatcccagcactttggaaggccaangcgggtggatagcaaggtcaagagatcgagaccagcctggccaacntgctcctg

SEQ ID NO: 38 - DNA, 421 bp, Homo sapiens
  SITE (329): n equals a,t,g, or c
  SITE (363): n equals a,t,g, or c
  SITE (402): n equals a,t,g, or c
cggaaccaaagacgcagtggtccgctgggctcatggggtcagggaacgttggcgacaggggccacccacactggcctcagcaccttccagaactggttacctartacccccgccacctcctggggtgkactcaccagttccaggaccacagacaatggtggggagcagactgccctgagcccccaagaggccccgttctctggcatctccacgcccccggatgtgctcagtgtaggcccggtagcctgcctgggaagccgcagccacttaccaagggccttgcgactgacgtggcgacgtttcacccaagggaccgccccaggcagggnaggacacgggggcttttggccaccacacacggcnccgaagaagccccacgcttggacaatgcttgcagaatgnattggaggggctgggggac

SEQ ID NO: 39 - DNA, 451 bp, Homo sapiens
  SITE (16): n equals a,t,g, or c
  SITE (339): n equals a,t,g, or c
  SITE (424): n equals a,t,g, or c
  SITE (435): n equals a,t,g, or c
  SITE (441): n equals a,t,g, or c
gggtcgacccgacgcngtccggatttaagtraggcaaaataatataccaattaagatcacaggttttagcatcagacctgggtttcaggaataagactattcaataactggatgaccttggacagcctactcactctattaataatctattaaacagtgccttgccaggtgtggctcacacctataatcccagcactttgggaggccgaggcaggtgtatcacttgaagtctggagtttgagatcagcctggccaacatggcaaaaccccatctctaccaaaaatgcagaaattggccaggtttggtcatgcacacctgtagtcccagctactcaagangctgaggcaccagaaatcacttgagcctgggagacagaggttgccagtgagctgagattgcagcactgcactccagaatgggcancagagcgagancctgtntcaaaaaaga

SEQ ID NO: 40 - DNA, 156 bp, Homo sapiens
  SITE (137): n equals a,t,g, or c
ctgttccgttttccacatgggaagaccgggtcccaataccctgccctcagctccacagcgctgcagagtctctcgaccgcagtaggcagggtaktgtaaggggtgggtactattgggggggtgcccagaaacatttnaaagatgggatcatcgcaa

SEQ ID NO: 41 - DNA, 466 bp, Homo sapiens
gacagggccatgttccctctgaagccactagaagaggatccttctttgcctcttctagcctctggtagcaccaggcattccttggcttgtggcagtgtaattctaatctttgcctccattgtcacatggtattcttcccttgtgtgtgtattgtcttataaggacacagtcatattagctaattaatgggtcaccctactccagtatgacctcatcttacttagctaattatatctgtaatgaccacatttccaaataaggtcacattctgaggtactggggttagaacttcaacatatgtttttgggggtattcagttcataacagttagtattaataattattgaagctaggtgatgggatatattgagttaatcacagttctcttcacttttgtatgtttgaatgtttcctcataaaagggtaaaaaaatgctcttgtagctcattaagagagataaggactg

SEQ ID NO: 42 - DNA, 261 bp, Homo sapiens
  SITE (245): n equals a,t,g, or c
ggggagaggggcgctgcagcagggtgtgggtgtgagtgtgaggagctcctgggccatgcgcttccctacgctctgctctgtctgttgacacatgagtctcaggctgtagtgatacccagcgccgcaaccctcatcattgtggtgtgcgtgggcttcctggtgctcatggtcgtcctgggcctggtgcgcatccattcccttcaccgccgcgtctcaggggccggcgggcctccaggggcctccantgaccccaaggaccca

SEQ ID NO: 43 - DNA, 468 bp, Homo sapiens
  SITE (379): n equals a,t,g, or c
gggcgttgctcacctgggagaagcctttagagtgggcgttgagcaggccattagctcgtgccctgaggaggtgcatgggcggcatgggctctccatggaaattatgtgggcgcgaatggatgtggctctgcgctcacctgggcgaggacttctggccggtgccggggcatctgcatgaccctggcagaatcgagctgccctgactatgaaagggaagaagagcatgcctgaccctccaccggcaccccacccctcactgctccacctggggcctgcctctgcgggtggctgggtcctggctgactgttgtgamtgttgaagcctgggggggtggccatgggattaggaggactggccaagtgggcccatatgcamccancccatgtcagtgttctctctctcttcaacactcctcctcctctcctcatatcatctcactgttagacgtctgtgtccaatggttatatc

SEQ ID NO: 44 - DNA, 304 bp, Homo sapiens
  SITE (300): n equals a,t,g, or c
acccacgcgtccgtgaagtgcttgatgttacattctatgttactcacagtttaattttttagtaatttttaatttatgtggaattgattttggtgtctgatttgagatacagatagacttttttccccagatgactagctattcatcttgacatcatttattaaatatttcatgctttctccactaatttgagaagcctctaaaagcattacatattaatatataaagactttaagtatgctgaaaagtttatggataaaatggactcatgctcattcctacaaaaaaaaaaaaaagggngggc

SEQ ID NO: 45 - DNA, 413 bp, Homo sapiens
  SITE (364): n equals a,t,g, or c
  SITE (381): n equals a,t,g, or c
gaaacactcaggggactgcctcttcagctctcagctaataatgactgagtaaaaactgtgacttcactgggagatgtgaragaattacaagcccaagtcaggagggcagctgcctgcacagttttacatttctccagacagtggacatcacgtatatttatgggctttcggagcagagtactctgtaatgcaattttagctcatctaattgagaaagaaaaatgaagactgtttcccaggcatgtctgcgtaagcgtccctgaatccatggtatttgtatcaatagaagaatcatggaagtaaattgaatttatagacttgtgaagaataaatcaatttcccatggaaaaacctaataccagancctatacataactcccnccttggctatttttatttgtgcttgcttaaaa

SEQ ID NO: 46 - DNA, 432 bp, Homo sapiens
  SITE (276): n equals a,t,g, or c
  SITE (282): n equals a,t,g, or c
  SITE (310): n equals a,t,g, or c
  SITE (360): n equals a,t,g, or c
gggattttcaaatacctgtatgaggatgttgatgatgttgatatctacaaggtaaacaatgggggtgttttatgcaaagataatttaaggtactcaattcatgcaagaatgtwaagaaaaattcaagtgtgcaagagtttaacccaagctgataagtcagtcgtataaaaagaaatgaaaactgaaataagaaagtcttataactttcattaaattatctcactttgtaaatactttttctaaagagataaatgattactgaataaatgagctgtnccccanaataaattttactaatttagcctcgctnctttccattatgatatcctagtagaaataaattttcgttgaataatctancccttgggaactcaatagatacgtatctttttctctgtgaagtcacagctcatttaatgaaattggccacca

SEQ ID NO: 47 - DNA, 582 bp, Homo sapiens
  SITE (343): n equals a,t,g, or c
  SITE (469): n equals a,t,g, or c
  SITE (500): n equals a,t,g, or c
  SITE (579): n equals a,t,g, or c
gcactgccttgtctttccccctttgggcctctaraactgtttcaaaagtgcccatgggtgggaagcaaaaacaattaccttatgagaataagaaraaagttttttgggagcagtatagttcattttccttgctcatatttaattggaaaatcagagaagcggcattatatattcgcattggagttacagaactttctgttttgacagattgggttattcataggtatatcgtaaagcatttcttgatggtataatacaggccagtgtggtcttgtactaccccttaktgaasccttaaacratggtcagtattttgggagttttaatttgactggatttgtantcttctattcagtgtttttaaaaatattgtataattgactctttaattgaactgtatagattaagaaagcctttaaaaactaacgggtaaagtatctatttggcttttaatttgaaataatttcantgactgttataaataatgatatctttaaaangtactttactggaatttgatggttttgtttttgcatttgcagttttctactctaaactgtagttcattctgtggctttnctt

SEQ ID NO: 48 - DNA, 598 bp, Homo sapiens
  SITE (113): n equals a,t,g, or c
gtggacttcgaagccactggtttaagctgggcatagtgggactgtgcccatatagttctgtgcctatagtcccagctacttggcaggtggcaggctgaagcaagaggattgtntgaggccaggagcttgaggccacagtgtgctatgatagcaccaaggaatcgccactgcacttcagcctgggcaacatagcaagaccttggtcccagctccctagtacccagaatgtttataacgactatgactgtcattcatgtggccacagccccattcactcagggcccagctctggggctcctcctaacccccaccctaaggtcatagatgaaatggatgggagactacatactcaaaagttctaagctggggaatgtgggaagctgaatgggaatggaagctgactcacacttccagattccttcttcagcctcaggaaaagctcattttcccactgatttcaagaccatttcccaraagaagccaaacctggattacttccctcccttgctgctccacctctattccaccarctcactctacaaraagaagackraggccaktccctggaaaaaatccaaagaactgggggaaaaaatct

SEQ ID NO: 49 - DNA, 500 bp, Homo sapiens
gctcatgtataagctgtaaggagatattagtagtaaaataataaaaatattttccttggaagaactgtgggcagaccatatcaaaacagcaatttctggttttggaatgaaagatactattgattctattaatccaaatgccaacagttctctggttgagtaagaatgtgctccctaagagaaaactcacttggcatcatgtaagagctgctcattatgaatagaaagaaattacataatccaaagtgaaagcaagtcattctgcttttaattacagtgtataaaaattaaaacatgggccgarggtctarttggatatacttcttggcaacagacattttggaagcctgcaatgaaaaatacaacaaagatggctatgtgctggccgcccccaatgtcttggtggttccccgtttaatgactgtattcagttattgtgaaatcacagaattttaaagcaggaaaaagacctcagaatctctccttaaccatcctcctca

SEQ ID NO: 50 - DNA, 530 bp, Homo sapiens
ggagttcaccaagcccctcctcatcccagaaactcccagccccttggcacctacagtattcatcttataccttcctcccccctcttgccaacctcccctttccttcatctctcccagcctcagtctccaccccttgcatgagatctgaaactgccacagcccccccattgaagacccctcactttgtgctttcaaatgtctccaattcctcatccagatttaaattgccattcttgtctgatattgatacttcctggggtctaacttgcttttttttttattgctcttgccccctgcccctgccaaggtggggaagagaggttggtctttggggctcctgtgaatctaacctccatccctctgacttctgtgtaagcacctccaggcctcccttccccttccccttcccctacctctccttccccaattccctggctctctttcccttccttttttcttcctamccctttamcccatttttttctgtggstgyctaagagccgtcatgamgttaaagacgtcttgactca

SEQ ID NO: 51 - DNA, 383 bp, Homo sapiens
  SITE (367): n equals a,t,g, or c
  SITE (373): n equals a,t,g, or c
  SITE (381): n equals a,t,g, or c
gggagcaccttcacttattcaagaggagaccgtacacctggsrgatagcakatctggacaaatggcccaaagcacaacttgctgttataggttagaacacctgtttttcttaggaaggaaaaggtctcgtttatttagcgcaaaacaggaaagaaacaaagattattgggagcacttcgtgtgttgatacagttgtctgaaccatgggagagcagcagcggtggctccaccgtgtgctgcctaccaagccgtggtccaaggcttcgtgtgtcagctcgttaaaaccccaaatggcccttgggaaagctgtgccatgcatcacaccttcacgtcctgtcctgtgggcagtgatgccgggtagggaggngagctnaatgcacngt

SEQ ID NO: 52 - DNA, 192 bp, Homo sapiens
  SITE (52): n equals a,t,g, or c
  SITE (190): n equals a,t,g, or c
tgacacttgacaatcatcatgacgctgacagaagtcataaaagttcaaaaangaaggtggcactaagagttctgtgaagttgctgctcattcctggaaaatgcatgaatattcttccccttgcttttaatgtccaatcccttcattararaaaccctgtwttttattttaacctcctcacctctcattantc

SEQ ID NO: 53 - DNA, 809 bp, Homo sapiens
aagggaaaaaaagaacagaaataaaaaactgacaagtaagcaggttggtttaaaggtgtggtttcccaactaaagcttttcaagctcccgctgccctttcttctgggcctcgagtgtcactccctgttaagcaacctcccttccccaaggagctggtccgctttcccatttcttgggcagcaattcctgtcacaactccttccgcggagccagcacgtgtttgagtaacttagtcatctcggggctatatccatttggacaagcacataccatccaggaagagacagcggagtgggggcttgggagtgaactggagctgtggaaagggctgccatgggcatcggagctactaattcaccagcaacactgccactcagggacaaggtttaacctgtagattgctctacaagtttgtagttcttgcattcaacagatatttgtagagtatcctcagagtgctgggcattttgtctcaggctggggacaccaggttaaacagaacagatcccgaacccaagagagagagagctcgtcaagtccataggcagttaaaatgtggcatggcgcaggggagggagtgctgggggagatggagcacaggggagtttgcagacagtgaaacgattccgtatgacactgtgatggtgggcgtgtgatgaagaacttgacagcacaaagaattgacctaatgtatgcaaattgagaaaaaaatttaggaggtcaagtgatcctagcaggaaatgcagaatgtgacagtaatcgaaatgtattacaggtcctccctgaagtgggtaggggaatacaaaata

SEQ ID NO: 54 - DNA, 284 bp, Homo sapiens
  SITE (260): n equals a,t,g, or c
  SITE (283): n equals a,t,g, or c
gaaaaaaaaatgtattacccaccaaagacattaaaaggctgtgcaaatcctccagattacctttgagtgatgatcttctagaatccttattgtcaaggtttgaagacagtgaaaaacaaatagattataagtcatttttctctgccctgaactggagaaagaatccagtgcctgaattgcaaccagcatcataccttaaagagagatgtgaagatgtttggcttggtatgccatcacctattcctgcgaaatacattgantactggaaccttttggaaggaanc

SEQ ID NO: 55 - DNA, 586 bp, Homo sapiens
  SITE (413): n equals a,t,g, or c
  SITE (551): n equals a,t,g, or c
  SITE (584): n equals a,t,g, or c
gacatagttgaagtgaaagaaaagtatggtcaggggataagaaataatcagttgttctagttttcccagcgccactgtttccctttcccaagtctaatcatgcctgggaatacatcccctactttggcctaagcttgtttgagctggatttctcttgcttgctacagaaatgatccctcattacaaaaaacttatttctccttcttctcctcatagtaggaagggagtaaattggagcttgggcatgagaaatgtattttctctgaactaaatccccacctagctgtagaagcagaagataaatatgcccaagcatcatctcacctgttatatgtcaactagtgaactacttttctgatttttatagctttagccccattcctgattttaatatctgactcgaagttttccanagtatatttctagaacatcttaggcacctgaaaagagactgagatgttcaaattgaatactagatgacaacatggcaagttaaatgtgtctcttctcccctgaagtacacttcaggacttgggggactgattgcaccnagggggttcccaaagaaagaaagggaaagaaancc

SEQ ID NO: 56 - DNA, 624 bp, Homo sapiens
  SITE (428): n equals a,t,g, or c
  SITE (491): n equals a,t,g, or c
  SITE (619): n equals a,t,g, or c
ggggggtgtgcagggagggctgtggctcaaactcggccatgctgttcgtccaggccctgctctcggggctcttctccacgcctctcaacccactgctaggcagtgccgtcttcatcatgtcctacgctcggcccctcaagttctgggagcgcgactacaacactaaacgtgtggatcattccaacacccgcctggtcacacagctggacaggaaccctggcgctgatgacaacaacctcaactccatcttctatgagcacttgacacgttcgctgcagcacacactgtgtggggacctggtgctgggccgctggggcaactatggccctggtgactgcttcgtcctggcctctgactacctcaacgccctggtgcacctcatcgaggttggcaatggcctcgtcaccttccagctgcgtggccttganttccggggcacttactgccagcagcgcgaggtggagctatcaccgagggtgtggaagaagacnaaggctgttgctgctgtgaaacctggccacctgccacgggtcctgtccttcaatgctgcytttgggsaacgctgggcctgggctttgggaagtaacagccagcaarttacgtgctgggaaggctatancatta

SEQ ID NO: 57 - DNA, 568 bp, Homo sapiens
  SITE (526): n equals a,t,g, or c
  SITE (542): n equals a,t,g, or c
  SITE (548): n equals a,t,g, or c
  SITE (563): n equals a,t,g, or c
gataaagttggactaatgtttttcaagagtgattataaaattacttgtttgaagttttaagctagtcaaagcactaaaattacatgagttgcataccaaagcaaacaagtaattttataataaagttggactaatgtttttcaagagtgattatttttagaaggaccatataaaacttgaaacgcttgaacctaaactcccgttttatctgctactggatgagaagaatttcaacttaatttccattattaccttttgctctcccaccctgcccaatcttctgtgatatcttctctcttttacctgtgtctcaacttacctaggcaagtcataatttagatagaaatctgatttcccaaacctccaggtttagatatatcattcagaaaagcctcaatgtgtctgtaataagaaacaatctycaaattacagcgccataaacttcacaaaagtttgkatctyccacatggttccctgtccctctgaargggagctctgctgktggaaatcactcagagaacctcanggtgaaaaaaaccggnccccantatattggggttggnttctt

SEQ ID NO: 58 - DNA, 347 bp, Homo sapiens
  SITE (333): n equals a,t,g, or c
  SITE (334): n equals a,t,g, or c
gcatttatgttktctaggccagtkytactcaaaaatggtccacaacaaggtaagrkgcttatgccagaatgtgaaacactgaactactatcttcatgcagaaagccttgctccaaaaggtaaaactattagctgaactaagtaataaatagtgtgcttagtgatatagttggtttacatttagttgaagttcttaatctcactgtggactagtaatgaatgaacagtcctcagataggcagtcaagttcgcaracattctgagtagcagtgaggtctggcaacatggctcatcttarccacagttcaattagaataggtgtgaccaggcacannggctcacgcctgt

SEQ ID NO: 59 - DNA, 392 bp, Homo sapiens
  SITE (251): n equals a,t,g, or c
  SITE (320): n equals a,t,g, or c
  SITE (363): n equals a,t,g, or c
ggaaacaccaattcaccaggattatatggatttctaaacatgctcaaatatacctgtgtggttaacttctataaatttactcctgtattttttccctttgactctttctctctagcaacacaaccactacttttttgaagcctaactcatatgtttcctttcctatgaatttgtctgtgatctctcaaacagacctaattcctctctccacattactattcagaatctttttttttttttttttttttganaaaggtttgcctgtcgctcagctggatgcatggtgccatcatactcactacacttgactcacagatcangatccccgctcgctccaattgtggatacaggttaacccacccncgtacatatttaaatgcacatgaatccgg

SEQ ID NO: 60 - DNA, 341 bp, Homo sapiens
  SITE (81): n equals a,t,g, or c
  SITE (314): n equals a,t,g, or c
cacacccacagacttctgctggcagaaagctgcaagggccggctgggtcccacagtgcaagactgccacacactgcaaganttcccccgcaagacagaaaccgcagctcttaggccacaccccttctagtttggcccacgaagcaggggcacctggctcctgtgtccatgccagaagcatgctttatgcttaagattaggttgcaaatctcgcttgggagcttctttcagcctgtggccatctcctgagttagctagcagattttcacgtgggcgtctgtgagttggattaggagtgtcttccttctgcccctnctggcgcctgggcgggcatgcaaagca

SEQ ID NO: 61 - DNA, 416 bp, Homo sapiens
  SITE (392): n equals a,t,g, or c
caggacactgtcttggcttcctcccagcctatcttctgaaccacatagaagtatacagtatcagtgaagcagctagctgtaaaatgtgggctgagtagcataacacttttatctgaaaaccttcaattcatagtatctgaaagcattaatattctcagtcattaatttttccaactacaaaatgaaggcactttgcaagcatcacagacttattgtaatagttaattcttgtttttrattattgtcatcttttgggggattaaagtgttttggcatgttgggctctctaatcttttcgctactttcagaatttgtgctttcaagtgtcattgtatatgcacaggacacagttgggacatgaagataaacctcacctaatagagtaggtgtcnatttcctggggtaaggttaactgt

SEQ ID NO: 62 - DNA, 574 bp, Homo sapiens
  SITE (12): n equals a,t,g, or c
  SITE (166): n equals a,t,g, or c
  SITE (461): n equals a,t,g, or c
  SITE (533): n equals a,t,g, or c
  SITE (537): n equals a,t,g, or c
  SITE (562): n equals a,t,g, or c
cccagccccagnccaggcagggggccgcagctcggggccacagagggccggctcgctcaagcgggagaagacagaggaacggctgggcagcccctcgcccgcctcccgaacccctgcccgccccttcggaagcgtggggcgccgctcccgcctggcccaggacttnatggcccagatgtctgcgggagagctccccggccgcccggcccagccccgagaaggttcctccggwgctgcccgctcccctgacaccccatgggaccagccccgtgggccccccgaccccaccgcccgcccccacggacccccagctgaccaaggcacggaaacaggaggaggatgacagcctcagtgacgcagggacatacaccatcgagaccgaggcgcaggacacggaggtggaggaggctcggaagatgatcgaccaggtctttggggtgttggagtcccctgaactcttnagggcatcttcggccaactttcgcccagtcatcagaggggacagagatgagtctgattaacgggggcgttgnccancggatggcgctaattcaggagtttnctcccggccaat

SEQ ID NO: 63 - DNA, 615 bp, Homo sapiens
  SITE (560): n equals a,t,g, or c
tgaatagtttgtcgacctgctagagaaattaaggagacctgggagtgtcatggtactataactacactggtgatgtcaaacagtatcacactggtactcactgctgagatgctttaagacaacagcgctagaatgtatgctggtatttacctggacttcccctcccattacggtgttaatctctgtttaacatatcattgtttacaaaactcctatattttgttttgtttgggcctaactccctgagttaagcagggaaggcccatttgatcccgttttacagacgaggagacagaggttcagagtggttgagttgcccaagaaacttgagctaatcattttcagctgggacaaggacccagctatcgtaattcctaatccaggatttggatacccttacattttgctgtctgcattttaaaagtgccttccttagatgacatctttctaatccccacccttggcttggtaatgctttactccctccaaatgttgygagtagtctctttttgtattcctttctcaacccacacttawttcccctgkgttyctttcttggnctcagtgaagtaatgccagtggactggtgagagaaaaacagatggagtcctgtca

SEQ ID NO: 64 - DNA, 351 bp, Homo sapiens
  SITE (250): n equals a,t,g, or c
  SITE (290): n equals a,t,g, or c
  SITE (300): n equals a,t,g, or c
ggccagaagcggggaggccgggcctggggctacctcctggacggacccctccacctgatggcccctcaccctccccaggcgggggccggccccagcccagactggaagatgagattgacttcctggcccaggagcttgcccggaaggagtctggacactcaactccgcccctacccaaggaccgacagcggctcccggagcctggtgagacccccgcttcccctgccccacggccctgtccctagcccantgctctcattctaacctgtcctctctcgcagccaccctgngcttctcggnacgggggcaggggctggagctgggcctcccctccacttcaggaacccccac

SEQ ID NO: 65 - DNA, 112 bp, Homo sapiens
  SITE (107): n equals a,t,g, or c
ataagtgtgagccactgtgccctgtgaaattggctccttttatgtgaggtgcaaacctctgcatcccactggcctggtctgagcacctcagaagtcctgggtgctgntgaag

SEQ ID NO: 66 - DNA, 471 bp, Homo sapiens
  SITE (425): n equals a,t,g, or c
gcacagacctaatagacacggcctttcctctctgcctctggctttatgtctctttcatcctcctctgcctttcccctgcccttgatcccttctgcaggtcttggctggtttcaggaaacgggtcccatcccatggactcccactctggggagcctgcgctcctgccctgtgggacctgtgacatggttttccgctcctcagctctgttagccacccatactcagcgcttctgcattggccacccgacccaagagatgacatttggagcacaggcatcagttgccactgaaccccagcgggccgcggttgtgccacaagaacaccarggcgtgccacaagaaccccagggsctyccagaccagcakgccartagatytgctctaaagargttaacagaggagtacagytamctaccttcccccaangctcaaaacggttgagcgtcttccccaaacctgtagatcatacttt

SEQ ID NO: 67 - DNA, 414 bp, Homo sapiens
  SITE (354): n equals a,t,g, or c
  SITE (367): n equals a,t,g, or c
  SITE (402): n equals a,t,g, or c
gggaagccgggcgtgkaggcagcaccgggctcggagctggccagggttccctagcctatggagcacgcagccaccacaggccccaggcctggacctccctctcggcgggtggagaatgttgtgctacgagccaaggactggctgccaggagctcctgggggcaccgcagtgtgggccaccagcttggaagcagaggtcccaccagatctagcgctcaataaggagcaagcagctgcaagatctccaaggagctggtcgacattcagatcacaacccaccacctacatgagcagcatgaggctgaaatcttycarctgaagartgagatccttcggctggagaagccgggtactnggaacctggagcntgcgaaggagaaggcaccagccatgggctgggcantccccagtggga

SEQ ID NO: 68 - DNA, 686 bp, Homo sapiens
  SITE (56): n equals a,t,g, or c
  SITE (103): n equals a,t,g, or c
  SITE (568): n equals a,t,g, or c
  SITE (653): n equals a,t,g, or c
  SITE (680): n equals a,t,g, or c
  SITE (681): n equals a,t,g, or c
  SITE (682): n equals a,t,g, or c
  SITE (683): n equals a,t,g, or c
ggcagagcaagaaaataccaagtttgggtcctgggaatatcctataggataaactnagaaaatctcttttgggacaaatagtgaaggggcttacatgctgtgnaagttcagcttttattttgtggatgcttaggggccgcgaatatttttaagcaggtgagagatagagcctggaattaagcctccataaacacactgctcatgggctgttgaaatgcagggcaatggggctgttccagtggaagtggtcaggaaaggcttctgggatggctttgaaaaaggagagtgccagggaggatggggcaggggcactaggatctgagctgtgccaggaagaccctcctttccacaaacatctcccctgacatccataccatggacccagaaaaggtcatttttccagaaaggcacatgaccaaatgcaaaggcacaatccaggcagcagaggccactctttcaacctcactcaccctcagcagcagtaggggcaagaaagcagggggccaggggtgttccatcctggatagaggctgcaggtgcctgtgagaccaagcgggcccaggggtgntccatcctggatagaagcttgcaggtgcctgtgagacccaagcggggcccaagggtggttccattcctggatagaaggcttgaangtgcctgtgagacccaagcaggccccnnnnggg

SEQ ID NO: 69 - DNA, 503 bp, Homo sapiens
  SITE (495): n equals a,t,g, or c
ggttaaaatgctgagtattgtctcataggaataagcaatattcacagatacgtgaactaattaggaagaaaaagcccattaatttcattaatgccagcagggggcaaaggccttgagcgttttggacagtgagaagccccattgccccagatctgggagatcctctcccggccggtggaatatgcaagggaaaggccatgtgagtctagattccatggtgttaatgccaggcagaggcagactttaacagacaaggaaatgaagatgatgatgggttcaggaggaagaggataaaaagtttaccgggccgggcgcggtggctcacgcctgtaatcccagcactttgggaggctgaggcgggtggatcacaaggtcagcagttcgagaccagcctgaccaacatggtgaaaccccgtctctactaaaaatacaaaaaaattagctgggcttaatggcgggygcctgtaatgccagcgacttgggaacctgaggcangagaattg

SEQ ID NO: 70 - DNA, 330 bp, Homo sapiens
  SITE (140): n equals a,t,g, or c
  SITE (264): n equals a,t,g, or c
caaaacttggtatttctatgtccatcttagagatgtggtaataggcaaagtgaggtttagtatgacttgcccaaggtcacctagcaagtgaaaagaaacgcaatttaaacccagcttgtccccctccaacccagtttggnacatagcggtaagttcttctggagtcctaacttaacagatggaatgccaaacacatttttaggaaaacataaactattaaatagtgattacattccatgggtttttaactacaaaagctttttnaaatttgtaatggaaactgtwaaaagggaaatcttttaggctycattggacctaaatttattaatt

SEQ ID NO: 71 - DNA, 375 bp, Homo sapiens
gatcacttgacctttctgactctcagctttctagtctgtaaaggagggataataatatctgccctccttatttcaaaagtccacagtaagtgtcaaatgaaaaaaatcacttggaaatattttgtatagctctaagcaggctgtacagatgtaagaataatttatgtttgtgtttactctcatcccttgaaatgcctatraaaataaatcacttattacacgaatgacacagggagaaggaagaacgacagaatgccagtctaaggagatcaaccagtgggatatgggctcctggaatgactgcagttaactcagggaaaagagctaacaaatgccctggtatcccatatccattaccacatgcatttcccagcc

SEQ ID NO: 72 - DNA, 325 bp, Homo sapiens
  SITE (202): n equals a,t,g, or c
ggcagagccccagagaagcagctgctgtggaaaccccagagggcagactcagggagagatgctggcctccccttattcccaccctgcactgtctcccatgggtcacactcagctgcagccagttgcctggggaggcccctgccatgctggtgttggcaaagcaggcccagggtctggaaaaggaacgggggctccagcactncaggtggctatgctgtccagcttactgggtggacactgcccattgctgacatttttgaatgagttctgagagaaagcactggggcacacttgaactgatggtgggtgcttcacacacacaggg

SEQ ID NO: 73 - DNA, 291 bp, Homo sapiens
gctacttcagaatgtgttgagttttttccctgtcttcatgcaattgtgaagtacatatgaraccaagtgggtaaatacagtgttatgggctgaattatattcttccaaaagttcatgtgttgaagtcctaaccccagttcctcacaatgtgacactatttggagacaggatctttacagaggtaataaagttaaaatgagctaattagggtggctcctaattcaacatgactggtttccttataaaaagggaaaatttgggcagagcacagtggcatatgcctgtaatcct

SEQ ID NO: 74 - DNA, 666 bp, Homo sapiens
  SITE (454): n equals a,t,g, or c
  SITE (536): n equals a,t,g, or c
  SITE (539): n equals a,t,g, or c
  SITE (566): n equals a,t,g, or c
  SITE (587): n equals a,t,g, or c
ggcacagtggcaacatatgcaccttctattacaacatttttcattcagttttagggcattattgaacagagattttctcatctgtgcaatcatgggcagctgatattaaaaaataattgtgaaatgttacctaatagaaaaattaagttatatataaaagatagtcaaccccatcagccattagggaaatgcaaagcaaaaccacaatgagataccacatcacactcactaggatgrtcatrataaaaaagacaaacawtaacaagtgttggtgagtgtgtagrgraatgggagccttcatacatttctggtgggratatagaatagtgcagctactgtggaaaacactttggtgtttcctcaataagttaagaatagaattaccatttgactccgcaattcctttcttgaatatacactccaaagagctgaaatatgttcacaccaaatttgntacataaatgttcaaaacagcattatttataacagccaaagagtgaaaataacccaaggtgatgaatggataaacaaaatgnggnatatctataccatgaaatatatgattnatcaagaaaaggaaatgaagnactaatacaatatggaatgaacctttggaaaacatcatgctgaattaaaaagcaagcccggtcatggaaaaggggatgg

SEQ ID NO: 75 - DNA, 536 bp, Homo sapiens
  SITE (446): n equals a,t,g, or c
  SITE (471): n equals a,t,g, or c
  SITE (490): n equals a,t,g, or c
  SITE (498): n equals a,t,g, or c
gtcacccactccatatgacatgaaagctttctggaaaagaaataagtaggacaggaaaaatattgatagtggttaataagtgagagttggctttgactgctataggcctatatagggcaagtgctataaaacattcagcaatctgcttcattgttctgtcctgtcctgtcctgtaaaggggttggagggatgcagggatggtgctgggcacaggatgtcagaaagcctaaggtggggctggggaaatgaaaagagaacaaagaggtaaaaagagactctgttcctaggaaatatacatgctctccctcttctgtgggatgggctgggtaccttgtatgtccctctatattcaaaatgatccctggggtcccattgctgtcacatttctgcacagtcctcagacacagagaaaaagtgttggaggttggtagcacatctccctctgnagatgaaactgggctcacaccaacnaggagaacaccacaagggnatttcatnacacccttctgcctatttttatttattttacttaatta

SEQ ID NO: 76 - DNA, 263 bp, Homo sapiens
  SITE (192): n equals a,t,g, or c
accctgacagtaaacacttcaggccaggacgcaggctgcaggcggggtggggtggcatcctcccacccagctggggtccataaaccaggcactggccctgcgctaataaatgctcctttcacagcaaaagacccctcctcccgggctgggatcacggtcccggtagagagggtgctcagataaccgacagcntttctcccaccctcatcactgtccgacttaccccgggctggcatcagggagtgttgtcaggcgtttatgcc

SEQ ID NO: 77 - DNA, 656 bp, Homo sapiens
  SITE (554): n equals a,t,g, or c
  SITE (566): n equals a,t,g, or c
  SITE (578): n equals a,t,g, or c
gctgtagaagataggtgggggcagccactggagaagcaaatatagtagtccaggtcatcaataatagtgatctggattgtggggtatcaacggacagtttgargatttggcttwaggcattgatcatttattggatataagagataaaaatagcataaaattgttctagaatgttatgagagtatttctttattaaaggtttagagacttagacatttttatgtcagctgtcataaccactttttatttatggcaagaattacagtgtgtgcgcatgtttgtgtgtgtatgagtgagagagagacagagacaaagagatggatacctgatatgtatcagatattaagataatcctttgagaacataaaaatgtaatactcatgtctgaaggatttttaaaattgtactttttctgtgtgattatctatagtctactttcctgtatcagctataagtcaaataaaattaaaaatgccactttttatttcatctaccaatacgattatattaatgccaattatctacaatattggattacmatataaaaatagaanaacaccagggantagatttgcgantacgatttctattactatttaatatttctatttgctattactggtaagaatgctatttcaataatctgggtgggttaa

SEQ ID NO: 78 - DNA, 389 bp, Homo sapiens
  SITE (287): n equals a,t,g, or c
  SITE (322): n equals a,t,g, or c
  SITE (366): n equals a,t,g, or c
ggcagaggaaagcatatctatgtagatatctscgtttgtaactttaaaaataggcattgctttctatgaagcactaagtstgctccatctataaatagctcctatttcagtttggtaccacattaaactgccccaaaatgttctgtggtagaccagaaaccacaaattgactttttttcttagaaaatatttctatttggggtaaatatagtaatatgtaaataatgtacatctgttgatttctggagtgtctgttattcaatgatgtatatactcccacagctcgnatgaaggaacagcctctattgatacttgggttgtnaaagtgaagtaagattggtggggtgggtgggctgttcagagctntttcaggtaccgtgttccactaa

SEQ ID NO: 79 - DNA, 402 bp, Homo sapiens
  SITE (267): n equals a,t,g, or c
  SITE (322): n equals a,t,g, or c
  SITE (345): n equals a,t,g, or c
aaatggagttcttaccctctcccccaaataaggagacacacaacaacaatcattgctagctatatttgtatgtaatctgtcatagtgcctctgaatattctgttaactaaagactaccttataaagtttaccttcaatatcttatactatatatatagtaagcaaagagaaaatgcaaaaagctacttactacagtctttgtttctataatgggacacaaggctatagttcatatctctgtctttcactacccattcagtatttctngccttaactaaaacttcagctgttctgtgtcctttactttgtgattggagcaaanctttaattttgatgtgtcttcanctatcctgcctttttcttagttgctgtagtttttcataacctttttttttttaagac

SEQ ID NO: 80 - DNA, 354 bp, Homo sapiens
  SITE (39): n equals a,t,g, or c
  SITE (327): n equals a,t,g, or c
  SITE (334): n equals a,t,g, or c
  SITE (353): n equals a,t,g, or c
acccagccaccgcctgcccagggctcaaaggaggttctnagagcaccggggtccccacacagccagcagctgcaccctmcaagccctactgagcatgaggtagatgtgaagactccggcctccaagcccagaccagaccaggccagggaagatgagctgcatcccaaacaggcagaaaaaagagaaggccggaggtggcgccgagagcccaccgtgggactctcctagccactcagaggggaagtcaattaagaaaaggggaaagctgagagggagaaggctccgggaggggagcattctttccatctctgctgatgtgatttcggntacaaanggtttcccccaggcttggnt

SEQ ID NO: 81 - DNA, 224 bp, Homo sapiens
  SITE (94): n equals a,t,g, or c
  SITE (159): n equals a,t,g, or c
ataactgtgcttatttattcttagctgtatataaaacagtagamagttgttgmtttaatatgmaagtttagaaaagataaggtattaattctgncattctaaaaactcattaaccaggagtgcttgatttcctaggaaagaatggaacttcgcctgtcnataattattgagacggtagattcacctctgattctcaattataaattgggatcatcaatgcctga

SEQ ID NO: 82 - DNA, 235 bp, Homo sapiens
gaaatgttttcaccaagattagctcctcccacagcccaggcagaattcctgatccttttgttgtacaatttccccacttctaatgtaagctaaatgcaggctttcgtggagaggaaataatgtacgcttgaaagttaacatcacagtagaaaaggctcccggacaagaagggcagaccaccaacacaggaggttgatgataaagctactaggaactttcacccagctgttttcca

SEQ ID NO: 83 - DNA, 299 bp, Homo sapiens
  SITE (161): n equals a,t,g, or c
cttacatttattccttaccataactctgtgagggagatgatgatattctcattttatagttgaagaaatttaggcatggagaaggaaagtaacttgctgcaagactagtaaagtggcagagccaggattagaacctagtctaactccaggacatgtttttnaccactgtgcatactgcctgcctctcaagaatttgcccgatgtagtcaaattgatgacaaagattaatctaccttctgctaacctgaaaactcaaaggtagggraaaatagttgtcattaattgcttttttcctctaa

SEQ ID NO: 84 - DNA, 221 bp, Homo sapiens
  SITE (152): n equals a,t,g, or c
ttctgttagattagctcttgccacccctgtcagaacttaactgttcatagatttatgttattgacccactttcttcaagagcagaggcagtttttcaggcagtgctgacgccagaattgggaaaagcagattctcatttaacaaacatgganctcagtgaaaaacagccatgttgttggtctccatttgaaggcagaggtagggattggtagtatgtgatt

SEQ ID NO: 85 - DNA, 316 bp, Homo sapiens
  SITE (40): n equals a,t,g, or c
  SITE (292): n equals a,t,g, or c
  SITE (298): n equals a,t,g, or c
aagaatagagattacaattagaatagaaataatggttatnatccaggtctttaaagaaaagtcagacacaggccaggtgcggtggctcacgcctgtaatcccagcactttggaaggccaaggtgggcggattacgaggtcaggagatcgagaaccatcctggctaacacagtgaaaccccgtctcttacttaaaaaaaatacaaaaaattagccaggcgtggtagtgggtgcccgtagtcccagctacttgggagtctgaggcaggagaatggcgtgaacccgggaggcggngtttgncagtgacccgagttcagg

SEQ ID NO: 86 - DNA, 346 bp, Homo sapiens
  SITE (263): n equals a,t,g, or c
aattcggcacgagctacactgtggtggtttatractttccccaaggctgtcagatagttratttggctgacctgacccaactagtggacagttgtaaatctaccgttgtctggatgctggaggccttagagggcctgtsgggccaagagctgacggaccacatggggatgaccgcttcttacaccagtaatttggcctacagcttctatagtcacaagctctatgccgaggcctgtgccatctytgagccgctctgtcagcanctgggtttggtgaagccaggcacttatcccgaggtgcctcctgagaagttgcacaggtgcttccggctacaagtagagagttt

SEQ ID NO: 87 - DNA, 242 bp, Homo sapiens
  SITE (31): n equals a,t,g, or c
  SITE (42): n equals a,t,g, or c
agtgggaaagaaaagcatttggaagggactntgtaagcacanaccagaagcaaaaccatagaggcttagatgaatataaagccatcctataagtcacaggctttctacatggtactaggagaggaaagtggtctgaatgccattttccaaaagacctaatatgcggacctcatgtccctcagaagccagctttagtagggcatttttccaaaaccaaggrgccctgccaccccaaggtgcct

SEQ ID NO: 88 - DNA, 311 bp, Homo sapiens
  SITE (131): n equals a,t,g, or c
  SITE (209): n equals a,t,g, or c
aattcggcacagggaacagaggaaggcgggaaaccagggtgcttcttgtgagcgttgggaaccactgtgctgtgtcatctgcccttgcggggtgcagccctcgattgccactgctgtgtgaagcattctgnatggkaactcttcctttaccgtggttctggcacctgcctgacttctgcctcctgcattttaatttctgaatgcttttnttcccccaatcactacgccgcagccacactggtcttgttttggtgtctcaaatatgcaagaccttttcctgagttaaaggccgttgggacttgctgtcccat

SEQ ID NO: 89 - DNA, 329 bp, Homo sapiens
  SITE (297): n equals a,t,g, or c
  SITE (302): n equals a,t,g, or c
  SITE (321): n equals a,t,g, or c
ggcacagctggggcagcccttgaagcacagagtaatgacttgggattttccttaaggaagagagaaggcaggtgaggaagagggagtgttccgggaaggttgcaagtttagacaatgtggccagggagggcctggcattaccaaacaattgactaaacctgacgatgctgatggaggaarcgtgtggaccctgggggaaaggccagcatctgccaaggccctgaagcaggaacatggtgtgcttggggggacaattggggggacaaggcttggaggtcaaggggtggttgggggtanaacanccggaagtttggaagtccntggattaa

SEQ ID NO: 90 - DNA, 358 bp, Homo sapiens
  SITE (331): n equals a,t,g, or c
  SITE (332): n equals a,t,g, or c
ggcacgaggccacctggagggagccacagagtgagcctggacccattcatgggcagcatgagtggacaagtgggtgacctgagcccatcgcaggagaagtcgctggcccagttccgggagaacatccaagatgtgctatctgcgctgcccaatcctgatgactacttcctcctgcgctggctccaagctcggagctttgacctgcagaaatcagaggacatgctgaggaagcatatggattccggaagcaacaagacctggccaacatccttggcctggcagcccccagargtggtcaggctgtacaacgctaamcggcatatgcggccannacggtgaagggcagccctgttctggt

SEQ ID NO: 91 - DNA, 398 bp, Homo sapiens
  SITE (385): n equals a,t,g, or c
  SITE (392): n equals a,t,g, or c
  SITE (398): n equals a,t,g, or c
ggcacagccaggacggaggtgaagagaaggcgcctccctgtctggtgacaccagctggggcccttgctgcctccctccccacaaaaatccagttgggaccagtgcatgctgggaatctgcctgcctgacagaaacagatggcctcargtggtgactgatctcttggtgacactaactgcatagctgctgctttactcatgaccgaatgagacacgagatggcggaggtctctctgctccctggtgtgtaagtggacatattcagcagagaaaggctgggacgacagtttctggaaaatgattggtttggaagactttgttgcagataattacagcaaaataggaaaccaatgctacctcctggagcttctcttggaaatgggctnacaccanaggcan

SEQ ID NO: 92 - DNA, 691 bp, Homo sapiens
  SITE (690): n equals a,t,g, or c
ggcacagccaggcctgtgaggcggggagattcatcagcagcaaggagacagacaggacagccgctgccagctcacatccaccccctaccccccaccacccacctcagctggcctcgccgcagccaggcggaccagtccatgcaggctccagcccctccgtgctggctcattgtgccacaagcacaggccgctggtctccagtccttcccagaacttctccagtgccgtgaggctgaggaagcccctcgggccttccacgtcaccgcagggaagtggggagtcagcgcttgacccatgaagggacgagatccatagataagtactccttttgggcagacaattctaggaggtgttctgtgcacgtcttaggaggtcacggtgggactgcaccccgtgccccagcagcgacgtcaatcgcacagcctgctcctcctgacttgccactgaacccatgcgccctggacaacctcccaaggaacccaccactgctccacgggcaagttgccgctgcctttgggggagcccaagataagagcaggggtggattagaaggatggtgggggaacgaaagcacgtgtgggaagaaaagacsatcatgaaagctcgtctagacccaggaaagaaacctaatgtccagataacaccgktcacagagaatgcagcagacaatggacggcagaaaccaccccnt

SEQ ID NO: 93 - DNA, 414 bp, Homo sapiens
  SITE (55): n equals a,t,g, or c
  SITE (375): n equals a,t,g, or c
tagatggaaagagtgcagataggactacctaccattcacccctaccagcgaatgnaagcactcatcttctttcccttcttaccctttcaaagcaagttgttgagggatgaagaggagagtgactttaatcgtggctttaagtagagattttctttaggagtaattgtttctctcgacagatggataggcttccatagttgtcttaataccttttgtccaccccaaggattgacccaggcaaggaggatgaaccctcctcaatttggggaaattaaatttaggcacagcaggtycaaagagtarggaagagctgcattgttgggaaccaatgacatgrtttaatcygggaaaggagttcacagaggatgaccccangggccggggaraaactgaaacgatttttttttttccccc

SEQ ID NO: 94 - DNA, 361 bp, Homo sapiens
  SITE (284): n equals a,t,g, or c
  SITE (323): n equals a,t,g, or c
  SITE (337): n equals a,t,g, or c
ggcacagttaagtggcccgaggtcacctggaggagcaagtggccttctttgcagccatcagagggtgcagcctggtggagaaggccacgcttggcacaggggagcccgtctggagcatgagccagacatcactcctgccctcccatgggcccgggctcagcgtcagtrcccgcctgtrcccctggcctacccccagcccgccaaggctcgggccctcagggcagygggaaggagtgaacgagccctcttgcagcttcagccgctctggcctgggcatgttgggnattgatgaatggcaggtttccaggcaggcagagaggganggtgcgaagggcangggcttacgccgttcaatggttgt

SEQ ID NO: 95 - DNA, 52 bp, Homo sapiens
gagttcgacgggaatcaaggaagtaccttatggagaagaaatattcgaattc

SEQ ID NO: 96 - DNA, 331 bp, Homo sapiens
  SITE (3): n equals a,t,g, or c
  SITE (7): n equals a,t,g, or c
  SITE (8): n equals a,t,g, or c
ggntcgnntcgagtacttcttctccatragrtagcaggtgacatgggtgaagggcctggggacggccgtcgggtagcaggtgacgtgggtgwgggtgctgggkwcagccatcaggtagcaggtgacatgggtgaagggcctggggatggccgtcrggtagcaggtgwcgtgggtgaagggcctgcagaccactcctggccctggcccaggtctctgggcctctgcatggttggcaccctgccagctggtctctgggcgtctgcatggttggcaccctgccagctggtctctgggcgtctgcatgrttcccgtcraactcttcttggaattc

SEQ ID NO: 97 - DNA, 514 bp, Homo sapiens
  SITE (479): n equals a,t,g, or c
  SITE (496): n equals a,t,g, or c
  SITE (497): n equals a,t,g, or c
gcctgtagccaatcagcgccacgctgctgggaacctacctgtcagcaaaatctcgacacccaaacctcaacataaatcaaacactttcccgggcagagaatgtctgtgtcaggcaagaattagagacaagcggtcagcagagcctcagtgctgatcgtcggagcttgggagcaggaagatgtcgaatgaacttgatttcaggtctgtgcggctgctaaagaacgacccagtcaacttgcagaaattctcttacactagtgaggatgaggcctggaagacgtacctagaaaacccgttgacagctgccacaaaggccatgatgagagtcaatggagatgatgacagtgttgcggccttgagcttcctctatgattactacatgggtcccaaggagaagctggatattgtcctccagcactgggggcaggaatgaccaaggaaagaggtactaccatggcatggaatatgagacggacctnactccccttgaaagccnnacacaccttatgaaatt

SEQ ID NO: 98 - DNA, 512 bp, Homo sapiens
  SITE (448): n equals a,t,g, or c
  SITE (477): n equals a,t,g, or c
  SITE (500): n equals a,t,g, or c
  SITE (505): n equals a,t,g, or c
gcttcacctggactctgagtcgtcttggtcccaggagccagtagtgaaggcaacagtctgcccacctgtggacaccagatcctgggagctcctggttagcaagtgagatctctgggatgtcagtgaggctggttgaagaccagaggtaaactgcagaggtcaccacccccaccatgtcccaggtgatgtccagcccactgctggcaggaggccatgctgtcagcttggcgccttgtgatgagcccaggaggaccctgcacccagcacccagccccagcctgccamcccatgttcttactacaccacggaargctggggagcccaggccctgatggcccccgtgscctgcatgggsccccctggscgamtccagcaagccccamargtggaggccaaagccamctgcttcctgccgtcccctggtgagaaggccttggggaccccagangaccttgactcctacattgacttctcacnggagagctcaatcagatgatccnggacnggaccca

SEQ ID NO: 99 - DNA, 823 bp, Homo sapiens
ggcgaggccgctgggcggcggtcggctcctgctgcccctgtgccgagaccccgcgcacctggccaggcccctggccccaacatggcccgtcgctctcagagctcctcgcagggggacaacccactggcacccgggtacctgccgcctcactacaaagagtactaccgcctggcggtggatgcactggccgagggtggctcggaggcctacagccgcttcctcgctaccgagggggcaccagacttcctgtgccctgaagagctggaacatgtgagccgacaccttcggcctccgcagtatgttacccgagagccacctgaaggcagccttctcgacgtggacatggatggctcctcgggtacatactggccagtgaactcagaccaggccgtgctgagcttgatttgggctggctctgaccttcggcttcagggcaccgaggtgacamcttggtgcagccaccgccccccgacagccccagtatcaaggatgaggcccgcaggatgatccgttccgcccagcaggtggtggccgtggtgatggacatgttcactgatgtggacctgctcagcgaagtgctggaggcgcggccgtcgggtcccagtctacatcctgctggatgagatgaacgcgcacacttcctggacatggccgacaagtgccgtgtcaacctgcaccacgtggatttcctgcgcgtacggactgtggcgggccccacctactactgccgcactgggaagtccttcaagggccacgtcaaggagaagttcctgctggtggactgtgccgtggtgatgagtgggagctacagcttcatgtggtc

SEQ ID NO: 100 - DNA, 471 bp, Homo sapiens
gtttttttttttaataatttctattatttttattgttttttacaataatagaataaaatgaaatgaaaaaaaccaacacaagaataatgtttattgtattcgatgggcctgacccacatgagttacacccgatttttagttcttggtttcctagaatggtttttacaaatggtcttcctgcctaactgcaatattatcaaaatacaaaataattgatactttggcttaagagagatccttaaaatttctattatgaatagttatctccttcctgactgatagaaggtaaaggcaaattcaaaaagctaataggactcaaagtcaaagaacacaggagaaaaaaatatacataaataattttcgcatgtgtgtttcyctaggrctatttcagwggraaaggraatctgtggggraaatgggctgtwccaccaaaagactttttaaagccattttaaaacaattcagtcgaca

SEQ ID NO: 101 - DNA, 274 bp, Homo sapiens
gcccacgcgtccggagaaattcgagaatccccggagataacacatcagcaaatagtgcgcaggcagaacaagctgttggaggtgagagacacagagcagagaagcacccgcacctggagagtcaggagggcctcacatcagaacgcctgagcaaatacagttttgaaggatactaattttttaaaaagttcattcacatgagttagacaaagagaaagaagcaggacattctaggaagaaggaacggcccaggcaaaagcgacgcgtacattgg

SEQ ID NO: 102 - DNA, 452 bp, Homo sapiens
  SITE (260): n equals a,t,g, or c
  SITE (388): n equals a,t,g, or c
  SITE (417): n equals a,t,g, or c
gccagagccccagtctgggacccgccttccgtggtcctccctgaagccatcacctttcctggacaagctcctaaatgggctcagggcttgtactctycaagaagccttcatggaggcccccgttcctcagtctctggaacgttcctcttgctccttaatcactggtgcctcacacccctgttaaagcacgtttcctcctggcccacgagctctcgggggtcgggggcacacgtttggtttgtcttgtccccttctccccngccaggtgtgctccttccatgcctggcacccacaggcctcatggtgaatggcagagcaagagaaggccggctgcagaccccacttggggctgtgtctgggccgggctgggggcggctgtgtgaatggncgtctgtttgaactgctgctgctgttcanggccgggctatgtgctcaatgtctgtgtgggggtg

SEQ ID NO: 103 - DNA, 354 bp, Homo sapiens
  SITE (341): n equals a,t,g, or c
gccagtcacagcagcacagatgtgcaggaggagaccatttccacggaccctccgactcctaggaggcagtcccttagggactggccctaacaacaaatgaggagaagccaagttctctgctttctgcagacagggcctcccctggatgggatcttcctctgaggcgagcttcagatctgctcaagcttcctgcagtggggccaggaggcagggcctgggcargggagaccagaacctctcggtgatgcctccgaatggcagggctcagacacacacacctggctggatgggcctcggagcaccagtcatatccaagaagtcgtttcctgtggccaataatnagatgacgcactc

SEQ ID NO: 104 - DNA, 694 bp, Homo sapiens
gcatctgtcccaaacaccaagaagccctgaagctcttctgcgaggtagacgaagaggccatctgtgtggtgtgccgagaatccaggagccacaaacagcacagctggtgccattggaggargtggtgcaggagtacaaggccaaaytgcaggggcacgtggaaccactgaggaagcacctggaggcagtgcagaagatgaaagccaaggaggagaggcgagtracagaactgaagagccagatgaagtcagagctggcagcggtggcctcggagtttgggcgactgacacggtttctggctgaagagcaggcagggctggaacggcgtctcagagagatgcatgaagcccagctggggcgtgcgggasccgcggctagtcgccttgcagaacaggccgcccagctcagccgcctgctggcagaggcccaggagcggccagcaggggggtctccggctgctccaggacatcaaggagactttcaataggtgtgaagaggtacagctgcagcccccagaggtctggtcccctgacccgtgccaaccccatagccatgacttcctgacagatgccatcgtgaggaaaatgagccggatgttctgtcaggctgcgagagtggacctgacgctgractcatgttctttgggaaaagggaaggcgtgctgtggaaataaaatgtttatttgcttctaaaa

SEQ ID NO: 105 - DNA, 358 bp, Homo sapiens
  SITE (349): n equals a,t,g, or c
  SITE (351): n equals a,t,g, or c
gctcaatgccatccttgtggagagccacagtgtagtgcaaggttccatccaattcactgtggacaaggtcttggagcaacatcaccaggctgccaaggcatgacacacaagagttcaggaccaaactgcacaaagtatttcgtgagatcacccaacaccaatttcttcaccactgctcatgtgaggtgaagcagctaaccctagaaaaaaaggactcagcccagggcactgagggacgcacctggattaacagcagcctgggagctccttagcagataccagcggggcaagcaggaaaacaagagggttcaagagggggcagcccccgccttagagggagatggcgagntntgcgctt

SEQ ID NO: 106 - DNA, 531 bp, Homo sapiens
gggagatcacttcccgcctcctgattctggtgctcttctcagccactttgaaattgaaggctgtgcccttcctagtgctcaacttcctgatcatcctctttgagccctggattaagttctggagaagtggtgcccagatgcccaataacattgagaaaaacttcagccgggtcggcactctggtggcctgatttcagtcaccatcctctatgctggcatcaacttctcttgctggtcagctttgcagttgaggttggcagacagagatctcgtygacaaagggcagaactggggacatatgggcctgcactatagtgtgaagttggtagagaatgtgatcatggtcttggtttttaagttctwtggagtgaaagtgktactgaattactgtcatyccttgawtgccttgcagctcattattgcttatctgatttccattggcttcatgctccttttcttccagtacttgcatccattgcgctcactcttcacccataatgtagtagactacctccattgtgtctgctgtca

SEQ ID NO: 107 - DNA, 596 bp, Homo sapiens
  SITE (437): n equals a,t,g, or c
ggcgcagagcaggttcaaacacagacggcgggtgaacatggcgtcctcgacttggtctgagacgtgataggcctgccttctggttgaagatgtggcgagtgaaaaaactgagcctcagcctgtcgccttcgccccagacgggaaaaccatctatgagaactcctctccgtgaacttaccctgcagcccggtgccctcaccaactctggaaaaagatcccccgyttgctcctcgctgaccccatcactgtgcaagctggggctgcaggaaggcagcaacaactcatctccagtggattttgtaaataacaagaggacagacttatcttcagaacatttcagtcattcctcaaagtggctagaaacttgtcagcatgaatcagatgagcaagctctagatccaattccccaaattagctctamtcctaaaacgtytganggaagcagtagacccaytgggsaawtawatggttaaaaccatcgtccttggtaccatctccactgggggcagcaacaagacatgatatttgaaggccgtttagataccatgggcagagaccaaccagcatatctttaaatggacctttgagaacagacg

SEQ ID NO: 108 - DNA, 356 bp, Homo sapiens
  SITE (335): n equals a,t,g, or c
  SITE (355): n equals a,t,g, or c
gggcccacgcagctgtacatggttcagcccagccttgcagcccaggcttttccaaatctcttcctgaatccccaagcttagccaggtgtgggtaacactgcccagttttgccataggtgtccccactgtggcctataggacagccatgactttatagggaagactgatgatgaaggtttgcctatggtgtgtggcccccaccagattccttccactccccccacatgccccttgctcctaaggagactgccaggtctgttggaagctacccctgcagagtgtgtagtaggacgcccctgtctgatcccgggcaagtcacttaacctgtctaaagntgcctccccggggagttgang

SEQ ID NO: 109 - DNA, 296 bp, Homo sapiens
  SITE (169): n equals a,t,g, or c
  SITE (286): n equals a,t,g, or c
gcaatttcacacctgggcattgcaccccaggctatgcagtctttcagtgtgaggaaggggcagaacaagaatgaggcggccccgtggctcaaggaagcttgtggctttggaggatctgactccagcagagtctgtgccaatgtggggtgagcagggcccctgccatggnagcagcaggaatttgagggatggagcaggttaaagaatgggaaacatcttcacttgtttttttttcttgcaaactactccctgctactcattgagactggttactggaagcaacttnttaagatttt

SEQ ID NO: 110 - DNA, 466 bp, Homo sapiens
  SITE (343): n equals a,t,g, or c
  SITE (427): n equals a,t,g, or c
  SITE (443): n equals a,t,g, or c
gccctgcggcgctaagaaggggagactgaggctgaggctggggaacatcgggcagcatgagcggctgcgggctcttcctgcgcaccttgtggaggggaccttcccctgtggtagcggggggcttgctgcccagggaagccctcgctgccctgcccttatggccacagcaccctacagcttcagcataaataccgtatcccccatctggtccctcacactagaggcagctggtttttcagaacctgaagaatgagaggtgtccctttaaaggtgccaggcctcacagccaacataagccagtgtttctcttctctgcccttcttcccctcatgctcccctccanccccaacctaggggcacagtaatccaaaatcactgctggaaggcaaagtacaggttgctagtaagcattttgtctctttcacangagacaactgcttggnaacttgctgtgaatccaaccctc

SEQ ID NO: 111 - DNA, 352 bp, Homo sapiens
gcaccaaggtgccacctggccagcctgcatggaccagcttgcccatgtggctgcaagtcccaaggaacagctggtcacctccatccccacagggaaagagggaaccgycatggctgcactgcctgaagggccaaaggtcagcctctcctagaaacacagttcctttatctgaggagacagctgtctctctcctaccctctgtatgcttcttggcaacctcaagtgccagccactttgtgtatggagacaccttgcttctgctgtcttctcaattcaggtggcagtgtgcaccaccccacccaccacgagagctgtggcaccttgttaacggatgggcctaatgttgggggct

SEQ ID NO: 112 - DNA, 391 bp, Homo sapiens
  SITE (287): n equals a,t,g, or c
ttttttttttttttttttttttttttttttttttttccaaagcagagtaccaacatttattaatcctcacaacacccctgtgaggtaggtcagtatgtcctttagagtcgagaactgaggcagaggtcaagcaaacctgccctgggccacagagcagcagatgaagggcctagacctggatccagaagctagggctctcggtccagcattcatccactggtggacatcacatgggcttatttttaccagcgaaggttacgtgaaggacaaaacgcactcagccagcnacggaaactcaacagttcaaacagcactggggaacatgtcagttaaagagacgaaacgctgaccagctcatgaatgaggcaagacaacatgcggctgaggaagc

SEQ ID NO: 113 - DNA, 556 bp, Homo sapiens
  SITE (514): n equals a,t,g, or c
  SITE (516): n equals a,t,g, or c
gagcctcctgagtagctgggactacaggtgtgtgccaccatgcccagctaatttttaattgttttgtagaaacaaagtccaggctggtcttgaactcctgggctcaagcatttctcctacctcggccttccaagggctaggattacaggcatgagccactgtgcttggtccagatgtattactttttatgtttggtattattctgccaaaccaatcatgttattgtttttaatcattgaatcattggatctttaaataggagtgagtatataataataaggctcttctgttttcaacatctgtgctgggtcatgcattagcattaattactacaatgattctgtggggtaagtgttgtcctcatagacaagaaagctgaggtttagaggttaaaatgacacattgggggkaaataacagacactatatgttggagttgggaatcagatccaagtttgactccaaacccacttttaccacattgcttttgatctaaacttctaatttgctaaaananccctcacagctagtcatccatatcattgaagcgctcatga

SEQ ID NO: 114 - DNA, 477 bp, Homo sapiens
  SITE (476): n equals a,t,g, or c
ggtgagtttacacagtcagcgttttggcggtgaggctctgaagttgaatcaagccaagaaatacaattgatcatcctagtctgcaaatttcatttgcaagttcaattgaagtgtaagtgcaatgggatcatgttattagttctcttagaggcaaagattcccaggataggaaaatttgtgtgtgcttgctgggtcagtgagaaatgggctggcaatgcagtgttcctagggacactcctgggatggaaagagacataggaagggactattactaagcaaggtgctttgatccctctctccttttctccacccaccccctgcccacccctgctcttgattgaaacaaatgrttgtggtattgtgacaaaaaaacaaatataattttaatccaaatttagttcattctttcagtaagaatatcttttcttcctctgcaattaagcattctaatttcctttttccactgcaaattgtgnc

SEQ ID NO: 115 - DNA, 334 bp, Homo sapiens
  SITE (325): n equals a,t,g, or c
  SITE (332): n equals a,t,g, or c
ggaggtggatactgttcattggggcccttattgggtccagcatctgtggccaagaaaaattttttggggaccaagttttkaggattaatgtcagaaatggagacgagatcagcaaattgagtcaactagtgaattcaaacaacttgaagctcaatttctggaaatctccctcctccttcaatcggcctgtggatgtcctggtcccatctgtcagtctgcaggcatttaaatccttcctgagatcccagggcttagagtacgcagtgacaattgaggacctgcaggcccttttagacaatgaagatgatgaagtgcaacacaatgnagggcanga

SEQ ID NO: 116 - DNA, 518 bp, Homo sapiens
  SITE (53): n equals a,t,g, or c
  SITE (514): n equals a,t,g, or c
gagtgactgcttacttaccaggactccaaaatggtccccagcttgcttcaganagctcacagccaagatgacaagtgagaccatcaaccatcagtccactaccaccctcatatcattgttttatatgtatgagaaccaccatcatcatggcagttacctccaattcagcaccttttacagatcatcaccagcaggacacatattgttgaaggagcctaagtgaattgtgaatgtgctacaacttcaccgtagtccagttgttctccactgtgggtaacttcatctccaggaggcatttarcaacttctggacwtatttttggttgtcataacagggggaaagttgctacagtcatctaggtactarggccarggatgctactccacagccaagtatgcacagggctgttccctactccagggaattatcagcccaaactctcaatttgtcgargttgaaaaacgcttcggtaaacyctgaagtttattgaacactgccatgcactgcgtgggtnctaa

SEQ ID NO: 117 - DNA, 59 bp, Homo sapiens
gcggacgcgtgggtggacctgtcggcgcctttcgagcagtcgtcccctgagaccatgca

SEQ ID NO: 118 - DNA, 227 bp, Homo sapiens
gcactggtgtatttccagaaccaaggtgggtgcccagtctgaggccctagcgggtgtctggatcccttcctggaggccccttgcctccctcagccctggcttttgggacttagcaggggaggaagttttttgktttgttttgttttgagacgaagtctcactgtcaccaaggctggagtgcagcggcacgatctcggctcactggaacctccctctcctagggttca

SEQ ID NO: 119 - DNA, 301 bp, Homo sapiens
  SITE (264): n equals a,t,g, or c
gcccacgcgtccgctccagagctcccggacagcagccggatcccggccggctcctggggcactaggacagacccccgcggctagcagcccggcctggggggcggaacactctcttcttgtcccgccccaccttcctccgggccgcaaccaccccagcccatcgctgggacgtggccgcgggtgccgagagcgctgccggcgccgtgggggccatcccggtcctggmcccgacggygccccaggacctgcgatagcgaaagtagngactatgggggctaggagagtccaagaagtggggagc

SEQ ID NO: 120 - DNA, 516 bp, Homo sapiens
ggaggaatctgaagccttggacataaagtacatcgaggtgacctccgccagatcaaggtgccacgatggcccccagcactgctccagcccctctgtcaccccgcccttcggctcccctcgcagtggtggcctcctcctttccagagacgtcccccgagagacacgaagcagcagtgagagcctcatcttctctgggaaccagggcagggggcaccagcgccctctgcccccctcagagggtctctcccctcgacccccaaattcccccagcatctcaatcccttgcatggggagcaaggcctcgagcccccatggtttgggctccccgctggtggcttctccaagactggagaagcggctgggaggctggccccacagcggggcagaggatctctggctgcagcagccagkggctgatgtcagctatatgttgragccagccttctgmaytcagsaactcagcatcagtcatyttcagatcttgaaagccagcaactcttctcagctcacagcttg

SEQ ID NO: 121 - DNA, 674 bp, Homo sapiens
  SITE (3): n equals a,t,g, or c
gcnggagacaagaacagctgccatcattttaagataactgaagttagaaatgtgataatggttgttttaaaatctttacctctgcaattacctataaggccttttaagatcctgtaatgatctgcctacccacaccacttcttaaacctctctggccttgttttttattactctttctcttagtcaccttgctctatccatactgaccatcctctttttgtttgtgctgtcagcagcatcttccatgaatgtcccttagatgtcctcatgttttagtttcctcttcacaagcacttttctgctcttctctgctttatttttcacttttcaacattctaaatattgtattcattcaaaatacttaattatcttgtttgtctctattactagaacataaaatagtgtctggcatatagtaggcactcaataaatatttgktgaatgaataaawgktcacactgattgtgatggkgtactttttttaaaaaacagaatcatgcaaacatattactctaatacttgctttcccctctcttagtaactgatggatattgtcatttgatagtgattttaaataactgcagaatagtccataataagtttgtttccagttttttgtcacgacaaataatattgtaataaacacccttatacattttttttaaaaaaaaaaa

SEQ ID NO: 122 - DNA, 281 bp, Homo sapiens
  SITE (167): n equals a,t,g, or c
tagtcggggcgctctagaggatcctcgagggccaagcttacgcgtgcatgcgagtcatagctctctccctatatgagtcgtattataagctagcmtggccgtcgttttacacgtcgtgatgggagattgctactgggatcttgtgaagaactattctgtggtgtgantatggacaatactacgagattaagyctaagtaatataaatttaatgttagtgtwamtactctwkctgtgtgaattgtatgattattataaattatccagacatgatctatgttg

SEQ ID NO: 123 - DNA, 172 bp, Homo sapiens
gcggacgcgtgggcaataaggtgccctgtcatggctggtggattgttttctattgacaaaagttacttttttgaacttggaacatacgaccctggccttgatgtttggggtggggaaaatatggagctctcattcaaggtgtggatgtgtggtggcgaaattgagatcattg

SEQ ID NO: 124 - DNA, 574 bp, Homo sapiens
  SITE (466): n equals a,t,g, or c
  SITE (485): n equals a,t,g, or c
  SITE (534): n equals a,t,g, or c
  SITE (555): n equals a,t,g, or c
  SITE (559): n equals a,t,g, or c
tgcaggtaccggyccggaattcccgggtcgacccacgcgtccggtggcactgtctcaggaatggggtcagtaaatccttaactgtcctcgtgagtggtggggagggggactttatcagaaagaggctcctcgccatttataatacaaaaaaattagttttaaaaactgtttagagaatagacctcaactgtggtttactaaagtctgatagtacaacataattaaaaaataatttatgatattaaaaggatatagtactatgattataatttaaattataatttataacagttacatacggcctactgttaccactcagaaggggtcatgagtgcaattattggacagatgtaacagggyggagtctaagggcacagaggtctccctgcagttgtgctgatgtgcacaagagaaggaggggcagttcttttgtgtgtttcacctgggcccgagtctggggagcgtnttccctctctgatagctgnacccccttccctaggcttgaacatgcttaaagtggcctgcacaagcagnacatgaaggaccttttgtggnctgntcttaacgtccctgt

SEQ ID NO: 125 - DNA, 120 bp, Homo sapiens
gcccacgcgtccgggcgcaatctggggtcactgcactgcagcctggagactccgtctcaaaaaaaaaaaaaatttcaatagttaaaaatggatgctgagtttaaaaaaaaaaaaaaaaaa

SEQ ID NO: 126 - DNA, 375 bp, Homo sapiens
  SITE (297): n equals a,t,g, or c
  SITE (308): n equals a,t,g, or c
  SITE (325): n equals a,t,g, or c
tgtcatttcctctctgaagtttttcctgcacggacccctttccctggaagcgtggcttggtaaccatgcacgccgtgtttccatcacaccccaggctcaccttgtcataggagttccacactctagggcagttgctgatcttatctgaagccctcgytgggtggtaagctctagacagcaggagcatgatttatactgtggtactggattgtgtgcttagcaggtgcgtgtgtgtggctgtgattcaggggatgctgtggaggtgggctgaggtttgaaatccggccgtgaaagtangtgagatgcanccgtgcacggatgggcngtcgctgccttataagccgacataggaagagccagtgatggacttgagca

SEQ ID NO: 127 - DNA, 526 bp, Homo sapiens
gtgcccacgctggtcttgaactcctggcctcaagcgatcctcctgccttagcctcccaaagtgttgggactatgggcatgagccactgcactgggccgccatgctgtatttaggattaggcatccagagttctcagcataagagactagcaggtgaatagctaacgtttacttggtgcctgctatgtgcaagcaagtctctgtgcctctttggaccaaaagtacgctggtatttgggatagcacaggagtggggaagttgggggccaggtctagctgcaatagggtccatgtggcaggagctgcttggagggtgatgacttgagttggtgccagatggggcagggtcacccgtgcacccgtggtagcacttcctggatgatataggagaggcacacaactcgctgcccgcatccttaggctgcccaccctgcttccttgagaactaccacaggcacacaccagggagccaacatttaaaaatgtttaaaaggtagagatttcttaccaaactcataccaaaaaaaa

SEQ ID NO: 128 - DNA, 493 bp, Homo sapiens
  SITE (372): n equals a,t,g, or c
  SITE (439): n equals a,t,g, or c
aaactaatcttcaagcttgatggaacctttatctactgttgacataccacctgtatttctaatgaagacatctatctcgtcttttcagaagtctccatttgtgtatatgattcaatatattggcctttcctttaaaaatatcagagaacaacaggttaaaactaagcacagctctagtttgtggggcattaacaagagaacagatttcaaattaccaagttttctcttccttttgktccactctgttgtcaggttatcatgcagcttggaattgaccaagtggctcagtttaggatcattgatagtactgtgataagactttctcttttagcaatcattggtctttaatgactatttgcattttgcatctgnatataccgtaatcacatccagagattatttctggctcctgctacaggacccttgtaaggtttggagnctttcagaaagaagcctgttcatggccccgaatgttgaccatgtaagctttatt

SEQ ID NO: 129 - DNA, 597 bp, Homo sapiens
  SITE (1): n equals a,t,g, or c
  SITE (9): n equals a,t,g, or c
  SITE (517): n equals a,t,g, or c
  SITE (562): n equals a,t,g, or c
ncccactcntccggcgagatgagcagcaggggcagccccaccgcaatgcaccgtgaccatcttgtccacagccagctccagtcgcagccccttgaacttgggctccgtgggctccttcagcaagaaatccgagaacacgtactccgtggccaggtggtcgctgacctggcaggttatcatccacttcccaggattctcggctatcatttctgttgtaaggaaggtggctgggaacaggttgacgacatcagtccgatgccctctgctgatgaaggtgttaccatagaaatagatagaatggatgkctatttyattccccattccaaataggtgccaggacacagattctccaacacacatatcaggctccgggaagtttccgaagaggtatccattgagggctggaaacagaaacacgctagtggaagagactcccctgcagaggcgactgggaccagaaatgttggtaatacgggcttaagcatggctggaaaaccagtgcagaccattggtttgnaagggtttggtgcagaaaaacctggctcttagaaatatatattgnccaaaagagaaatgaatggttttattggccttttt

SEQ ID NO: 130 - DNA, 756 bp, Homo sapiens
  SITE (10): n equals a,t,g, or c
  SITE (11): n equals a,t,g, or c
  SITE (753): n equals a,t,g, or c
acttttgcannaaccgccccggaattcccgggtcgacccacgcgtccggcaccctgaaagggaagaaktttcgccttctgcctgtgggagggtccctggaagatgagtttgacctggagctcatagaggaggacccctcctcagaagaagggcggcaggagctatcccactgagaagccaccttttctttaacctcctaaatattggtgggaagacccaccgctgtggggggggttgcatatcctcatgggggtcactgggcttggccagtctgcttatcaactcttgctcttctctcccctttgcctccctctgcaggggccttaatctgcccctggtaggggaggcttccactgaacaggcacaggtgagggagagcaggctggcttagagggacagggtccccatggtcatcaagctgctgttgatgacaaagactcaaaggctggaagagctcccaaggaagctagaaatgcttgtctttgaaagaactgtgggaccccttcagattccctgaggtatggcttggtcactctcaggtcctcaaagcctgtcttagttgggctgggtcctagctgcagggtctttgtgagggtcacagttgctctgggacacctccctgaagagcctttccacctgtacaatcgtattttctttctgtcatttgctttgaagcccattgtgccttatgccaataattcaattgctgcaaacaccaataaagattgattcatggraaaaaaaaaaaaacanaaa

SEQ ID NO: 131 - DNA, 823 bp, Homo sapiens
  SITE (615): n equals a,t,g, or c
  SITE (752): n equals a,t,g, or c
  SITE (773): n equals a,t,g, or c
  SITE (821): n equals a,t,g, or c
  SITE (823): n equals a,t,g, or c
agaaggtacgcctgcaggtaccggtccggaattcccgggtcgacccacgcgtccgaccagcctgaccaacatggtgaaaccccatctccactaaaaatacaaaagtagctgggcatggcggcgcacgcctatagtactagctacttgggaggcagaggcaggagaatcgcttgaacccgggaggcagaggttgcaatgagcctgagatcgcgccactgcactccagcctggcaacaagagcgaaactccatctcaaaaaagaaaaaagaaaagttctgtggggacacgggagaagggattatcatttctaaagkctttgcttattgggggacacctgagccttgttggctttgaaagaataaaccttgacagacccacgtctggggacttgtggaaggaaagaacccggaagggatgttgcctgcagcaggaagtgaatcctgagacaacttgktcatagaggatcttgattgkcatcctcaaagagttggaatttttttcatggggcggtggaattcacattgtgtcccgcagggctctagggctctgagaagagaccaccaggccaaggcagggagaagtgaaggaaggaggaggccagcactcagggccctnacccggactgtgtccctgcagcctctgctctctgccaggtgacatttgcaggagctaatgagtggctttgagggggctgtagttaccttccaacctgtgtgcattagctgtccccaaaccttccaaataaacatgcnaaccaagggaaaagccgtggngctctaggcacttactatatcgacactgacaataataggcctagaggncn

SEQ ID NO: 132 - DNA, 333 bp, Homo sapiens
  SITE (14): n equals a,t,g, or c
ggcagaggcatctntcccccaccctgccatctagactacaagcaacatgagagcccaatcccatcttttcaggtttattgtcctacgctcagcatccagaaagatgcttattttaaaactgmatgctcaacacatacctaggaacagtgggctgggcaccccgtaggacacaacaaaaatgttgaatgaatggacaggwagagagagcaatttgcactgttaggttcatgctgttcawtaaagtttaaccccaagggcaaawttttaaaaattacmagggattcacccaaaaattkggaagttggggtttggggcttctccctggttggcttt

SEQ ID NO: 133 - DNA, 301 bp, Homo sapiens
  SITE (28): n equals a,t,g, or c
ggcacgagctagacgtttggagattttnatttccaattatcactcggtacttccaacattcagtgtttgcacgaaccagagataaatacctttgtgtggtcaaagtaatataatttttgataacttagtgaaaggagaattctagactccaagggatatggccctttattttcacatagctagtttacaaatagctgtcccggccaagttcagtggctcacgcctgttaatcctagcactttgggaggctgaggtgggcggwtcaaaagwtcagcctgggccaacatggcaaaaccccacg

SEQ ID NO: 134 - DNA, 176 bp, Homo sapiens
aggattttatctctgaagcaagattcatataagatttaaaataatttgttatgatctgtaatactaaaatgaacagataaattggcgtttttaataaaaaaattgagaaaacttattcacatattcactaaattggtcacttcataaattatcagaactcctgtttaaatataatt

SEQ ID NO: 135 - DNA, 405 bp, Homo sapiens
  SITE (378): n equals a,t,g, or c
  SITE (380): n equals a,t,g, or c
  SITE (387): n equals a,t,g, or c
ggcacgagaaagggccaacttaccaacatagtgagtcccactgcggccaccacgccaagaatcacccgctccaacagcatccccacccacgaggcggccttcgagctgtacagcggctcccaaatggggagcaccctgtccctggccgagagacccaagggaatgattcggtcaggatccttccgagaccccacggacgatgttcacggctcagtgctgtccctggcctccagtgcctcctccacctactcctcacaaatccggaagcttcgtaggggaactggrattcattcccagggaaaaagtgggccaccttgaacgttttcagttttcttgcccaatgttaaatcttggtgggttggttttttgggccagagncntgggtgnattatgggacatccccgt

SEQ ID NO: 136 - DNA, 435 bp, Homo sapiens
  SITE (370): n equals a,t,g, or c
  SITE (371): n equals a,t,g, or c
  SITE (398): n equals a,t,g, or c
  SITE (403): n equals a,t,g, or c
ggaagacctttttattaactgactcacaattaactgactcaaaatctataagttagcaaagactcataaatgacataagaaaacaaaaaatttgtaagatggagacacattatagggaaagtcaaacgacaagggacaagtgggggaaatttttttgtattacaaaggctgctatctctaatatatgttgagataagatttgcattttataaggactccttgtcttgcacattaatatccaaaatctagattggcattttactgtgtgagccccattttcccctaaagctgcgtaagaaccaaggaccaaaagagtgttttaaaaattgacctgaagtgggaagagagcaaggaaaggcagggaaaaaannaaaaaaaaccttggggggggccccgtncccanttgcccttttgggggcggttttaaattaattg

SEQ ID NO: 137 - DNA, 353 bp, Homo sapiens
  SITE (312): n equals a,t,g, or c
  SITE (321): n equals a,t,g, or c
  SITE (339): n equals a,t,g, or c
attgccattctctttttctgctgaagctggggtgtgggcagcctaggcctgtgtaactcgtgacaggcctcccaaagtgccatgatggcatggatcctcgtggagctgttgagaacaaaaacaggactgcttctcggwggagtgccgctctgtgatccaggaacaagccgcagctctgggcttggccatgttttctctactggtccgccgctgcacctgcttacttaaggagtccgccaaagctcagctgtcctctcctgaggaccaggatgaccaagacggcatcaaggtgtcttctttgtcccggacctnaaggagctncttcccagtgtcaaaagnttgtaagatttggt

SEQ ID NO: 138 - DNA, 353 bp, Homo sapiens
  SITE (298): n equals a,t,g, or c
  SITE (330): n equals a,t,g, or c
  SITE (339): n equals a,t,g, or c
gagcggccagagccactctttccggagtgatgttcttacttcaggccttccttgttcctcatctggattctatggcactaaccactgacatcttttcaatctgttctccactgtttccagagtcagtagtctcaaatccaaaccgcgtggtcctttacatctgtatttacactttcatagactgagaggctacccaccatgtgargaaggttgtggtttggtgtttaagaaagtaaacagagctgggagtggtggcttacggctgtgatcccagcactttgggaggctgagatgggtngatcatgagatcaggagattgagaccatcctngccaacatngtgaaaccccatct

SEQ ID NO: 139 - DNA, 427 bp, Homo sapiens
  SITE (270): n equals a,t,g, or c
  SITE (395): n equals a,t,g, or c
  SITE (423): n equals a,t,g, or c
  SITE (424): n equals a,t,g, or c
agtcacaatattttaatattatctctgggagacatgataatggatgattttcgttcttttactcatgcttttctttattctccaaggcttaaataaataacatttattaattttagattacaaaaagacttttaaaacaaggkgacawcaaatacttttaaaaagaaacaggttgccgatgatgtttgtgtttcagcccccgaattacctatgctcttacactatgtgccaggtatagctagagctattaatatagcacagtccattggntgtttggttttggaacaaaagagggttcttttgcttaattaggaaatctaaaatgcttggacttatgctccatacattggggaggggattggggcaatgccaggtgggcaaggggccgaaatgtnaaccgcctttttttaaaggggttccccnnaaa

SEQ ID NO: 140 - DNA, 407 bp, Homo sapiens
  SITE (37): n equals a,t,g, or c
  SITE (45): n equals a,t,g, or c
  SITE (372): n equals a,t,g, or c
cagcatgacagcattttggcaaaattgtcttaggagnacgcattntcaggcagttccagtgtattggtattttggatgtttctctgcattttgtcatacggttcagaagggtgataggmtttctgtsaactgctgggcttcaagaaggctattatcttccactcaggtttaatggaggaatttatgggattttsccaccttgtgaggttcagtgctagaatttctgcgttggatggatcaagaatctacggggagccaagtcacttaaaagtatcagcctgagggtaaaaggtgaagtgacatctttactgagaccttcccggtcagatgcaatcggattgactgaaagctctcagaccgaaacgaaatctnccaccttggcagcacgttcttgccagagaaattct

SEQ ID NO: 141 - DNA, 73 bp, Homo sapiens
aatttgaaaatggcaaagtcagtgctaagttacattttatgcaaacattaccagtggcaattaatggacatgg

SEQ ID NO: 142 - DNA, 322 bp, Homo sapiens
  SITE (131): n equals a,t,g, or c
  SITE (282): n equals a,t,g, or c
  SITE (286): n equals a,t,g, or c
gaagatccgcagaatctggcggacccggcttaccgccgccgtcgcatcatcatgcagaacatgcgtgaacaccgtaacaatattcaggtagcaattgatgctttatatagccaacgtcggcgtaaatcgcnggttgatgaaagtggaaacacttacccgtagaaatgacgctatcttcggcaaccacgtgtggcaaacatttgcgcaatacttcccgccaggacttgaaaaaccgtctgtgtaggaaaaaaccatagctatggtgttatctgccgacaacgncatnccgggaagccgaatgcgttttggagttaagcgcttg

SEQ ID NO: 143 - DNA, 285 bp, Homo sapiens
  SITE (168): n equals a,t,g, or c
ggcagagttacaacgtattcctcaaggagctcccaatatccacaagcagattctacagaagcagtgtttcaaacctgctctgtcaaaggaaagtttcaactctgtgaattgaacacacacatcacaaagcagtttctaagaatgcttctgtctagtttttaagagagntaatccttttyccaccataggcaacaaatctctctgaaatggaacactaccaggttctacaaaaagtgtgtttgcaacatggttctgaacaaaagtaagggtccaggactttgagtt

SEQ ID NO: 144 - DNA, 1287 bp, Homo sapiens
  SITE (212): n equals a,t,g, or c
tcgagttttttttttttttttttaatttgggagagaaaaaaagcagtcctttccytcaaaggccagggtctagacttctctattccagcgttgctctcttctagatgagcttctcatgcaaagcacgtcagtagamcagggggtaaggtagaagagaacgtttkgwmctttaaaagcatgtctctcatctacaamcagamcaaamcaaatgncagaatgttctcataagcaaatctctctattctttgscagtaattgtgtccatatttatgtaacataataamcaagtatttcagtatttttgaactatgatttgaatattaatatactcaagttacaaatgtagaagtcctggctcctaaagaaagtctctcggtagacaagttgaaaactttgctatatatgaatgtaagaaaatggccaagttcactgggcatggtggctcacgcctataataatcccagcactttgggaggctgaggcgggtggattacctgaggtcaggagttcaaaaccagcctagccaatatggcgacaccctgtctttactaaaaatacaaaaattagttgggcgtggtggtgggcacctgtaatcctaactactcgggaggctgaggtgggagaatcacttgaaaccgggaggtggaggctgcagtgagctgagattgtgccactgcactccagcctgggcaacagagtgagactcagagtgagactccatctcaaaagaaaaaaaaagaaaaaagaaaacagctgagttcataaaacctatctgttacaggggaactcagaatgcttttgcagcctgccatctttagtgcctgcctttccagtcacctcttccccaccattttcctgatcctccgacttgacagctcccagaacttggctttcctgtcttttaggtacatgcagtgacggaggcactgctgaagttaggggcaatctgcaggtttgtgtttcaggaggcaggcaaaccaaaggtaagaacatcttctgattaactgtaagatgggataatttttatgaatacaacttcagaaagcatcaagtttcaagggtgtttgcgtttgaaaggatttggcttctaagtattacattataaaagagtcttcttaaggagacatgtaaaaagtaactcatatccagtagctccaacccagcttccaacagatttctagacttagacctttagattcctgactctaagataacagaaaatgccagaaaggtagaggggaagagggaaaataatgatctaatattagtaaagtgctacaaattttc

SEQ ID NO: 145 - DNA, 247 bp, Homo sapiens
ctcgtgccgaattcggcacgaggtaaatagtccacttgttgccaaagaaactccttggttcagcattgggaccaagttggccttaaggttttagccaaaatggtcccaggccccagaccagctctcagtggatctggcctccaacagggcctccacataggggccactcacagattgccaacaccaatcacacctctcggtctctacagcctttcagagtcagtccatggaccgtgcaatgatgtgg

SEQ ID NO: 146 - DNA, 261 bp, Homo sapiens
cttgcagcagcagagctcgttgccacacatccaagggaagtaagtgtgcatatgtggatgcggcgggaatacctgcggtctttctgctgaagagcagggttatacacctccttttagcaatctggagaggactgaggcaagagcttgtattgaaacacaagcaagctccacgtatggttttggacatggaagaaagagtactgttggggkggaatgacctaagtttttaataggattaggatttctgtggattttgcccaa

SEQ ID NO: 147 - DNA, 479 bp, Homo sapiens
  SITE (361): n equals a,t,g, or c
  SITE (397): n equals a,t,g, or c
aatttatcccaatgtaaatgacctgagcttttgagttgttatgtattcttccttagataaaatcggtaacaagagcagctcccgagggtgcttctgattttgatatggagattgctcttagagaactcattatagtggattttttttcctttccaagtattgaagaacttctacactaattgtaatgatgttaaattcctcatgaatttcgctgacatgttccaccgtattaacaagttgtragaaatgtagatcaagatcacagtttatgttggaactaaatttgagttrtaataactgtgaccttgacaagaaataatgatgctaggtgattatcttaacaaatagcatgggactattntctttaatgcctcccaaacagaaataattttgtgantactatttccaaattggtctctcctccggaatgaattttccttttggttaattaaaatacttaaaattctaatgttccccca

SEQ ID NO: 148 - DNA, 521 bp, Homo sapiens
  SITE (379): n equals a,t,g, or c
  SITE (405): n equals a,t,g, or c
  SITE (490): n equals a,t,g, or c
  SITE (507): n equals a,t,g, or c
gtacttttgaaatttccatctcttacaggtttacttggattgttgcagtaagccctagattggtcaaactgcctgttgtctctaggtttctccagctgctccgccgtcagatatccaaagttctatacacattcccctgtgtatagactctcaatcacttttagaaaaatgaagctccaagcccttcattctccccacttggtcagtctcacctgtcacaactttcccaccaracttcaaactttttgattcagatatccatggctgtgtacatgcagtcctttgccaaaaatagatgttctccttcactgacctcctgccgcctctatggaattctaccttcaagaattagctttaagccccaaaccattcttatganaagctgccttaattacagagcaaganttgaaaagatctttgtaagaatcctcacagcccttagttcaaatttctactttaagtatttgtgtttcaataagattaacatgtngcatttccatttatatnattttggtattaaa

SEQ ID NO: 149 - DNA, 430 bp, Homo sapiens
  SITE (418): n equals a,t,g, or c
  SITE (425): n equals a,t,g, or c
aagagactggcagctttcacttcctgtcttttgaaagtctcttgaacttcggacctgggggaagccagctgccgagtgagaagtctgactatccggagatggcggtgagtatagagaatttctgctaggtctcctgtgtttcagccatcccagcccaggcaccacgacacattatcaaaggactatcttggaccttctcatcccagcaaacatccaatggagaagaatgaagactccaggcatatgatcccactctagccatcccaggagcccccagctatccaaacaactacagctgtggccaaaaacatcgtgtatcagggacaaatctctgcttatggctgctctaatccttgaactacagaatcatgaaatttgtggatacggtcatgatcttgattttggcgatggttcacangtgtttnctatg

SEQ ID NO: 150 - DNA, 290 bp, Homo sapiens
  SITE (240): n equals a,t,g, or c
  SITE (280): n equals a,t,g, or c
ggacattagtgtaattcatttactttttctgcagctatgaagggagatttagaagcgtttgtcctagctggtttcagcaaaaacatggggtctcaggttgggtgatgctgttagccattgagaatattcacaacttttccccaccttctcagctgatgcatttagaatttgtctctaaagtttacatacaagaatgctaggtagaagtattttcaaatgtgtwtwaaatatatctaagtncttaatttctttagaacaatcctccaatgcaaacattgtnagaatcagtc

SEQ ID NO: 151 - DNA, 252 bp, Homo sapiens
  SITE (224): n equals a,t,g, or c
cctgtcagggcccaatgcaaatgaggctgattcccactctggtcagcataatgcaggccccagcagacaagattcctgcagggctttgtgcggtaagtggccgtgtgtgtgtgtgtgtgtgtgagagagatctacaagtgccacccacagatgcatctagctgacaagaactaatagcgttagagattcatggggtgattttgctgagctcttttgcctgcaangacagtgggtgattctctgaagctttaa

SEQ ID NO: 152 - DNA, 177 bp, Homo sapiens
tatggctgtgttttagatcatttcattgttattggggattttttttagagaaacttttatacttccataatatttagattgttttacagaagaaacacttaaatgtgtttgctttccgtattaatacacgattactttgttactcatattagaactatttaaaaatatttatatgga

SEQ ID NO: 153 - DNA, 313 bp, Homo sapiens
  SITE (306): n equals a,t,g, or c
  SITE (307): n equals a,t,g, or c
  SITE (310): n equals a,t,g, or c
taaatgcctgagtaggggcacaatatattaagcctaaggaatggttctggaaagtgakaaatcaacgagagctaaaatacatttgggccaaaactcaggtctggatgagtacaatatactcaaggcaactacactcatccataaaaattcccattttgagaagagactatgagtatcatttaataataatcaacactataatcagttcaccaaaatacacaatttactcccaaacttaatcagcaaataacatgtctctgaaactagagctgtgttttctcgtgccgaattcggcacgaggttttnngtnttt

SEQ ID NO: 154 - DNA, 236 bp, Homo sapiens
  SITE (221): n equals a,t,g, or c
  SITE (235): n equals a,t,g, or c
gtggtttagctgacttagtgaaatttattactaatttgaagttttgtttcacatatgaattttcatgaagcatgtacattttataatatacttaagtagaggttgagcattccttatccacggtgcttgggacctgaagtgttttggatttcggatttttttgtagctggaattaacaggagtgagtcaccacgcccagctaatttttttatttttagtanatccagggtttctng

SEQ ID NO: 155 - DNA, 346 bp, Homo sapiens
  SITE (269): n equals a,t,g, or c
  SITE (275): n equals a,t,g, or c
ggctgctcttcctcctccctgctgttcctcacccacccggcctcagccactccattcctggatgcccatgtcccagtggcggctggctggtcatccagaggcgaatgcggaacatggtgtctgagctactaacctcccaccttgggtatgcccttgaacttttctgtaagccaggctttccaacccccaacagcactcaggtcacattcccagagagcctgcacaagagggctgagtctgtttatttttcaagatttcaaaaaacatgncttttncccctctgaccttaagcaaaattttttttccctccaacattggtatttttaaattcaaggggaaatatggt

SEQ ID NO: 156 - DNA, 264 bp, Homo sapiens
  SITE (82): n equals a,t,g, or c
tggtcaggctagtctcgaactcccaacctcaggtgatccacccgccacggcctcccaagtgctgggattacaggcgtaacanccacgcccagacaagaataaaattttaaagaaggggtagaaacacagtgcaatatcgtacttctctaatttatcacatctaaaatggggagactcattgagtttatatgatgaatttgccagatttgcagtgtatgtggccagcactgttttaaaagaattcatcttctatatagttaaatt

SEQ ID NO: 157 - DNA, 276 bp, Homo sapiens
gacaagttggggccagagatgatggcagtccagcagcaactccctgtgctcccttctctttgggcagagattctatttttracatttgcacaagacaggtagggaaaggggacttgtggtagtggaccatacctggggaccaaaagagacccactgtaattratgcattgtggcccctgatcttccctgtctcacacttcttttctccctgtctaacctgctctttctctttggtgccccttatctcaccccttccttggaatttaataagtctca

SEQ ID NO: 158 - DNA, 490 bp, Homo sapiens
  SITE (434): n equals a,t,g, or c
gccccccccccttttttttttttttttttttttttttttttttttttttaaaggtttcagaaattatttattgtagtagtacttacacgtaagattttagcctatggtcattttataaagatgactgttaggatttaattcacatttaaagaaaatgagattcgttatattatggtgttttttatgacctataaaatacttacccctacaaatttccataaatgtagtggttagtaaagcttttttcttactgaaaaataatgccaggtaaccaagtattattccttccatcatttatttaggaaaaagttttatgtattagggtaaagtggtagaagttaacctagaatctaataatctccaatcacccattcctgatctaatagtagccatgagaaaaaatctctagaaagaatcatacctctcaaaaaatnaaaaataaaacaaaggctgggtgcagtggctcacacctgtaatctcagcacttccg

SEQ ID NO: 159 - DNA, 359 bp, Homo sapiens
  SITE (168): n equals a,t,g, or c
aaagcaattgctgttaagaaaaatggcctgaagaacaggtcatacgactgctacagaactgcaaggtgtttcagggacaattggattgtttggccatatcaaccattcaggctttgaccgcagtaatgaacaaatctccagctgctaaggaagtatttaaagaaaganttggttatacacatatgcttgaagtattaaaatccctgggtcagccaccactggaattacttaaagaacttatgaatatggctgtagagggtgaccacacttcagttggggattttgggcattagtaatgtccaacctctcttgcttcttatccagtgggttccagaactacaatcccatgacctgcaaat

SEQ ID NO: 160 - DNA, 309 bp, Homo sapiens
  SITE (35): n equals a,t,g, or c
cttaatctttgtcacgtaaattataaacatatttnctgggtattgcttgtcttaaacagtcttgaaaatgtatctggctgaataattgcctgtcacaatatttaaatgcaagactaagtattcctctgcctgcgcaccccacccccatttaatgggataatagaacataaatgtcatttgtgcatttagttgattaaatgtcactcgtttatgattgtacaactggtctatacaatgtaatggtctctgtagtaaagtaacaatacatttttagtggcattatcagtgttggtaaaataaactcaccgt

SEQ ID NO: 161 - DNA, 336 bp, Homo sapiens
ttttatcttttcatatcatagtaggagaattaataaaaatgtttcatttttaagcattttttaattattcaggcaacagaataagtgttctgcatatattgtttcatttaattctttagttccaggaggtaggtgaagacatctctatgttgtagttaataaactaagggtctgtaattttaagagatttacccagaaatcacataagtcttaggtgttggagttaaaatttgaacctgagtttgtttgattctaaaacttgtgctccatgaagaagttactggctttawctattctctctctctctcttgttcttggtcactgactatcagtatt

SEQ ID NO: 162 - DNA, 302 bp, Homo sapiens
  SITE (6): n equals a,t,g, or c
tttttnaggtttactaaagaataccagagaaagaactgtatcttaatctatcttcctttccaatgaagtaaaaaacaaattatttgacctccaaatcctcagttaatgtaaattttgcatttgttgaaaacttggtatttcgcaggaaggacatcaggttttgtactgaacataacattgaacacgaagaacctttataagtcagtgttcactgggctgaaacttttactcctatctgaatatgttggctttttgagagctcttggggggatttgatgttgtttttccaacttcttatctcc

SEQ ID NO: 163 - DNA, 360 bp, Homo sapiens
taacagctcactcagcatgaataagaaatgctacatggattcttttaacactgacttctaaagagcctgagaaataaacaagatgttagtttgaaagagttcatttctaattgtwatttcttttttattgtttggccccatgagctgctctaaacaaaatatggtgatgttagaaccaaaaggaaagtgtccttagaataatatctacaaagaggcattcaagttttcactgcctttccttctttttctgcccttctctcagtttgggcaaattatatgagttgaatgtatctgatagaaccaactctttaaagaggggtcgggcacggtggctcacggctataatcccagcactgtggg

SEQ ID NO: 164 - DNA, 348 bp, Homo sapiens
  SITE (91): n equals a,t,g, or c
caactttgacgtaagtttaactgaaatgcgagttagacacatggtcctttagtagaaaatcacagagatgaagcaatgttggaagcaaatncttttgaccagcataaatgttttgaagaaggtagaaaagatagatgtttatgacagtractaatgtgagaaacccataggtctaactaaggaaaacatgaaaaaggtcggtaatttggatccttgaaataaaatggccaaccgtgaaaagatagctactgatgaggatactgatggaaaatttgaagcaagttatgtatctcctagagctctgtatgttttgaatgattgttggatcagcaaagactagtatttttt

SEQ ID NO: 165 - DNA, 291 bp, Homo sapiens
tgaaaatggactaatgcacctgtactatccttttggggtttatttctccttctttcctcatttccattggatgactaaagtttctyctgctggcttaaaaattacttcttttgttgttcctcttgtgcagttctgctgaacataataaccaagtgtgtatttatttaaatctattgatttgttgaacgtatcactacctgtatcttccctctaacaaaacactttcacatattctcatatccctttgtttttatagaccactcctctccttcatcatttttgtattttgcc

SEQ ID NO: 166 - DNA, 324 bp, Homo sapiens
  SITE (110): n equals a,t,g, or c
  SITE (164): n equals a,t,g, or c
ggcaaaacagattgagaaatcatctagtggctggaattattacacagtaatttaaaactaactataatttgtttaacggcatagtagatgagataaatgggatgcatgancagataaggactttcagagagattacaactttacgaaggagtcaaatggaaatnctagaaatgaaaaataccatatcagaaataagtaatttcatcaattagcctacaagcagactggatacagcaaaagraaaccaatcagtgatcttgaagacaggtaaacaggaattatggcaatggtaacgcaaaggaaaaacggtggtaagcagtaaag

SEQ ID NO: 167 - DNA, 294 bp, Homo sapiens
attttttgaaccttgaaaacaaattagaattcaatttcctccatgtcacttttgcaagaatattcaagtgttttttgagtcatgataatattgatcaattatgaacactttagaatgggagaaaattaacaattatgtgtctttctcagtgagacccatcatctgatattctcacgattttgacaatgatggactgttgtcaaactctcattcattaaccctactcctactttctgggacacacagtagtagactgaggttcttcaaatatttgaaggtccgtatctcccattt

SEQ ID NO: 168 - DNA, 415 bp, Homo sapiens
  SITE (386): n equals a,t,g, or c
cctgggatggccaagccagaggaagacccacatcctggaagccctgtttctagtgcccaactccagttctcaagttgcaagggcccagcagacatgggggcactgcaggggtgaagctggcagttccttctcccagaaattctgagagagcctgggaaagtgccccaggagatggctgggctcacagctctacaagttacaggtctggcaatggccaccctctattcccagtcttccaacaaatcctgaaacttaagagagtggactcttacaataattatatttcacatgttaaaaaatatgactccgaaggaattaagccagcactgctcatttagctagtttcacttaactagttgggaggaagtttrgmcattgaggtactntactctcatcgtagattttttggcaggtt

SEQ ID NO: 169 - DNA, 112 bp, Homo sapiens
ccgcgcccggcatctgaactttgttttatttattttttttgagacagaatctcactcctgcctgggtgatagagtgacactccttctcaaaaaaaaaaaaatttaaaaaacg

SEQ ID NO: 170 - DNA, 136 bp, Homo sapiens
  SITE (131): n equals a,t,g, or c
taaatctgttgtgttgaatgccaagaggcttggggtgctctggaaggacagagcccgacacagtaaaagtccaagaaatattttataaattagtgaatgatgaaaaggttttcttttttttttttttgagntgggg

SEQ ID NO: 171 - DNA, 337 bp, Homo sapiens
  SITE (168): n equals a,t,g, or c
  SITE (178): n equals a,t,g, or c
  SITE (189): n equals a,t,g, or c
gacaggtgggcccttcagacccctaccgagctccaaggaaacatcacgcaaatccagtggggttccaggaagaacctgctggcagtgaacagcgtcatctccgtggccatcctcagcgagcgggccatgtcgtcacacttccaccagcaagtggccgccatgcaggtntccccgagtntgctgaatgtntgcttcctgtccacgggggtcgcacacagcctgcgcaccgacatgcacatcagtggagtgtttgccaccaaggatgctgtcgcagtctggaacggaaggcaggtggcgatcttcgagctttctggagccgcgatacggattcagggac

SEQ ID NO: 172 - DNA, 290 bp, Homo sapiens
  SITE (114): n equals a,t,g, or c
ggaaaatgcagctgccgagtcagggtctgagtcctcgtcccaggaggccacccctgagaaagagtccctggctgagtcggcagccgcctacaccaaggcaacagcgcggaagtntttgttggaaaaagtggagagaggccgggggctgctcagactcaatgacatggcgtccaccgatgacggcacactacagtcccgactagtgatgcggacccaggggagcctgcgactgatcctcaacaccaagctgtgggcccagatgcagatcgacaaggccagcgagaagagct

SEQ ID NO: 173 - DNA, 211 bp, Homo sapiens
  SITE (78): n equals a,t,g, or c
  SITE (191): n equals a,t,g, or c
taggtgatggcattgccattcattaaaatagaaaacaactgaggaagcgaatattggaatagggtataaagtgatgancttggttttgaatgtaagttagagatgcttgtaagacatcacgtgtttgagcacagatctgccatttaggagaaggaactggggctatagattaagacttggaggttgcagtnagccaagatcgcgccactgc

SEQ ID NO: 174 - DNA, 402 bp, Homo sapiens
  SITE (41): n equals a,t,g, or c
  SITE (288): n equals a,t,g, or c
  SITE (297): n equals a,t,g, or c
  SITE (335): n equals a,t,g, or c
tcatgtcttcaggagctgaggactacgaggcatcacaaaantggccacgagaggcaggtaaaggcccccaaagtcttcaccatcgtccgcctcagaaaatcacttgtctgatggcgtcaaccagcctgtccaggccacacagcgcacagatactgggtcagatattaccctggttgtttcttcaaggtgtttttggaagagactgacatttcagtaggcagagtaaagcagattgccttccctaatgtggaccgctggcctgtgcaccgggcaaggccctgcccccancaaccccanctgcgggggagctcatctgtgtgctccacgtttggggntgcctgaaagattccctgggagatcctctctgcttggaacactgattggagatggtctcattactct

SEQ ID NO: 175 - DNA, 136 bp, Homo sapiens
  SITE (102): n equals a,t,g, or c
aagttttcttattgtctcaaagtaattgatgagggtgrccttttatgtaataggaaatgttcttgatgaaatattttcagaatttcctatttcatgtctagnaggaagaagaagaattttcaagttcttgccagct

SEQ ID NO: 176 - DNA, 368 bp, Homo sapiens
  SITE (298): n equals a,t,g, or c
  SITE (345): n equals a,t,g, or c
gctcaaatctgagtgattttctaagatttagcacccacatctccaaaccagagtcttttactctgcataactcaaccatgtgccaactggccagcttggaataaaactgcttcttaaccagctctgttcacagctgaacacttgataattatttctgtgttgctacagagccctgtgttgtacccaattatcctacactcatgctgctttagaagttattgggtgtggagctaaaaagtgagaaaattgtytctactccttgtttkwtgaccttgttatatgacaactgcaatcaaantaatcttttcctaaaatgcactcccccccaatggctccataaaaaancccattggaggctccagtccaaa

SEQ ID NO: 177 - DNA, 588 bp, Homo sapiens
  SITE (413): n equals a,t,g, or c
  SITE (454): n equals a,t,g, or c
  SITE (505): n equals a,t,g, or c
  SITE (518): n equals a,t,g, or c
  SITE (538): n equals a,t,g, or c
gctagaatagaacacaggtctgatgccccagttcccatcaaactgcacagttctgtaattcaagctctcctatccttccctcccatcaaggcctcctcacacacccctctgcctgggacccaccagccatctccccaggccgtgtcctggccagcaacaggccgctctgctgtagtccaccttaaggcttcaaacccagagctgaggagtagcaaaaatccccgttgagagggcctctctcaatatcaggtatggccagagaacctgagctcctgtgagtggtttacttgtttgttttgttttggggtgggaaagtaggtggaaaaaatctgagcatctagttgtatgttgggtactatgctcccagggktggcataaccaaaaaggtttgtccctttgctcaaaaaagaaanctctctctggcctggcatgggtgggtcatgctgtttcccancattttaagaaggtgaaggtgggaagaacacttgaaggccaattatttganaccagcttgttanacattaggaaaactcatccncactttaaaaaaaaaaggggggccgctcctaaaagatccccaagggccaa

SEQ ID NO: 178 - DNA, 330 bp, Homo sapiens
  SITE (325): n equals a,t,g, or c
catgaagaaaggaatgagaagttcactgacataactaaaacagaatacaagtactatggaacattaaaagtagtagaaacacgtgttgatatactcgtagaagataaatttactacatgttaagtatataaattttctaataggcagtgtgtgtgaattttttcaaatattatctcattatctctgtcttgtatatgaggacacatatcttgaaagatttaaataaacttgcttaaagtctcttgtggtacagttaggatttgaacccaagtgtttgacctcttttccagtagcatgcttgccttgctatttataattacttaanaaagt

SEQ ID NO: 179 - DNA, 450 bp, Homo sapiens
  SITE (414): n equals a,t,g, or c
gcttcagcaagctacctgcagccctctgtctgacatcatgtccttcaactgctccacaagaaattgctcttccaggcccattggaggacgctgcattgttccagtggcccaagttaccacgacttccaccactgatgctgactgcctgggcggcatctgtttgcccagttccttccagactggctcttggctcctggaccactgtcaagagacctgctgtgagcccactgcttgccagccaacctgttaccrgcgaacttcatgtgtctccaacccttgccaggtgacttgctctcgacaaactacctgtatttccaacccctgctcaactacctacagccggccgctcacctttgtctctaatggatgtcagcccctgggaagcatctccagtgtctgcaaccagtgggcggnatctctactgtctgccaaccagtgggaagaatctct

SEQ ID NO: 180 - DNA, 374 bp, Homo sapiens
  SITE (317): n equals a,t,g, or c
  SITE (319): n equals a,t,g, or c
  SITE (346): n equals a,t,g, or c
gccgtcacggaagggacaagaagggagagagagtggatgccagggacacccagaagctgttattgtagtcaggatacgacaggggtgaggctacagacaggggacttgcaagcagggagggcagggtgagacattcagaggaaacgacgacaggaaatggtgacagatagggaacgaggatgaagggaagggagagccagtgacgactggcagtggagtggggagcaccgccacctctcctcctccacttgcccctcctgtggcactggacaagctagtgggcttttcgttgtccatgggctttttcggtggggatntnaccactttgaacccgtccccttaaacntgctcctcctgcacggaaaaaacagggc

SEQ ID NO: 181 - DNA, 427 bp, Homo sapiens
  SITE (394): n equals a,t,g, or c
ggggaccagtcacagggcagtaaggcctcacagcaggcaccccagggcggggcagcaagcaggcaggaggggcmtccccgggtggccttctagggaggatgtaccctggctgcccagcagcagccctgcttggccgtgtccctgccacaagcaggcaggacacaggagggatggcactgcccacggagccctgggctcatggcaccttctgcagagtgagccgggagcagagagcctcttttccccactctgtgaggccgggcattttcctcagccctgccctaacccccaccattcctgtgatgggcccaggtgctagacgggccttgtccttgccgaggaaacccatgcaggctgggtcccaagcctctcatgcagtttcattttacccaanatggggccagcttccactatgtttgattgtcta

SEQ ID NO: 182 - DNA, 494 bp, Homo sapiens
  SITE (94): n equals a,t,g, or c
  SITE (418): n equals a,t,g, or c
  SITE (428): n equals a,t,g, or c
  SITE (476): n equals a,t,g, or c
gggcagagtggcagctgcaggagaagtgtgatggggagatggtatctgaacgctccaggtttaggctccttccttctccctggaggcagttaanactctccctattatctctcattgcacacaacaattccaagagcttttcccaagactacctggcccaggcttctggcttcccccgagagccttgagggagcagcagaggaaaactgaggcccccagaggagaatggaaggagtcagcctgtgcgccatgcctcgcaggagctgtctcaggtgcagactcacatcagcgacaccaacgtcatcctgtccatggacaataaccgttccctggamctggacagcatcatcratgcagtgcggacccagtatgaacttgatttgcacagargarcaaggacgaagscgaarccytgtanccagaccaantaccaggagttcccagatcattggcagggggacattggagacgacctngaagaacagccagattgg

SEQ ID NO: 183 - DNA, 216 bp, Homo sapiens
acatgtactatcctgagtattaggatattgtacaaaacgactcagattttagctttgccttcacagaagttacattttaaaggagctcaacaaatgcaatgtattaaaatgctcctgaatgattgaaagtctgtttatcccactactcttctggaatttcatatctttcccacaagtaggtttgacaacgatttaaatactgactatgatttgtac

SEQ ID NO: 184 - DNA, 433 bp, Homo sapiens
  SITE (40): n equals a,t,g, or c
  SITE (335): n equals a,t,g, or c
  SITE (373): n equals a,t,g, or c
  SITE (381): n equals a,t,g, or c
cgccggaagagcacgcccagtccgggctgcgcggaagaancgctggggtcccggagggcgggggtggcggcgccggaggtcgccatggctaccgagcccgaagccgcggagccggtggtgccttcgctcgtggatcgatacttcactcgctggtacaaaccggatgtcaaaggaaaattttgtgaggamcactgtatactacagmactctaaccggtaagcaaattgggaattytaaattatcaaaaatttttttttcctggtattgtaacctggtatggtcttgtggtcttggattgaacaatgttcactaaacaaacatgcattaatatctcnactgtgttgaaatggtattattatagattttgtttggnaaatgatntcccatgcctggccctctgaactttaatttgatactcaactccaatgaagac

SEQ ID NO: 185 - DNA, 709 bp, Homo sapiens
  SITE (594): n equals a,t,g, or c
caggccagcccgtctgcagactcctgtggtgggagttccctgggacaggaacactgaccatccccttagggaggcaccacgccctggggagcacagttccaggccagggccatgggtcttgccctgaagaccctccctcagggaccacgcgccctgaccctcattgcctcaccatattataaaacactaaaaccgcttaagttcttccccacagagttggggaactaattgtaaacagaatacacgtctacatatcagccctgagacagctggccccgtgcacacgcagcctgctggccccagcaagacacggtcagagctggtaagtgctctacagcattcagaaatctgaccacagcgtacacacagctcacaagtcagtgcaaacagaagctaatgacatcctccaagaaaattccatacagttatgacaatggaaaacctgttatacattgtaaccatacatcattagcaatgtttaatacatcttactataaacactgaatttctaagtacatgatactcctagcagcttaatccagaaaataacgatgtgaatccctccaatactgtaaacacaagaccaagtgctgnccatgagagtgccccgtgccacccgcgggcaccaccggcctctgaggacccctgagccacacactgctgctgcttcagggaagcatccatgtcacaggacttccccaggggtctg

SEQ ID NO: 186 - DNA, 528 bp, Homo sapiens
  SITE (469): n equals a,t,g, or c
  SITE (483): n equals a,t,g, or c
  SITE (485): n equals a,t,g, or c
gacctagtccctgctgagaaactctccaagccctcccaayccctgaccccctcagggtggggcaggagaggcagcagcatgcctctggctgtcaggttcagccaggctgagcctcagtgcccccacctggatctagggggaaggggcaaggtgggacttaaaggtctcgaaggttcttctggttctaacatcctgtgattgattgtccctaaatctctgacccctgtcaatcactgtgggtgatggggcacttgctggcctgtctgtactcatgtgtctagctttagggaracagttgggggtagggccctaactccactaragaaagggggamtggagggtgcartcagartgtycaccattaatctgtcccagtgaggcccttcccagccyttgttarartgggtcttgctgagctgctcagagagggccctaggtcatgataaggtcacagcattggggcaaggantagaaggccggtgncngacagattgctgatccacacatgccacagcctggggtgctggg

SEQ ID NO: 187 - DNA, 416 bp, Homo sapiens
gtatcagcactgcctagggttggtactttaaaagcattcatttcacttgcttttttttggctcaccccctatcccccaggtatacagtactcttacataattgtggaagaatcttacaagggggtaatgtagatcagactttcctgctttcatttttaacctccctaaattataaatatttattttgtaggtattatagctgcaaatgtccttgtattctgtttatggagagtaccttctctgcagcggacaatgatcagatatttcacatcgaatccagcctcaacaaatatgtatgttttgtggragcttctcttcccagcaatartgaacattctggggtcaagarcarttcmagggcartgtacctatcttcaaggtgttatttccaattttggtcaagttacttgggttaa

SEQ ID NO: 188 - DNA, 415 bp, Homo sapiens
  SITE (350): n equals a,t,g, or c
  SITE (357): n equals a,t,g, or c
ctctcaacttgagcttctgtaagagaagcttatggttgattaattactcaaatatacaaagtgtgcactaactaaaattacactcataccagtgagcccctgaaatctctgaaccttttagtcatatgaaaggcacaaatgggttgagtgtgcttcaacaagaaatcaggggctttaatattattagcaataaatagttgcagatcatttcacctctgcttttaggagtgaagtgtctttaatttctctacccgatacaccacttccctctctctttcctccctcttttycccatttccaagccccctttgaaggtgccacatctaaggcctggtcctcccccttccagncaacctnaataaccttccctttgttttttccccaatccaaaaaaccaatccctccccaaagccaa

SEQ ID NO: 189 - DNA, 446 bp, Homo sapiens
  SITE (367): n equals a,t,g, or c
ccgcactgccccagtgtgacccgcatacctaccggccccgaccccgaaccgcgtggcgtccgcccgagccctggcgctgctgggtctcctgctgctgccgctgctcgcagacccaggaaactctgcccgcagcttatgacggtcattaaccagtttctgaccaaggacaaggacacctacatggacactgtcaacagataccacctcacggagccggaaagaaacacatcctctaaactcaaggactgcgtgaccgacacaatgacccccgaggagacagaggccgtcgtgcagcaactggaagaaatcaacaaccagtgtgccgacacgatactgaagtaacaccatccataggcaactcgggttnctgtccaagctgcctgtcccaaccatgagatctggggccaaggcccaaccttcctaagttccggcctgctgctgcttta

SEQ ID NO: 190 - DNA, 436 bp, Homo sapiens
  SITE (341): n equals a,t,g, or c
  SITE (392): n equals a,t,g, or c
  SITE (414): n equals a,t,g, or c
  SITE (426): n equals a,t,g, or c
gccctccggcccctctgcagctatgaggtcctccgtctctcggcaaacatactccacaaaagggggcttcagctccaactctgccagcggagggagtgggtcccaggcccgcaccagcttcagctcagtgacggtgtctcggagcagtggcagtggtggcggggcccgctgtggccccggcacaggtggctttggcagccgaagcctctataacttggggggccacaagagtatctctstcagtgtggccggaggggccttgttggggcgggctctggggggctttggctttggcagcagggcatttatgggacagggggctggcaggcagacgtttgggnctgcttgtcctcctggggggatccaagaggtcactgtcaaccagaacctgntgaaccccctccatgtggagantgaacccgaagnttcagcgaat

SEQ ID NO: 191 - DNA, 480 bp, Homo sapiens
  SITE (409): n equals a,t,g, or c
  SITE (441): n equals a,t,g, or c
  SITE (478): n equals a,t,g, or c
aagaagcagctactggacccaagaagggccagtgctaggtgctagggagacagaggtgaagagcctgccctctagcagctgacagcctggcaaaaaaataagacagaataaggtagaccctgattttggaacctgaagaccaaagtgcaagattagctctgctacttccatctgtggaccattgggcaggtatctctgggccttcacttactctttgtgaaatgaggacaggggcaatccctaccctaccaagtcattgggagtgaagacatgatgacacggtgattgtgaaaagattttgtcaatcgcaccagcattaagggtgcccatctccagttcccccaggcctccaagctcccaaggcctgagtgggcaagtagcacccaagtatagacttccacgtgcaganccaggacacagccagcatgaactgggattttngcagggctgctgaatggggtgaaaaatattcccaatngt

SEQ ID NO: 192 - DNA, 501 bp, Homo sapiens
cagaaacagcctgtagagagcatcgacaaggcgcataatggagagttggtatctcaaccccaagctccctttgctgtacctgggctgctctgtgaacaagaatccacgcccccctgccctgctggggaccacataatgatccctttggggaagttgctgattgcagggcaagctagcttggtaaggaaaacctctgcaccagcggcctattcctgcctcttggtccatagcctcatacactcatgttgatggatagtatagatttgctgcccacaccagatatctgtaaggcatcactgtcctgattctgaacctctgtttcaggaagcattctcccctgtgtaaacaactcaaggtggaagtatttcagagggcatagggtcatgaatccttacccaaaggaagcctgttttagcagtggatgcaggagttgatgaacagacaagcaagttctgcttctgtcctgtttcctcctgacagctccattcttttgaagcctga

SEQ ID NO: 193 - DNA, 594 bp, Homo sapiens
ctcagacccaaaggacaaaagaggacaagtctaagggatgctggaaaatcccagcaaggagctaagaaggcgaagctgcaggacacggccagagtgttcacactacgaaggagggcccgggtgtcctaacgccgggttcacacgtgtgttcacagagctacggccacacacacgccttccaaggtggcaagctacaacacctctgaactggcactttcacatttttacaaatgcagctgctgcttctcaaaaaaacaaacaaacaaacaaaaaaccctccaattcagtttttataaatattaagcatgaatattaaaaggtgcttctacttttggttgtaaaaacacctgaatgactctaagactgatatgtattttcaagtctaagctgtcttacagaagatcttttataaatgtttccttataaatatctcaccattacaacaaattgttttaactgtttttctattagctctagctgcatatttgatgtaaatgacaattactgaaaaaatgtcagaaaaaacattttcagtactaacattaaagtgccmtatgtaaaaaaaaaaatgtgatttgtataactaaattaccc

SEQ ID NO: 194 - DNA, 404 bp, Homo sapiens
taatcacccaattttaagggcttatttagaactgagtgacttgggagttgaagtagacatcaacctaaacaggaagagaaaacaaaagaagaaagagatttcacacccaatgaccatgcaggaacagacatgaaaaagaactaataagaagtctcagaaatggaaaatactgtctttgaaaaaagttcagtagatgagataaaccataaacaagacacatagagwaatagtgaattgaaggcagtgctgagaaattctccctgactacagctcaaagaaattaagagaaaatatgaaagcgctatactgtagattcggtattctaaccagtctttcccctgaaagaaactaaacatactaaataaaatatttgaattgtctttttaaaagcaaggctaagctgg

SEQ ID NO: 195 - DNA, 857 bp, Homo sapiens
  SITE (89): n equals a,t,g, or c
  SITE (539): n equals a,t,g, or c
  SITE (814): n equals a,t,g, or c
  SITE (857): n equals a,t,g, or c
tttacgtgaattgatggatgaatagggaagaagaaacgagagacggatagacagatgaatggcaatagctatgtgcttctgaggcaganaacaatggagtaccagcagggccctgctccttcgccgaggaactcagccgcatcctggaaaaaaggaagcacacgcagctcgtggagcagctagatgagagctctgtctgagcccagcctcccagaacaaatgctcttccaagccagcctatmtgtcccaggctgggccactgcctccctaacacagccaccctcccttcattacccccactccatacccttctcccaactttttgatgtccctgtagggctggccagtcaggcccagccaaagccccctcctcagtctccacagacccacatgtgagcagcccaggcccatcggtgctcctcagaggcagggctctgcaggtccatatgggctcaatgtcaccaccctctgcatggccctgtgtgctggatggtcctgaaaccagacaagwcctctgccagccacctaagccctgcgtnacattcacatgcacacatggaagaatgtttatcggctgggctgcagtgcccccamcctcaccttctcctggtgcattcttgtttcatccctgcttctggacttggggtamcctcccaattgccamatcctatctggtcctcttycccagccccatgtggtgacctctttgtcaagagcttggggaacgggccagcctgggggaggtaagacttgcatcactccccctcctctcccttcctgttgtgggccctttgttgaatcagcctccccactnttccttggtcattcttcaagagtatgagagacagagctccagn

SEQ ID NO: 196 - DNA, 378 bp, Homo sapiens
  SITE (12): n equals a,t,g, or c
  SITE (275): n equals a,t,g, or c
  SITE (365): n equals a,t,g, or c
tggtagggaaanataatgtcacccaaattagggttttgaagacaatacaggagttagatagataaagaagagagggaagggcataacacaaaggaacaggaagtattaaaatgtgcgtgttatggacttgcatacaaattgagtgctttaattttgccaagcatctttcataacactataaggaattaacagtatgagatagcataagtaagggggcctgagaacttacataaacacccttggtacatggaaagtaaatataaaatggtgctganaattctaattacatagtttatagaaaagatacatgaccaagcttgaagcaagaatgattgataaggaattaggtaggttctttataaggnaaggtgatttcag

SEQ ID NO: 197 - DNA, 471 bp, Homo sapiens
ccacacagccaggaaagggaggcctttttggcgcacagccagtcccttcagtcgtgactacaggtcttgttttttccgctccgatgtgtccttagccagttcttggctccggttctgtagggacaggcactgaatctgcgcgcctcaaaacagcagcttcccttccgggggagggcatccaccctctcaggggatcctgcaggtggcccatttcctgcagtgagaactcggaagggctgatgtcgtcatcagaggccwaagggcagctgagagttggataaaamcgtttccaaggaggaggctgagtaacccagttcaggacagccaagcgcattaggcttgattggggaaggtggcaggtggagttgggaggttgggactctccatcttttgcaccacggatgcctttctgtcgctgtctcactctggggcaggatcaagtctgctctctggagtggggctgccttcagt

SEQ ID NO: 198 - DNA, 435 bp, Homo sapiens
  SITE (313): n equals a,t,g, or c
  SITE (327): n equals a,t,g, or c
  SITE (388): n equals a,t,g, or c
  SITE (428): n equals a,t,g, or c
aagattgttgtttcttaaaaaactgggtgactttctgagagtacattagaccataaccaaaattagcttcaaaactaaacttttttaaaaatgtaatttttagaatttgcttcttaaatatgaatttaaacttctaaattttaaaactgaatttaaaaacattttattgggaccatgaaaaattacaaagacatggaattttttagcttgaagagaccttggatcatccagtccctttacatgctattaatgtttcaaaggtaaatgaaataaatggttttgtaaaaatctatttttacttttttaggaaagngacatagatccttncctgtgggcagtggatcctccaaaagtggaggaaatttggtacctcccattccatttccgncagtaaattttaggaattataaggaggccattaaataccngggtaac

SEQ ID NO: 199 - DNA, 217 bp, Homo sapiens
  SITE (197): n equals a,t,g, or c
ccaggcctggctgcaccctccttgcccaagaagctgaagcctgaacaaatacgggtggagatcaagcgggagatgctgccgggggcccttcatggggaactgcacccatctgagggtccctggggggcaccacgggaagacatgacacccctgaacctgtcgtcccgggcaragcggtgcgcgacatccgctgtganttctgcggcgagttcttcga

SEQ ID NO: 200 - DNA, 311 bp, Homo sapiens
  SITE (223): n equals a,t,g, or c
  SITE (224): n equals a,t,g, or c
  SITE (277): n equals a,t,g, or c
cccaagagcactcagcaggtagatgtggggtggtgcaggagctgcaaggcttcaactgggctcaggatatttgaagtgtagatggagagacaggtatctactatgaaatatggcaagtattactgggtaatctttcaattttttttttttttttaagagacagagtcccattatgttggccaggctggtcttgaactcctgggctcaagcagttctgccttgnnctcccaaagtgctggggattacaggtgtgagccaccacacccagctgagtagncattttgatgctttctggaagactgcagattgta

SEQ ID NO: 201 - DNA, 337 bp, Homo sapiens
  SITE (329): n equals a,t,g, or c
cttatccttcttttcaatcaaacccataaataccacagactccaatagccatggattgctgtgcctctcgaggctgcagtgtccccaccgggcctgccaccaccatctgctcctctgacaaatcctgccgctgtggagtctgcctgcccagcacctgcccacacacagtttggttactggagcccacctgctgtgacaactgtcccccaccctgccacattcctcagccctgcgtgcccacctgcttcctgctcaactcctgccagccaactccaggcctggagaccctcaacctcaccamcttcactcagccctgstgtgagcctggntcccaaga

SEQ ID NO: 202 - DNA, 345 bp, Homo sapiens
  SITE (343): n equals a,t,g, or c
  SITE (344): n equals a,t,g, or c
  SITE (345): n equals a,t,g, or c
cttcagtggccaccctcctggtggtgatgtttccgtttctttccaacaggagtatgacaacttttcaacttgagtgcacacactgtccccggaatcccgcgttccagggaggaagcgcctttgacagcgcgcgccggttcgtggggcccgacggcgtgggcctgtggttgcggacctggcggagatgcgcgttcgcttcgattgtaggccattccttttaggagctgagaaaggatccgtttttacagcattctcgacctgtgattcttggtgggggaaactagttatgtggataaaaatacagttagcaaaataaaaatgccaattttaaaaaaaaaaaaannn

SEQ ID NO: 203 - DNA, 438 bp, Homo sapiens
  SITE (384): n equals a,t,g, or c
  SITE (427): n equals a,t,g, or c
  SITE (429): n equals a,t,g, or c
ggagggctctagaccctcactcaggcctggctgacccctgccgaggcaccccgaccgggtggcacagaggtgtgcagctctctcctggtttagtgggggaccatgggtggctgcctgctgaactctgcggggcccacagaagagcctctggactcatgactctctctcggaagcctctctgcctcagtcccaggggacctctccttaagaccttctgggcctcacagatcccagctaaacctcagcttggacacctagattcttggtgacctcctccgccattgccatcctgctgtggggacttctctgagagactgcggtgccctcaggagatgccaagggcaagggaggcccgatctccctgaaacctccaaccagggaatnagggaccatgaaccctgatcttccggcccttcctctgtccctntnctccaactt

SEQ ID NO: 204 - DNA, 427 bp, Homo sapiens
  SITE (425): n equals a,t,g, or c
gtcttattcatatgtagtcaacacccatgaccaaattctctcaaaggccccatctgcaggaacatccaattggagaataagaactctgaacatggcttttggccaatatgaacactcagaccagggagcctgcatcatattttttatgtttttattgtgcaatttgttttataaaatgttttctctgatcccagtttataaatttttcccagtatacagtctgtgttttatatttcatgcatagtgaactacataactaagggcaatgcatgtacatagaattgctgtattgcctggctgttatataactgtagttgtgatatcataattgaaccctctgacactgttagcaattctttttttttttggagacagagcttgccctgttgcccaggctggagtgcaatggcatgatctcggctcantg

SEQ ID NO: 205 - DNA, 566 bp, Homo sapiens
  SITE (542): n equals a,t,g, or c
  SITE (558): n equals a,t,g, or c
  SITE (562): n equals a,t,g, or c
cttcggaaggggccaccacatcagaaagggtccaagcgccccagcaaagccaacaccacagccctccaggaccctatggtctctcccaggcttgatgtggcccccacaggcctccagggcccacagggtggcctaaaacctcagggtgcccgctgggtctgccgcagcttccgccgccacctggaccagtgtgagcaccagattgggccccgggaaatcgagttccagctgctcaacagcgcccaagagcccctcttccactgcaactgcacgcgccgtctggcacgcttcctgaggctccacagcccacccgaggttaccaacatgctttgggagctgctgggcacaacctgcttcaagctggsccctccactggactgtktkgaargcaaaaaytgttccagagaccytagggccatcarggtgtcagcccggmattkcggaggcttcagcagaggcgacaccagctccaggataaaggcacagatgagaggcagccatggccttcagagcccctgagaggccccatgtcattctacaancagtgctgcagctaanccangcag

SEQ ID NO: 206 - DNA, 391 bp, Homo sapiens
  SITE (380): n equals a,t,g, or c
ggaatctatgcttaaattatatgaaaaaatgtatttagcaggatagttcagaaaggagggagaaggcctggttcagctaaacttttagcagccttaggagtagggctaacttcctgaaacaggaagataaaaatatctcagcttcacatttagggcctctagagagaggcactgaagtggcattccagattggtatatttaaaaacatgattcatttccccattattccttgtctggtcatycttgccttttctargacctcctaatgtttgtcataaatgaatgaaatgatyctgtcatycttacttgccctgtaagttaactttttagatacttgctagaaraataactcaggamcttgcattccaaattgaaaattncctggaatttt

SEQ ID NO: 207 - DNA, 389 bp, Homo sapiens
  SITE (175): n equals a,t,g, or c
  SITE (323): n equals a,t,g, or c
  SITE (387): n equals a,t,g, or c
gtttcagctcactgcatcctacacctcccaggttcaagcgattctcctacctcagcttcccaagtagctggggttacaggcatgcaccaccacacccaactaattttttgtgtttttagtagagatgaggttttgccatgttggccaggctggtctcgaacccctgacctcaggngatccacccacctcagcctcccaaagtgctgggattacaggcatgagccaccatgctcagccgtgtgtgtgtgtgtgtattatttatatgtatatgcatactatataaaaatatatatacactatatatataatgttgtgtgtgtgtntgtgtgtgtgtgtgtatatatatatattttgagatgaagctcactcttttgcccagctggaatnca

SEQ ID NO: 208 - DNA, 560 bp, Homo sapiens
  SITE (464): n equals a,t,g, or c
  SITE (545): n equals a,t,g, or c
gccagtgtcttcctcttggccagcatccatacttccgttattacaaaatatatgcctctgcaggtgctgttcttggtcctagccaagaaccaagagtagccagacaaaacctccaggacatgattaattgaactgtgctgtgtttggggtcaagacgcagatgatagttaccctggtagctgctttcttgctttcattaaacagtgcctttaattcagggaccacaaagcatggtacaggcattaattgaaagtacaacaccccgtgagtagaagttgttatagttatcttcgtatctcctggggagagaccccagcccagagaatctcagcatcaccattcatgtcaggcaattgggagagcctgttgcatacagctccttagtgtgggrtgtcttccctgccagcagggccctgaattttcctgaacccatagccatgtggtaggtgtgagctgttttccanccgtgacctgtggtgggtatattcccccttggtgagtttttttttttttttttgagacagtgtcttactgtgtcacccagnggtgggtgtgatctc

SEQ ID NO: 209 - DNA, 554 bp, Homo sapiens
  SITE (118): n equals a,t,g, or c
  SITE (526): n equals a,t,g, or c
  SITE (541): n equals a,t,g, or c
gaagccggccactgcctctgctctgctcctgctcctgctgggcctggcctggacccaggggagccacggctggggtgcggacgcgtcatcactgcagaaacgtgcaggcagagccgantcaggtgagtctctgtcctcaagttaccctgcagggcccttggtcccccttggccttgctcccggatctgggcaatctgaaattctctttcactcctccattcaatggctttctcagccgggtgcaggatggcaggaggtggcagctgtaacttccaagaactacaattacaaccagcatgcgtatcccactgcctatggtgggaagtactcagtcaagacccctgcaaaggtgagaccggcaacmaccctgtcttcccgctgggggctctgcatgarggatkgggagaraggctttcactgccggggtcctctcggttggttttccggaggcgggattcccgctctcttttgagtccaaggcctccccaacccttttgcaagggagactcgggttccctgagacagnttggaagtggaaggnaggagggtcaatg

SEQ ID NO: 210 - DNA, 412 bp, Homo sapiens
  SITE (392): n equals a,t,g, or c
  SITE (410): n equals a,t,g, or c
  SITE (411): n equals a,t,g, or c
  SITE (412): n equals a,t,g, or c
caccacaaagggctctgttcactgttttgttctcaaagatcatcccttgcgctcatcctctgatcttgaatttctacataactttctcagtttatatgccctgtggcaagtgcagcaagcactgtttcctgtttctaaacttgtagaaaatcatccatacatcttacagttgtcagttttaaccagataacagtggcactttgttgctgcttttttatctttagcttaggttaacaggaccctggaagtaaagttgttgatttattcaatagagtattctcaattaatttggctagatttctacatgattcaaaatctaaaaaagtagaaatgcatgcttacatgtctaaggcctgaaaaattggtagtgacatcccaaaataaatgaaggntttaaaacaaaaaaaaannn

SEQ ID NO: 211 - DNA, 311 bp, Homo sapiens
  SITE (171): n equals a,t,g, or c
agttttcaaacaataagtctgctgcaaatacattatgtaatatatcttttttttttctcttacagacaggatttcaccatgttgcccaggctggtctcaaactcctgggctcaagcagtcctcccaccttggcctcccaaagtgctgggattacaggcatgagccactgcnctcagccacattacctatatcttaaagccaaattatgttgaattcacaagtaacaaatgttcatcgagaaaaatgagaaaatacagacaagcaagaagaaaaaaataaaagcattgatagtcctaatcacaattaaaaaa

SEQ ID NO: 212 - DNA, 374 bp, Homo sapiens
  SITE (321): n equals a,t,g, or c
  SITE (334): n equals a,t,g, or c
  SITE (341): n equals a,t,g, or c
atcattctacttggctttaaaacatgttttctccaatttttttaaggttcataatttagccttttgtttttatgttgcttagattcttatgtatactgaatattttattaacatgtagcatcaggttgaacatgcttgtcattgatatatggaagatgctatagttagaagtgaatttgttctgctttcttaatcttttccatgcttagcagtgaaaaacaggttttgccccagtagagggattctttggagggtattattttttatgctgctgaatatcatgtctataatagacccgtgcatgcagcctttcctccttangggccttcatggngcccttnccccttcattcccccgcgaacccgttttttttt

SEQ ID NO: 213 - DNA, 109 bp, Homo sapiens
  SITE (109): n equals a,t,g, or c
gttttgtttggtttcgttttgttttctttgaataaatgacatggcacctcctaaaaaaaaaaaaaaaaaaaaaaaaaaaaaaaaaaaaaaaaaaaaaaaaaaaaaaaan

SEQ ID NO: 214 - DNA, 319 bp, Homo sapiens
  SITE (232): n equals a,t,g, or c
  SITE (260): n equals a,t,g, or c
  SITE (309): n equals a,t,g, or c
ctcctaagtggtagctcttcagcaagggggctttaagatgggaattaaatttgcatgagtgttccattaaaaggcacttcccttccaaatcagaacaaccagggcagaatggcagagtacagggagctcttaactagacattcagagacacaaatccaaatcccagctctgtcacccactagctccatgamccaggaagcccctcaagctttccgagacttggattactganggttggctcatgaagtcataaagatcangcaggattaccttggaaggcttttaaaaaacatgttgaacacagcaaancactttctaa

SEQ ID NO: 215 - DNA, 355 bp, Homo sapiens
  SITE (325): n equals a,t,g, or c
tgctattacttcttttattcacaattgtgaaagaggtcccagtcaatgcaaacacatacatatatccatataagatacaggattagaaggagataaaactctcctttttcacaaatgacaagattgtgtacacagaaaatccaagttaatttactgatgtactattagaattaatggatgaatatagcaaagtacagttgactcttgaatacaggcttgaattgtgcaagtctgcttatatacattatttyctttcacctctgccacctgaggacaggcaagamcaaccctcctctcctcagcctactcaataaggggtggaggnccttttatggataggtccactttccacttt

SEQ ID NO: 216 - DNA, 680 bp, Homo sapiens
  SITE (554): n equals a,t,g, or c
  SITE (651): n equals a,t,g, or c
ggctttcttgggggcctcagagctggggaagaaaggaggaaggttagcatgttgaagttccttcttgagcaacttggggagaagctgataatggaattctgcagagaagagaggagatggaaggggagtttttatttctgggttggctgaggggaatggtaacatttgccatcataactttttacccttcccccactcccagtcctggtcagctgagtggaaatagaaggatttctgctgccatcatcttccatgggctttccaggtcacacgacctacaagtagggagcagggaaagaagagtgagcctgcatgccaattctaagctcttcaggatcaaatgtcgttcgtcctgtccagaatggcagcctgtggaggcacctgcaagaacaaagtgactgtgtccaagcccgtgtgggacttcctgagcaaagagaccccagcccggctkgcccggcttcgggaggaagcaccgtgtgtccatccycatagatggcgagacttctgacatctatgttctccagctttccccacagggttcctcccccggcccntccaaatggggctctacctgagcccggaaagctcttcaaaggggggttgctaaaagagggcagaggaaagagctgaaggaaagttcagaggcagggnggagctgatgggctgcctgggtgtggggg

SEQ ID NO: 217 - DNA, 844 bp, Homo sapiens
  SITE (10): n equals a,t,g, or c
  SITE (60): n equals a,t,g, or c
  SITE (235): n equals a,t,g, or c
  SITE (239): n equals a,t,g, or c
  SITE (732): n equals a,t,g, or c
  SITE (770): n equals a,t,g, or c
  SITE (786): n equals a,t,g, or c
  SITE (822): n equals a,t,g, or c
  SITE (838): n equals a,t,g, or c
gaatgccccntcttctccaatccaaataattggatgataagtaattaaaaactgctatgnatagtaagcctttagtatcttggccagtttattacagaggacgataaatgattccatgtggatagggcataacatacagagaatgagactatgccagaaatgggaggaggcatttgaaacaacatgagtatctcagggacagatggattgattctgctattggtaggcctggaanaagngtcagaagtagcaaaaaatggataccaaaagcactattagtcacccaagctaagtggaatagctggcccagtaggagaaatgcaggttttgctctacactaagttctccaactcttgataagcctccaaaaacaaatgttaggggaaaaaaacgcagctggttatgaaaagatatatctcatttcattaaaaaatcaatgtcaatgctgttaatagaatccttttatcttcaggacagaggcaatgccctaaacaaacaccagctcaagagcctctgatgccaacctagagggtacccaaacacaaacttagcatagaggtaagaatctctatgtcttttggtggaggcaaagcatttggttggtacttcacaggaacatctttctaccaagtcttcatcatatggtatgtgccacgagtctccagttgtttgcaccactgtgtcatagctgagaatacgctgaaggttagttttgatccggaaaacctattnacaattgccgctgatgtccctgctgccacttaaaaaangcttgggtctggcatnggcagaaaggcctgtggtcccctcgtgccgattctnggctcgaggccaattnccttat

SEQ ID NO: 218 - DNA, 684 bp, Homo sapiens
  SITE (502): n equals a,t,g, or c
  SITE (533): n equals a,t,g, or c
  SITE (594): n equals a,t,g, or c
  SITE (659): n equals a,t,g, or c
catggaggcaatgcccccgtgttcagaatgtgaaaggaaaagtgctcaaggacagacagagttgagagcatgggtggagtaggcaaaccatcccaggctacctcctgccttgccacccctctgcagggcgggcacaggctgcgctccttgatgctccttggcctggagagtgaagctgacctcaaagtcagccatcttgtatgtagcaggcctcaggactatgggcgggtgctgggccactgcagccagcacrgaaaatgagccgaaggaagatccgttccacagaagcaccttgtctttctgcagtttttgagtatatttctcaaatagccataaaagtttaaaaaatatatttgacagctaactctgggaacaaaacatgttatctaagatccctttttaagtaacacatttcctgcctgccttagcrgttcttcttaagctgtaaaaatagctacccatgggcagtgaggatgaggrtccctgggaccttgcctttctngacctctttcccccagggaggtccatgactngaccttcagggcagcagcatctctggcagggttccacttgaggcgcttttcaggatccttnccgcaggacttccacttgaggccgtttttaggatcttcccggcaggactttccacttgagggcgntttttcaagattctttttggcagga

SEQ ID NO: 219 - DNA, 495 bp, Homo sapiens
  SITE (478): n equals a,t,g, or c
  SITE (495): n equals a,t,g, or c
tttttttttttttttttttttttttctaakggacagatcytcaagataatatggtttaatgagaaaagcaaggggcaggacggygtgtacagttagtatcatttgagttactaaacaaaaagtatatatataatatatattatttaatgtgcatattactgtttacttagaaatactttaaaacttacaaaagttgtacaaataaaacaatataaagaacacttatacacctgttacccagattcactcattattgtcattttaacccatttgctttatcatttgaatatatagttttgatatctctggaaactaccataagaaatttgtaacagtggttgcctccaaagagagaactgagtggctggaggtagggggaaaatgatacyttttakgtawgcccytttaaaccytttgaatttgkattgttaccmaaaaattaaattaaaaattacataagcatctctgcaaaaattcngggggtctgtacctttn

SEQ ID NO: 220 - DNA, 454 bp, Homo sapiens
  SITE (432): n equals a,t,g, or c
  SITE (440): n equals a,t,g, or c
  SITE (449): n equals a,t,g, or c
gctgaatgataacgggcatgaactaaaacttaattctgacagagctggatatggctgtataataaactggatcttaaatttatacttgggttttagttttaataactggaaatgtatcctttctaaatctttaattggtactttctataggaatgaatgtgatttgaactcattcatgttgagagggtgtcaaattgagaaccaggtagatccccaccacctacagtaaaaaggaccctaaagtaaattggttgaagaaattagatcccmaagattcttggtgrattttgaagtctycaycagtatatccatattaaaacgagatgrcagaagccaaagtaattatggcaagtaatggtttttatcttaactataagttatttgctcaagggtgtaatggtcattaccaaggcttttagaatgccagtttcnccattgcngtgggaccnggacc

SEQ ID NO: 221 - DNA, 602 bp, Homo sapiens
  SITE (546): n equals a,t,g, or c
  SITE (554): n equals a,t,g, or c
ggcagaggctcttttcaggtttcacagtgcactggacatcagagtatacatcttttgccgggcgcggtggctcacgcctgtgatctcagcctcccaaagtgctgggattgcaggcttgagctcctgcgcccagcccatgctaagtcttttacccagtggtcaaaactggcacaacacaggatttatactggagagcaacctcacaaatgtaatgaaagtggtaaggctttttatcaaatgtccttgtctttggggtcatgagaaaattcatacagaatctattaaaaatgtactaaacatggaaagacctttaagcaacagtgatgtgatgaaggtggtagttttttaaatgaactcccataagagtctacacaccatagaactcmtaccaggaatcmcmaagtctctaaatttccaaagttaactggaaatattacaaactgcagaataattccaggccaaaatatgttaaattcataacatgatgtatatcaaaggaaaaaaggacatgttgggaaatgacacattatcttccagtggtataanaatattcnttttatggtgaaagtttcctgggaaaggcctacactactattactggg

SEQ ID NO: 222 - DNA, 791 bp, Homo sapiens
  SITE (448): n equals a,t,g, or c
  SITE (673): n equals a,t,g, or c
  SITE (674): n equals a,t,g, or c
  SITE (784): n equals a,t,g, or c
taaagataaatctaaaaggtgttcaagtacattgaatcaagatgagtaatccaacttctatgttatgtaggatggatggagcacacaaattcttgcaaacattgtagaggtttttttaaacttcatccactaaggatttttttataataattacttttgaaaataaaatctcaactattttccaagttatgagtgtgctgctcttaaccctgtgagatgaaatcttcccatttggattacatatttgtagttctatatcgacatcagcagatggcaatagtatacaaatagtatacagcatgagccttccattgcttttatttctttgtttataagtatactataatccttcatctgaaacccttaggttttagaattcagaattttccccttttcagagagaatatatataatgtagattacataacaccctcaatggggcctgggnaacaccccataatcaaacattagtacattcatagtaactgggattaactatgtaaggcagtaagctacctgccttacatagtttaggtcaatttttgtcacaaacttatggaaaaactaggtttttagaaattttttggatctcagaattcgtgattagggattgctgacctctgtaaggaaactggtgtcaggtctagrattttccttctaatgaaatacgtanncattttccccctttttaaattgcttagctttggtagaggtaactgaaggctttcttttagaattccgtgtggttagattttaagaaaaatgccatggaaattgttaaggncaggcct

SEQ ID NO: 223 - DNA, 402 bp, Homo sapiens
  SITE (379): n equals a,t,g, or c
  SITE (391): n equals a,t,g, or c
cagagaaggagggtgatgtgagacttctgtccgggagctgactcggaatttgccatctaatatgttggaaaaggttctctgggcagaggtatccaaagtcactttgcctgtcaccctttgaggtcccagttgttgcctatatcatgtgaccagtgtgtggcttctcttgaattaagagctgcatgtctggactgcctgggattttacagatgtcatctcgttaactctccctggagcttgtgacacccaggagatggcagtttataggaagccctgggcaccttcttgaatgatgcttggkttggkttctatgcactggggattcctcacaagggaaagatttgttcacatctttaagggaagggaaaaaaagggcaanttggggagtccntgggataccct

SEQ ID NO: 224 - DNA, 447 bp, Homo sapiens
ttggtttcccaagcaagaaatgacactttcactgtcagtctttctaggagtctggcagaatccaggaccgggattacccttatttatgaagcgaccttagactaacagtggctctctgggtctccagacaattggccagggactctaaaaaccagaaacaaagttgagagaactccatgctggtggagaaaaacagctggcctttatcaccagaatgtgccccatagaagcagcaaagcagcaagcgacgttcttaaacaagggcctgtggcctcgtcaagatctggaggaatcatctacgactcactgctgagtgagagggctaggcagtgtctttaaggtcctgccagctttaacattgtatgctttttcttttgttcaatctctcaccacaactggaagtgttgcctcaactacacaggagaaagtttgaacaaaaaaaaaagg

SEQ ID NO: 225 - DNA, 606 bp, Homo sapiens
  SITE (543): n equals a,t,g, or c
  SITE (600): n equals a,t,g, or c
gcttagaaagcctcttgtgaaagacatttgcttaatcccaccacccccgcatcccctgtccctctcactcttcccgaaaagaaagagcactaactggatttcaggaaaatgagtgggttttgtttgataattgagaggatcaggggatgttaagaggctgtcctctttctaggtcccttcctcttgccttcgtggacctggaacagtgatctggcctcaggggaccagcatgctttycttcagcaagaatttkkrtatttcttcaatttcttgtcttttggattactattcaggacaaccaatctctcaagaaagggtcaagtacctatcctagctgtggaacctacagaaccttacttcagaagcccaatatgagtaaacaggaaaaggggaatattctctggttgacaatggtgtggctgtcactggcatgtctgcaaaggaaaaactacaatgactgcatgttaaacacagtcatcacagactgttaccactggaaaaattttggagaagcttcttccacttggaacctctttcatggtncatggaattcaggtggccagtggctttagccttgaattacaggacaggatgggattntccact

SEQ ID NO: 226 - DNA, 706 bp, Homo sapiens
  SITE (653): n equals a,t,g, or c
  SITE (661): n equals a,t,g, or c
  SITE (692): n equals a,t,g, or c
  SITE (704): n equals a,t,g, or c
accatcttttttccttcaaaaaaaaaaaaaagacatcatgatctatgctattttcaacttgtttcctgtgcttctattaatggaaattgatttttcaagattaatgtaaaatgtgtttctgtttctcccattaagtctcttatttatattagatccaatgtatatgttcctggatatttttcaaataaatatatttttaatataatacagcaaattgtaaattgttaaaggaccatttataatgttttctccttgccctccctagcactgaaactgtggttttattattgtcttcacactgttgtttgtgaattaacttgagctccttgagttcctacttctaagagattatttaaactttactttttaccttcttagtatacagagcttggtaggagctggaaacccgactcacagatttaggaaacagtgggttcttgtccctgtggacatcagaacttgggggacggagagatagagaaccagaaggcagaacaaggaaaaactcaaagaaaggaatggggaggaatggaaacgtaacaggacatgttgcctcagtgagtcaccaagggctttgggagttcttaggcccaaaatgtggttctgtgggaggcttgagggacaaactttcagggacagagcmtgccttaatncgatgtgnttaagccactggcttcggggcattccttaangcaagggttccntt

SEQ ID NO: 227 - DNA, 348 bp, Homo sapiens
  SITE (2): n equals a,t,g, or c
  SITE (343): n equals a,t,g, or c
  SITE (344): n equals a,t,g, or c
  SITE (346): n equals a,t,g, or c
gnttcggcacgacggcgaataccccgtgctaccagaatggctgtcttagtacttcgcctgacagttgtcctgggactgcttgtcttattcctgacctgctatgcagacgacaaaccagacaagccagacgacaagccagacgactcgggcaaagacccaaagccagacttccccaaattcctaagcctcctgggcacagagatcattgagaatgcagtcgagttcatcctccgctccatgtccaggagcacgtaagcactgagaaaaacgttgctttttgtccaattctctgttgataatgaccacacaatgacctcatggcattaaaatacatgagaaacannanca

SEQ ID NO: 228 - DNA, 724 bp, Homo sapiens
gaagaggaattgaccctatcttggacagcacctggagaagactttgatcagggccaggctacaagctatgaaataagaatgagtaaaagtctacagaatatccaagatgactttaacaatgctatttagtaaatacatcaaagcgaaatcctcagcaagctggcatcagggagatatttacgttctcaccccaratttccacgaatggacctgaacatcagccaaatggagaaacacatgaaagccacagaatttatgttgcaatacgagcaatggataggaactccttacagtctgctgtatctaacattgcccaggcgcctctgtttattccccccaattctgatcctgtacctgccagagattatcttatattgaaaggagttttaacagcaatgggtttgataggaatcatttgccttattatagttgtgacacatcatactttaagcaggaaaaagagagcagacaagaaagagaatggaacaaaattattataaataaatatccaaagtgtcttccttcttagatataagacccatggccttcgactacaaaaacatactaacaaagtcaaattaacatcaaaactgtattaaaatgcattgagtttttgtacaatacagataagatttttacatggtagatcaacaaattctttttgggggtagattagaaaacccttacactttggctatgaacaaataataaaaattattcttta

SEQ ID NO: 229 - DNA, 398 bp, Homo sapiens
agtaacatttggactcattttgaattgccttgaagacaggaagaagagaaatagatggtaggatttttattaggcaaaattaggaaaggttgactggatagaaataaagcagctctttaaaaatattgtagattgaagagcaggatttgtgacactcatatctgattaggttaaaaattaaatcaaggattagttaaaataaamtgctaaagttaaatatcaagacaaataactatatatcatgttggtaatataaccacaggtggaacacattatccttgtaaccctctgcgatacatggtaaaaattaaaataactgcgaagaaatcccaaactttattacatttgttgtttgaactttattatatttgttgacagtggtattagtgtaattttga

SEQ ID NO: 230 - DNA, 520 bp, Homo sapiens
  SITE (505): n equals a,t,g, or c
cttgcttccagcccacctgtgtgtccagctgctgccagccttcttgctgctgatcacgttccaagagaaccaccatcctcacacaacaaatttctgctcaactgactcatcttttgggggactaatttaatttgctgctgacagccaccatgctctcacccaaatttttatgaattctctacatgtttaaaatcttggaaatctgcttgagggagggcagaatacttcatcctgattctctttttccttacaccttgtggatcatgtgccagcttcatctgttctcaagtttgagtcatggtctcagctttgactctaaagtcaagagcttcattccctgcttctaaggaatttaggtttctgcaactgatcgatgatctttgcaatcttttttttgttttcaatatcctcctcatcgttcttgtatccttctttcttcttttcatgataaatttgtgttgtgtccctggtagcagaaatccttaccyatatgtttctgaataanttctgaaccatcctc

SEQ ID NO: 231 - DNA, 165 bp, Homo sapiens
  SITE (160): n equals a,t,g, or c
cccacattcatttagccttgaccagatactattctatatgaggcagaaaggtagactagatgacttctggtcatcctcccaggtctgtttccatgaatcttgattctggggtttcttctaagtcctcatgctaaactcctctgcagcttaggatcaggancgggc

SEQ ID NO: 232 - DNA, 418 bp, Homo sapiens
  SITE (364): n equals a,t,g, or c
  SITE (387): n equals a,t,g, or c
  SITE (391): n equals a,t,g, or c
  SITE (401): n equals a,t,g, or c
gaaaaagttctggagctggagagtggcagtggatctaaacaatgtgaatgtacttcatgctgctgaaccatacacttaaaattggttaaaaaggtacgttctgtgaaatatatatatatgttttactacaataacaataattaaaaaataactttcaggtgtctcatatgaaggatgaaaaagaggccctgataaaccaactaactttggtggaatccttgtggacggaagagctaaagattctcwgggatctgccgagaccctgcacagtttgcaaacagcttttacctgatttcaccgaagcgcatttggtcacctcctctggtgggtgttaatcacacattttagactaaggtttgatggnctaaattttatatagtttagagncggngagttgggcnacccaacaattaggact

SEQ ID NO: 233 - DNA, 321 bp, Homo sapiens
agaggttgataaatgcttttaatccccacattccacacacgggggacgctgtcattcacattttcatatttctgttctggtcgcagtctgtgtcctcaccaccctcatgaatgagggactttgatagatgcctgggtttgtgggctctgcggtactggaggagatacacaaagggtcctcggaggagggtgtgggacagctttgaggggacaaccactgcagacacctggagggagctaggggagattctgagacttaagagacatggaatggctgggcgcagtgactcacgtctgcaatcccagcactttgggaagccaa

SEQ ID NO: 234 - DNA, 663 bp, Homo sapiens
  SITE (95): n equals a,t,g, or c
  SITE (477): n equals a,t,g, or c
  SITE (486): n equals a,t,g, or c
ttaagcgctactaatgtagagaatgaattgaattgtgcaatgttgctgttctggggactggggagattagcatcccatttgcccacactgtgganagacggagtggaccaggctgtttttgaagtaagggaagccccttaaaggtacgggtttctgctcttctcatagtgtacacccacctgcctctctggctccagaagctgccagagtgcactggggggaatgttctcagcagagaagaatgaggagaagtttaatattttgcccttgaaagtcacctgaggaagtttccccacttttattttttaaaattaagtaattttttaaagaaggcacttttaaaattaacacacacatgaactgcacaccttccccataaaatttggaggtggggtgggagaaagagctaaaatcaggctcagttcccctactctggcctctactccccacaccccagtgccactgtgggtgactatnaccgacggncttcctggcttttttctttcctcccttaccccaaattcattgagcacttaaaggagcagagatgcagccagtgtctgggctcccccagtggtgaaatgatctggaagctagatgctagtaacaggtagtgattgggttttttgagtatttttccggggaatgtgtacccctgaaacg

SEQ ID NO: 235 - DNA, 739 bp, Homo sapiens
  SITE (155): n equals a,t,g, or c
  SITE (246): n equals a,t,g, or c
  SITE (278): n equals a,t,g, or c
ggtctacacagctcccagagtgtggctctctgctaacaagaacaggagaggaggcaggagggcagatcagagcgcctctgggggaaatggccgagctgcaggcggtcccagcgggggtggccaggcacactgtggcttgtgcaaccacgtcagtngggaggaragagacttctcatgaaatcccaagcatcaagccacagcccccgccaggcaggcctcggtgctgtggttgcactggtgatgagntgggagcagggtatgggacatgaggagctggntccctggcccgtggtctgggcgatgaatgagggtgggctgggggcagagcaaagctctgtgtgggggcccacctcaagggtcmagctgagggcctggacacccaaccttgtggcagccaagattgatgatacagtcgaagtcactgctgcccatcgattctggttagaaccatctgagggcctggggtgcacccagcctgcaggagagcccagccatagagctgctgccggagatggggccaggaagccatcgaggcctctcagccttgggtctcaccccagaccctctggatcgggtggagggtggagtcatcacacattgtgcacttcgcagggattaggatgcagmccaaagtctgagaacatggctctaatctttcttcaaagagtggatagtggatcttggggtggggcctgcctctctcctggtaaagcttataggcttgggaggcaggatcttg

SEQ ID NO: 236 - DNA, 576 bp, Homo sapiens
  SITE (1): n equals a,t,g, or c
ntgcagaggagaagatcccaccgagcacactggtgagatccatctgactgctgccaggggctcaagacccggtgtggaggcaagctgggcttcctggccgtgagtacccttcggttcccttctgtaaacctccccctgagcacttacctagcccaggagttaagatgcagaagcagttatgaacccccttccccatccaggtgctgcccacctggaggggtaggcaggcattcattcagtcgctcatttcaccaggactcccagcaaccgataaaacagaccaaaattcctccccttgtggccttaataccataagccttgtaggcaggacattttggtcccctgaggtaatatgaggtaatatgaagattggttcagcaatagcagagctactgtacttgggggttaatatgcaacttttctgttcttcaagtggtcataaaaattcttagaatcccctggttatgtctcatggttctttcatttactcagaaggtatttattgggcatcttgtrttgatcacagcactgtgaatccagaaataaaagccagtgcctttgccaagctacagagtt

SEQ ID NO: 237 - DNA, 510 bp, Homo sapiens
  SITE (15): n equals a,t,g, or c
  SITE (35): n equals a,t,g, or c
  SITE (88): n equals a,t,g, or c
aagccattttaaatnacattccccggcccctcatnaattggtgggcttcttgggagaaaggttacttattaaggaagaaaaaccactncccaatgtgttgttgttccggccttctcgttgatgaaatttacacggtgagttggtgagcgaatttaccttgcccctttttaaaggtatttgtggcagctcttgttgtaggaatcaggggagaggagccacttctcttttagtaagaaatgcgaagagtggcctctccatcttcagagtttcaaaatgagttcactctggtggtgagtaatgatgtcttaagctggcttaytaaaggcggaggaataagatgttcttgctttacctcacgtaccaaatatagataaggcgctggatcagcagagcctcaggcccgtgccaggacacagtcgggcctggcgatgtctgttttgctcacgactggagggttgaaggggaagcacagcctttgcttttaagggttttcttctgggaaatccacaa

SEQ ID NO: 238 - DNA, 418 bp, Homo sapiens
  SITE (200): n equals a,t,g, or c
ggacacttatgaaagaggcagtggcatgaaggcaagatgaaattagtgactttatttaaaaagttaaaaagattgccagccacaacacacacacacacacacacacacacatgctctcacacacttacttttctgtctcttgatgttgaagttcatgttgacagttaacttacggtaaacctgaattttttaatattaantcagttaaaaaaatggttataactatgtacttgcattacacttttgttttccaaaggtaaatttattgacctacaataatttaggataacagccatcagagaactctaattactgtttaagaatacttatttctataaaatatttgatagacctagatttttctttttatagtttatagttgagacacaaatataattttttgtcgttgttgtttttg

SEQ ID NO: 239 - DNA, 1023 bp, Homo sapiens
aggtccgggactgggcgctgcggcctcgtccgcgcgccggggcgggggcctagctcgacagcttcccggcggctgcgcgatggacagccccgaggtgaccttcactctcgcctatctggtgttcgccgtgtgcttcgtgttcacgcccaacgagttccacgcggcggggctcacggtgcagaacctgctgtcgggctggctgggcagcgaggacgccgccttcgtgcccttccacttgcgccgcacggccgccacgctgttgtgccactcgctgctgccgctcggctactatgtgggcatgtgccttgcggcttcagaaaagcggmtccacgccctcagccaggcccctgaggcctggcggctcttcctgctgctggccgtgaccctcccctccatcgcctgcatcctgatctactactggtcccgtgaccggtgggcctgccacccactggcgcgcaccctggccctctacgccctcccacagtctggctggcaggctgttgcctcctctgtcaacactgagttccggcggattgacaagtttgccaccggtgcaccaggtgcccgtgtgattgtgacagacacgtgggtgatgaaggtaaccacctaccgagtgcacgtggcccagcagcaggacgtgcacctgactgtgacggagtctcggcagcatgagctctcgccagactcgaacttgcccgtgcagctcctcamcatccgtgtggccagcaccaaccctgctgtgcaggcctttgacatctrrctgaactccactgagtacggggagctctgcgagaagctccgggcacccatccgcaggcagcccatgtggtcatccaccagagcctgggcgacctgttcctggagacatttgcctccctggtagargtcaacccggcctactcagtgcccagcagccaggagctggaggcctgcatagctgcatgcagacagtgccaggtaaagctttgaaagacctgccaggaggcacccacaggaggtgccagcagtgttactccgccccat

SEQ ID NO: 240 - DNA, 898 bp, Homo sapiens
  SITE (878): n equals a,t,g, or c
caaaaagttgactggcacttctaggaaccatcaacatgcagttgcttttagcccacagagcttgtttttgttttgttttattaatttacatttattgtccattcttacaagttgggacatttcacataattaagttgctaacatctcttaaaaagcaagatttggcaacaatggacctcattcccagaaggtaacaacctgctagagccaagttgtccctgccctctccagccaggtgtggggtctacaggtatcactgccacagcctcatttcttatatttgtacaacctgactgtgaatttgcaacccatacactgcgtgaatctaaattctactgaggcagagaccatggctgttttaacttttattctagttaccagcttagcatatggtagtagtgatagtagtaactgtgatcatcatcactaaaactggagtgctcactacatgctattctctgttctaagcacattccatttacttacttagtcctcatatctactttatgaattaggtactgtctttctttgatggtaatgatccttttataaaattaaattagtgctaagagactttcagcaatgttatatattgcctgtccattaaagattgttgccaaatggartgagttgtccccagtaaggattcactatcaatgcagaagaaatgcacggataatctactttgcataaagaatggggctaggttgcatctgcatggtatcccaaataaataaaatgtgccactacccttgcaccaaaattattttatgatgggtaaagttagacccttgagaggtttttttttttaaaaaaaaaaaaaaaaaaaaactttcccaaaatgcctctctgtaaagccaggatcagaatataggtgncctaacttcctatctaagag

SEQ ID NO: 241 - DNA, 385 bp, Homo sapiens
caaacttctgatctcaggtgatctgcccaccttggccttgatggttttttttttttaattttggaaaaatctccaccattatctcttcatttatttttttctgcctcatcttctgtcttcttttttggggtctccatgtaaacataagttagaatttttgctgctgtttgacatgtctcatgctctattcttattttttttttcattttgtgcttcagtttggaaaatttctgttgacctgactcttgaggcgctgatcataaacaagataactgggaaaacaatatgtttgtaaaacaatttcttgagatgtgaaatagtatctatattataccaagagtagtcccagctacttgagaggctgaggtaggaggattgctttagc

SEQ ID NO: 242 - DNA, 172 bp, Homo sapiens
cgaggggttgggtggcggttgagacagcggcggtactgggatgggtaggtgaggatccgagactgagtgagcttctgcgcgcggtgcttttgggaacgcgggactggcaacctgcggcgccaggagctgggccgaggagcccggcggtgcgggccgcgtctggatgggaagt

SEQ ID NO: 243 - DNA, 760 bp, Homo sapiens
  SITE (233): n equals a,t,g, or c
  SITE (326): n equals a,t,g, or c
  SITE (751): n equals a,t,g, or c
  SITE (756): n equals a,t,g, or c
cacgctgttcctggagcttccccatattctagccattccaaagggtgcatcagtgctcttgcctctccctactcatgctgttttctgaccagaaggccctttccttcctttaacctagacaacttctactttttctccaaagctgcttatgccagttttattaaaaatacgtcttttctctgatagcagaaaacacacacacacacacacaaacatacacacacacacaatanatattttctgagcctggtgaattctgagtttgtacatatgttgcagatcccagaccactggcattgtttaagaagcttcccaggtgatcctgnatgtataagtatgttgaagaattactccttaagtgaccctttkgggtgaacaccttcagtgcacctaaagtgccgtatgcacaacaccactttctttcttctgtttctttcctcctttcttctttctttctcttctcttttaattaaataattttcacataagccagtgtggatttatctgtaacaatccaatatttttgacctattatagctggctagcatctatttctttctttaatcactattaatttccttttaagttatggtcctgggtgccttggttaaacctattggcatttacaagagatgttgggtgtcaaagtaaacattgtatattaataagcctgttagcatttgaactgctctcttttccccttcgtagtgtacctggatggaacaaaatctgaagaggacctctttttgcnaagtntatg

SEQ ID NO: 244 - DNA, 438 bp, Homo sapiens
  SITE (335): n equals a,t,g, or c
  SITE (390): n equals a,t,g, or c
  SITE (411): n equals a,t,g, or c
  SITE (429): n equals a,t,g, or c
atttcaggaagacataacagtcagcagagccccaaatacctgaaaacataaacttgataggattgatggaaattaatcagttatagttagagatttcaatatcccactctcaataattggtagaacatctagacaaaattggcaaggtatggaggacttgaagaacattattaactcacttagcctgacatctgtagaatacctggtgaatgcagaatacatcctcccaattgtaggtgaacgttctctgttgatcatacattggaccataaaacaaggctccagtatagctgtaaaaaacaaaaaaaaaaggaagtaacaagtgttgaggaggnagtgtagaactgggattcctccatacattgctggtaaggatgtaaattgcccagnagttcttaccgagttagtgtnacttaccgttgattgccnttaccccag

SEQ ID NO: 245 - DNA, 998 bp, Homo sapiens
  SITE (244): n equals a,t,g, or c
  SITE (275): n equals a,t,g, or c
gtggtattaatctgacagagagaccaatcaatcacaagctagcaagtgcacagccagatgctggagtgtatgaaagggaccagtggataataggagaggccttccaggctagaaggaggacaggtgcagagatctggagtggagaataaggcctgtggttccctgaggggagcatggagtgttgggtggaggaaaggccagggcaaatgagagacaaagctggaaaaggaggctgggacctggntgggaaggtctgagcccagagatctgagctntgtttgttaagtctgggtggggaagaagtggggatgtttatttacttagtgttttgaatctgttaactcatttcttaaacctttacatcactttatcccacaaattgtcattataccatcaacttctccctccacaagtcactggactatttgagaatatccctcaagtcttcatgcgtgcatgcctcagccccaagattagagacagctattccactaaggctgtgttttcagactcttttaacagtatctcttagtaagaaatccattttcttatgtgtgcatgtatgcatatagatccatgaagcaggcgtttcacmgtacaatccytttggtttgatgcatgktgatacttgcctctctattctattttattgccaatggtgactaaattgattttacaactcactaacagatcttgacctacagtttgaaaaacagagtactgaagagtcytgkttcctttatttagaacagtgcaaggatgagtatctgggtagagttgtgcgttgkacataacctttgatagtcatatagttgaaccaaaaacaatttctgtagtgacattgaaaaacattttgacttgatttatcctgacagcatacataatttttggctggctaatacattatccgattgttaattacagcaaaatggataagggaaccttataagaaaacctaccaaataccaatactgtaacattaaacttatttaaatata

SEQ ID NO: 246 - DNA, 718 bp, Homo sapiens
  SITE (658): n equals a,t,g, or c
  SITE (697): n equals a,t,g, or c
  SITE (704): n equals a,t,g, or c
  SITE (711): n equals a,t,g, or c
tttttaagcctctcactcaccataggttaagagtataatccactctaccggttcactgccagttctctgtatttacattaaaactgggtgtacattttaaaatatagattcctgaatcccaccaccagagatgatcccagaatctgccttttagcaagaaccccaaagtattccagtgcaggtgaccactgaccatgcattgaaaaacacagtgccctgacacatgagtgtaaactgagctgagagcaagggccatgaaattctccaagaatcaaaagtattttgtccttgaacttccaagtgaagatgtaaaactggttaatataaaaaccactgttcagtttattacaaatcatttcccacttcctgttgctacaaaaagcagcctttcctttcaaaagatgttttccagggctcaggggaattgttaaccaagggagaaattttaagagatctaaattccaaccagcctctctgtggacaaatggaagttgaaaagtagacatttcaagcttaatgaagattgttaaaggtggagtaattcacatgcccaaagctcatatttaatgtcatttacatccctttgctttaaaatgaaaatagaatcactgaagacagaaagggaggtaattatgtaattaaatgcaatacttaatgnactattttacataattttgcctaaacttattagacctgntggtctnccaactngcctttt

SEQ ID NO: 247 - DNA, 933 bp, Homo sapiens
ggacttttctgagatacattcataaagtcttcttcctccctgctgcttctgctgcgtttttttctgttgaacaagaccccttccttcccagaacatcgaggtgacgggaagtgcccagcagattaagtctgctgttccactaaacaatggactgagagaggcaacccttagccatccacagaaaagctacatgagcaaaagcaagagacaggaagattgtcttcaaaacaaaacaaaacaaaacaaaaaccttgctaagaagcggaggtacagaaagatacgaagaatgacagagacagacatacatagattgagtgatagatagaaagagagaaggattattcacatagaggtgacagaggcaaagaaggatggagggcaaaagagacaggccctagcagaaatatggagaaaggctgtcatagwtcctgagagacaccaaagtcacagaactgataaaagggttataaacaaaaaggaccagaaaaatagaaatgaaggccgacaagaagagaccccaaggctgaaaggcacagagagtctagacagtgaaatagagtgagtgacaaggagaaacacccaggctcaggagtgatggaggaaatactggcagatagagagatcagaagagcaagaggagaggtgggaacagagaagagcggggacgagtccggggagctgagaagcagaaggcggaggaggcagtcagtgggaagattcactgacagaagagaccaggagatatggggacttggaggcaggcagaaagacaaaggacaaacagctgcagcgcaaaccctaaagacaggctgacagtaaccggtcggcagagactggtaggaagataaggacaagtcagaatcaggggtgtcaactgagatgcaaatataggcaaaggagctgacaaagagaatcacagaaaaaaaaaaaaaa

SEQ ID NO: 248 - DNA, 453 bp, Homo sapiens
  SITE (452): n equals a,t,g, or c
tgcacataagccacctttttagaaccaaggaattttatagctagacaagatcttggaagtcttccaatctagcctctttattttgtacatatggaaactkaggcacaaagaggttcagcaacttccccaaggtcacatagctggtagaggtaggctgggactagaacccaggtctgtgtgactccaaagtctgtgctcctcccactatactgcttcacagataggagctgatctgcctcaaatcttctgccccttggcctttccacaactctgcattgctgccatctaacagtgccttccactggtgccatgctaaagctcgttargaggcacttaacattgttctgtaaaagctctacagrtgtwggggtgctagctatctgttctcccggaaatcttttcaatcaattctgcaataattaggtttccagacaagcagtcctctctcatcng

SEQ ID NO: 249 - DNA, 410 bp, Homo sapiens
  SITE (53): n equals a,t,g, or c
  SITE (392): n equals a,t,g, or c
gacgccctccagagcccacccgcgccagtagtggcgatgtgccggcggcggcngcctccgcggtggcggagcagcaagcgatgtaaacagacgcacttctgttctcttctgcaaatcgaaaagtgtaagccccccaaagtctgccaagaacactgaaacccagccaacttctcctcagctagggaccaaaacctttttgtctgtagtccttccgaggttggagactcttctgcagccaaggaaaaggtcgcggagacatgcggagactccgaggtggaggargagtccccaggaaagcgcctggacgcagtctcaccaacggctttgggggtgcgaggagcgagcaggagccgggcgcggcctgagggaggaaggccacaccccgacgacgntgtgccttccgagtccag

SEQ ID NO: 250 - DNA, 941 bp, Homo sapiens
  SITE (6): n equals a,t,g, or c
  SITE (94): n equals a,t,g, or c
  SITE (112): n equals a,t,g, or c
  SITE (832): n equals a,t,g, or c
  SITE (849): n equals a,t,g, or c
  SITE (909): n equals a,t,g, or c
tgtttngacttccatagaagacaccgggaccgatccagcttccggattttagcttaggccgggggacggataacaatttcacacaggaaacagntatgaccactaggctttngcaaaaagcttttaggtgacactatagaaggtacgcctgcaggtaccggtccggaattcccgggtcgacccacggtccggtaccccgccggggcgaccgcccggcgcctggcccggggctgctggtccgccctctgggactacgagacgcccaaggtgatcgtggtgaggaaccggcgcctgggggtcctgtaccgcgccgtgcagctgctcatcctgctctacttcgtgtggtacgtattcatcgtgcagaaaagctaccaggagagtgagacgggccccgagagctccatcatcaccaaggtcaaggggatcaccacgtccgagcacaaagtgtgggacgtggaggagtacgtgaagccccccgaggggggcagcgtgttcagcatcatcaccagggtcgaggccacccactcccagacccagggaacctgccccgagagcataagggtccacaacgccacctgcctctccgacgccgactgcgtggctggggagctggacatgctgggaaacggcctgaggactgggcgctgtgtgccctattaccaggggccctccaagacctgcgaggtgttcggctggtgcccggtggaagatggggcctctgtcagccaatttctgggtacgatggccccaaatttcaccatyctyatcaagaacagcatycactaccccaaattycacttctccaagggcaacatcgycgaccgsacaracnggtacctgaagcgstknacgttcacgaggcctycgacctytactgccccatcttcaagtggctttatcgtggagaangctggggagagcttcacagagctcgcacacaa

SEQ ID NO: 251 - DNA, 660 bp, Homo sapiens
  SITE (492): n equals a,t,g, or c
taaaagatagcattttagtgactttctattctttcagtaaacatatcttacatataaattattgcttatcagaattaaaggtcagctattaaagattaatgaattccaaatgtcatttgatagcagtgtcaggagtggagaggagcttaccactggggaggaaaactagtagggagatgaccccagtggtgtgtgaaccatcaaaacatgcagccactctccttagtgtcctggtatgctttgtgaatgtagaaaaataacctctggagcctaatcattcttgacatttaaaattgcctcttattccagaaagttataatattacaagttctattaagaaatgttgtttgaaagtaatgctactcctgggaagaagtctctttcattcaaaatagtaacagtattagctaaaacagsttttatsagaaatacctgaaacctcctaattatccgatttattgggstccaagtgrgtttccagaatkgkgtsantgtttacttaaaaaatgaktrtgcttctcagaggaaatgtgtaaaatcaaatkstactrcataattktatatgtkgaattagaatcatgttaatgaaktatttgckacttttgrwtttagaataacctattkrrgrraaccaagtraataagtgaktgtkkgattktg

SEQ ID NO: 252 - DNA, 736 bp, Homo sapiens
tatatatatttttatctaccttttttcccctggagtggaaatatcagcctgtgtttgaatggagacatgaacagcacagcctcgtgctcatgggtagagagtatgggacaaacctgccctagctggttcctggcccagccacttgccagctgtggggtctgtcctgtggataataaatagcagcaccttcctcctgggagcctggcgggatggcagctgtgagacattgagatcgtgactggcacctgggtgaggactctgtaaatggaactcatcctcaccttgtccttcttaggcctgggggtgagaagctgagcggccagcatggmaagaccaactgcatttccagctttcttcttttctttgtggacattggcagttgggtttgaactgtggccctarcctgcctttgcgattggaattgcgaggcagtttggcgttggagcggtttgtctctctaagaagarcatccctggctaaagcagtgcagatcaacccggcacacaccgccttgtccttgggcctggaaaagagcccgcagccgcagggatcctcttctgcacggtgcatgccttcaggctgcacgctgcctctgtttctcaacagtccctgttccttctgggcaatgatcaaagcgaggaaataggacagggtcagtttccgtggaaggagcattgttggcaagatgagaacaggtggattcctggggtttgctcattggaatgtgcctattgat

SEQ ID NO: 253 - DNA, 924 bp, Homo sapiens
gggactcctctgtgctctgctctctctgctggcagggcatggctgggcagacacccgtgccatcggggccgaggaatgtcgccccaactcccagccttggcaggccggcctcttccaccttactcggctcttctgtggggcgaccctcatcagtgaccgctggctgctcacagctgcccactgccgcaagccgtatctgtgggtccgccttggagagcaccacctctggaaatgggagggtccggagcagctgttccgggttacggacttcttcccccaccctggcttcaacaaggacctcagcgccaatgaccacaatgatgacatcatgctgatccgcctgcccaggcaggcacgtctgagtcctgctgtgcagcccctcaacctcagccagacctgtgtctccccaggcatgcagtgtctcatctcaggctkgggggycgwrtccagccccaaggcgctstttccagtcacactgcagtgtgccaacatcagcatcctggagaacaaactctgtcactgggcataccctggccacatytcggacagcatgytctgtgcgggcctgtgggaggggggccgaggttcctgccagggtgactytgggggccccctggtttgcaatggaaccttggcaggcgtggtgtctgggggtgctgarccctgctccagaccccggcgccccgcagtytacaccagcgtatgccactaccttgactggatccaagaaatcatggagaactgagcccgcgcgccacgggggcaccttggaagaccaagagaggccgaagggcacggggtagggggttytcgtagggtcccagcctcaatggttcccgccctggacctccagctgccctgactcccctctggacactaagactccgcccctgaggctccgccccctcacgaggtcaagcaaga

SEQ ID NO: 254 - DNA, 656 bp, Homo sapiens
  SITE (629): n equals a,t,g, or c
gtccattataccaaaaaaatatgcaacagtgatattacactgtatgtataccgacgtggtggacctctctgttttgcactgtagcccctctgtggggagtctcagtgaagttcaggctctcgtcgcagggaagccaaacatgaccagggcagaagaagccatggaactttaccacatagcactgttcttggaatttaacatgcttgcacaagaggagactacagtcatcaggcctgcctgtgcagcagagctttcaaacagctgcttactgcctcaatcttaaatatgaaaacccatccaaggataactggacatttgaggaaagcttccaaattgagacagagatcagagcaaaaagaacaaagtcctggaggaagcagacaatgaagggagcagaagaaaacttcagtagaatcaaaatatccttatataaaagaactttttatggaatcagtgagacataagcaggatgtattaaagtaaaaacaggagcttttagaaataagatagcagaaatgaaagatatwatggaagcattgaaaggtacagttgaggaaactagaaagtaataatatawtaagagtggtgggmcaawtaactaggtatcatcmggtctacactacaatgtngcttagaattttccgggaaatgaggag

SEQ ID NO: 255 - DNA, 583 bp, Homo sapiens
  SITE (495): n equals a,t,g, or c
  SITE (514): n equals a,t,g, or c
  SITE (529): n equals a,t,g, or c
ctcagagtagctggatttttctaaagcaattgcagaacacctgctttttctttgtttcctctagaaaggaccaaccacrccgagctcagttatggcacacacagtgggacctagacaaagggagagggtgaccgacatcccaactaggtaaacacagaggaggttccacatggacttatctgggtggctgttttgaaaacgagaaacagtcaagagtccctggccccacagacccacctccccaactcagcactgtctgtctgtgcagcaggtgcaaggacgtgttgaactagctctctgcagcctccttggaggatgtgatcctatgggaggggtaggagtattcagtccttgacatytcccaaatgtgtgattccgggatgccaaaggcctttggccaggtaatgcagtgtytacaggytgaggttgacatgcatccccaccctctgagaaaaagatcctcagacaatccatgtgcttctcttgtccttcatnccaccggagtctgtctcanacccaaccagatttnatggagtgaagttcaggaggcatggagctgacaaccatgaggcctcggcagcca

SEQ ID NO: 256 - DNA, 712 bp, Homo sapiens
  SITE (16): n equals a,t,g, or c
  SITE (667): n equals a,t,g, or c
  SITE (676): n equals a,t,g, or c
  SITE (689): n equals a,t,g, or c
gtttaaggtacccctnccggtaccggtccggaattcccgggtcgacccacgcgtccgccctttcgatkgcttcagtgttgaccccaacaatgggaccctgttcacaatagtgggaacagtggccttgggccatgacgggtcaggagcagtggatgtggtgctggaagcacgagaccacggggctccaggccgggcagcacgagccacagtgcacgtgcagctgcaggaccagaacgaccacgccccgagcttcacattgtcacactaccgtgtggctgtgactgaagacctgccccctggctccactctgctcaccctggaggctacagatgctgatggaagccgcagccatgccgctgtggactacagcatcatcagtggcaactggggccgagtcttccagctggaacccaggctggctgaggctggggagagtgctggaccaggcccccgggcactgggctgcctggtgttgcttgaacctctagatttgaaagcctgacacagtacaatctaacagtggctgcagctgaccgtggggcagccaccccaaagctcagtcgtccagtcactgtcactgtactagatgtcaatgacaacccamctgctttacccgagcatyctamcgtgtgacagtacctgaggacacacctgttgggagctgaanttggttgcntgtagaggccctntgacgcttgacccctgggccctt

SEQ ID NO: 257 - DNA, 619 bp, Homo sapiens
  SITE (539): n equals a,t,g, or c
gccccccgccaccaccccacgccaggccttcagtcttccgaggatgaggggatctcagagctccggacagggaatcggtggtggctgggcgtggccgggcccgggccccagccgacttgagggtggaacccggcggcggaggctctaaagcctgaccgaggcggggccgcgcatcccgctgccccttgaccggaagcgggacccagcctcggccaggaagagatgatgggcgaggggtgggcggcggccctgcagcctagwgttttggggccttggtgcgcgatggcaaccctgccaacgtttcccgggagctcagtttgtggcaggctctgccaagcactttatgtatcttgtatttcctccgcctcctcccagctctgtgaggcagaggtggaggagacactgaagcgactgcagagccagaagggagtgcagggaatcatcgtcgtgaacacagaaggcattcccatcaagagcaccatggacaaccccaccaccacccagtatgccagcctcatgcacagcttcatcctgaaagnacggagcaccgtgcgtgacatcgacccccagaacgatctcaccttccttcgaattcgctccaagaaaaatgaaattatgg

SEQ ID NO: 258 - DNA, 546 bp, Homo sapiens
  SITE (356): n equals a,t,g, or c
  SITE (378): n equals a,t,g, or c
  SITE (456): n equals a,t,g, or c
  SITE (504): n equals a,t,g, or c
  SITE (522): n equals a,t,g, or c
gcgggtgactccttcctccgtcgtcccaccatgcgtgcggccatcttttgttgcgtgcctacactgtcgatgtcaggctggggacacacaggaccgaccgagcatggtgagatctagaatttatgcctcattcagttaatgttctttagatatttgttcaacatttatttggtaagaagtgggtaaaagtttccactgataaagaccttacactttctcagtaacctatgtaccagctgtcctttcgctcacatctttgagcttttctccctgtattagtcagggttctctagagggacagagctcataggataaatgtatatgaaggggagtttattaggagacttgactcacangatcacaggtgaagtcccacantaggccgaatgcaagcctgaaggagccaggaagccagttcaagtccccaaacctcaaatgtaagggaagctggacaanacagccgtgtctgttggccaaaaggcccaaggagcccccggggcaaancaaatgggtgttaaagtnccaagaagttcccagagctgaaga

SEQ ID NO: 259 - DNA, 471 bp, Homo sapiens
caacttttccttttctaattttgcccccactccctcttgtattcctcaattcattctgtttttaggatcaccagttaattctatttgagaaaatatttttagtttcttatgttgctcatcaataatcccaagcaatagtctgacactttttaaccttatgaataaatacctatcagagtaatactatttccttctgctgcagaaacctcacagttcttagagcccagtgtgtctaaatccccaaacagctgccccaacagaagccaagccctaggtggcagctgcctctccaatattccttctgctttttgttatgatttccaatgagtcaacaggaaggtattctgagtaaagaagaaatagagcttttagacaggcctctcctcctcccacaaccccaaaaatacagttcttgccaaatgatccaaagcaatttccaatccaatttgccactcctgtctgtatgaggta

SEQ ID NO: 260 - DNA, 446 bp, Homo sapiens
  SITE (400): n equals a,t,g, or c
gccaaagtgctggggttacaggtttgagccattgctcccagcctgaatttttaattaaatttaaatttaaatagccacacatgtctagtggctaccatattggacagcgcagttctagaccgatgtgattcaggatcattccctcagcatcgtggggcaaagagaaaactgccccaagctggcctgtagaaggctcaggcgaaggtttcccaatgccgggatggggggtgcgctcagcagcatcaccccttatgattctcaatcgctaatagctccactcaggttcattctcggtcagggcatttytttktcacagaagggawtcacccagytctkgggagtacagcagccttcaattcaggtagtccttgttcaagacaagcgggccttgacttgactngaagtttcagttccaggtctggtatcaaatcactcattaaaataaa

SEQ ID NO: 261 - DNA, 401 bp, Homo sapiens
tttttttgtagagaaagggtctcactgtgaatgtcacccaggctagctattttcaaacatttattgctttggaaccagagcccatatgtggataaaggtaggtagcattactcttgatgatgcaggcatgagtgatgtcctctccattccccaatcctcgagccccttgaaatgctatttgaggaatgctatcaaaacaccagtgctctttgagagaatggtgcaaaaatttaaaaaaacarcctttggtgggaatggttgttcacgsctataatccaagcattctgggaggctgaggcaggaggatcgcctgaagccagctggagaacagcccagacaacatagcaagacctcatctctattttaaagttataaaataaaataactgtggccgggcacgg

SEQ ID NO: 262 - DNA, 320 bp, Homo sapiens
  SITE (295): n equals a,t,g, or c
  SITE (317): n equals a,t,g, or c
gtttggagaaagggtctcgctctgctgcccaggctggagtgcagtggcatgatcacagctcactgcagccttgaccttccaggccatgcaagtgttcctcccacctcagcctcctgaggagctgggactataggtgtgagccaccatgcctggctaattaaaaaaaaattttttttggccaggtgcaatggctcacacctgtaatcctagcactttgggaggctgaggggggtggattgcctgagcttcaggagtttgagaccaacctgggcaacacagtgaaacccccgtcttncactaaagcggcacgaagcggnaag

SEQ ID NO: 263 - DNA, 517 bp, Homo sapiens
  SITE (66): n equals a,t,g, or c
  SITE (167): n equals a,t,g, or c
ctcaaatgcgcactcaggcttctgcccaaggcctttgcactaattctcttcattagaatgttattngcccaggcatctacatggtttattccctcccctacttcatatctcaattgtccccttctggattatgtcttttctaacaaccttatttaaaagtgaacctngcccctcacatcctggcactccccattccccttcccagttgttttattctccactgcatttgtcttcatttcatttactaagtgttttacatatttatttattatctctcctcagtagaatgcaagctctatgacagtaggaatttttatatattgtggtcaatgctgtatcttcaatgtcctgttatataaaagggactcaacagagatttgttgagtaaacgcgtgggtgaaatggaatatgagaaccaatgactgaaaaatggactgtatggctgatctggagggcaatatatgaagttagtctgaaagagtaccagatgatgtcaggctttataaaggagttttgt

SEQ ID NO: 264 - DNA, 643 bp, Homo sapiens
  SITE (331): n equals a,t,g, or c
attgcccaggttggtctcaaactcctgggcgcaaggatgctcccaccttggcctcccaaagcattgagattacagacgtgggccaccacacccagccaaatgtcacttttttcaattaagacagttgtctttgccaggcatggtggccacacctataatcccagcactttgggaggcaaaggcaggaagatggcctgagtccaggagttcgagaccagcatggacaacatagcaagatcccacctttacaaaaaacagaagaaaaaaaatgaaattcattagagtgtattttatttttctccaccacacttaccaccatgtgacaattttngtggttgttattgtcctccctccactagactgccgtttcagtaaaagaatggattctgtctattttgttcattgctatatccgcagcacctcttaacagtccctggsccacaggrgatatctgataaataatttttcaatgttgaaagaataaatgaactttgaaaaattgggaatataacacaaaagcataatccagtggaggaagttaagtctgcggaagaaggttccagcgagaggtcctgatggtatgagacatgatcatgtatgagctgcaaagcagaagcttgttaaaattcacaaaggtgccaca

SEQ ID NO: 265 - DNA, 405 bp, Homo sapiens
  SITE (337): n equals a,t,g, or c
  SITE (362): n equals a,t,g, or c
  SITE (402): n equals a,t,g, or c
agatatcacaaaatgtctgtcaaaggacatttgctcttaatccccagtttgtctttatcttttcatgtgtttggagatgatatctctgctctttcttacagatgaagttgtttatttgtctaatatttgatgttgaaacaactgctgtcaaagattgtatgggactctagccatatctttgagtttagacaaagactggaagagtttagatttactgtcattttactttttgtcagatcagagctttgatagcctagtgattccagctttttaatactctgagatctccaaaatggatgatgtgcacatgtgtaagatgcatgaggcccagcatttngggtgtgaccctatcactttttgtnccactcaaggaagtaaaactgggagtccaagttaatgagnatc

SEQ ID NO: 266 - DNA, 427 bp, Homo sapiens
  SITE (369): n equals a,t,g, or c
ggcctcagagtgagagccaagtcagggcgagaggatgccggtctcgggtgtagcctgaccccacaagtcccttcctaagctgctgggagtcgtcacacccccacccgtgactgggtgragtcgtagtactcacctcccagggttgccgcaaagattaaacagaagcgtccggtgcagtgctgaggacagcacaggcccggcagctgcctgggtgcttctggtgtcactartccattccacctcagcggttcctgggatgctcgtgaaaaatacagcctcagctggggtccaratgccgggtcaragcccaraatgtgccaggcctctccagctgcttccactgtgcctgatgttggaatctgtgctcancctggggcacatcctcaggggaaaggggctgcctggctgtgtccaaaactgaaggggg

SEQ ID NO: 267 - DNA, 328 bp, Homo sapiens
ttttttttttttttttttttttttttttttttttttttttttttttttccttgtcagggtttatttcatcagctaacattcattctcgacctaracaaaaacaattagatgattatgacttgcttttccatcatcaactcatttttttgtatgaataaccaaaaaatttcttcamcmcttttttttaaaaaraagctataaataaataaagctttaaacaatcctgggttcaagttaaacagttccagttcccgaaaagttcacagccttgttttskgggcagttctgctgttcctggcttccccttccaggaggggacgtttgcagg

SEQ ID NO: 268 - DNA, 1285 bp, Homo sapiens
agttaacggtgtctcaggtatacataaacagcttaaattattagcattgctataattttactatactctcatctaaatctaaaatcagtcttcaaaataaaaacaaattgtcctttgccaaaaatttttttaatcgcacaattaattgacattaactgccaattctttttggctaattgactaattttaacttctgtgttgcttttccagaggcatggctattgcaccttgggagaagcctttaatcggttagacttctcaagtgcaattcaagatatccgaagttcaattatgtggtcaaactgttgcagctaattgcaaaatcccagttaacttcattgagtggcgtggcacagaagaattacttcaacattttggataaaatcgttcaaaaggttcttgatgaccaccacaatcctcgcttaatcaaagatcttctgcaagacctaagctctaccctctgcattcttattagaggagtagggaagtctgtattagtgggaaacatcaatatttggatttgccgattagaaactattctcgcctggcaacaacagctacaggatcttcagatgactaagcaagtgaacaatggcctcaccctcagtgaccttcctctgcacatgctgaacaacatcctataccggttctcagacggatgggacatcatcaccttaggccaggtgacccccacgttgtatatgcttagtgaagacagacagctgtggaagaagctttgtcagtaccattttgctgaaaagcagttttgtagacatttgatcctttcagaaaaaggtcatattgaatggaagttgatgtactttgcacttcagaaacattacccagcgaaggagcagtacggagacacactgcatttctgtcggcactgcagcattctcttttggaaggactcaggacacccctgcacggcggccgaccctgacagctgcttcacgcctgtgtctccgcagcacttcatcgacctcttcaagttttaagggctgcccctgccatccctattggagattgtgaatcctgctgtctgtgcagggctcatagtgagtgttctgtgaggtgggtggagactcctcggaagcccctgcttccagaaagcctgggaagaactgcccttctgcaaaggggggactgcatggttgcattttcatcactgaaagtcagaggccaaggaaatcatttctacttctttaaaaactccttctaagcatattaaaatgtgaaattttgcgtaaaaaaaaaaaaaaaaaaaaaaaaaaaaaaaaaaaaa

SEQ ID NO: 269 - DNA, 518 bp, Homo sapiens
  SITE (26): n equals a,t,g, or c
  SITE (98): n equals a,t,g, or c
ctctcccggtaggaataattggaggnctggtaaggtatgaatgcctggattaaaggaccttgcccaccatggaattacatttggtaaaggctttttcntcctggtatgaaattttctggatggccatacccaaggtttggaactgcggacttgaagaccttgccacaatctgttacatttgtaaggcttctctccagtatgaattctatgatgactggttagagaagacttgtacctgaagactttgccacattctttacattcataaggtttctctccactatggattagaaaatgggcagtaaggtctgaaaactctctaaacgctgtgccacatttattacatttgtaaggcttctcatcagtatgagtttttcgatgtcgtataaggtctgatttctgactaaagatcttgccacactgactgcatccataaggtctctctctagtatgaattctctgatgagaggtcaggaaacacttgcgcccaaagaccttgtcacattctttacatttgt

SEQ ID NO: 270 - DNA, 390 bp, Homo sapiens
ggtcacggaggagcaaacacaccaagtagtagaaactkagcaaaacaaagaagttgaaaaatggaaaagactggcacagttaaagaatcgtgagctggagaagttccgcacagaactagactcaatattagatgttctccgagagctgcaccggcaaggagtggttgtgccagttgcttttgcagatgaaatgaatgcaccagagtattaatagaaattcagatttcataatgaccttattaaaaggcctgaagatggrtgggattgtgccactgtcaggacagcttatgaaaaacaagtgttccaatatgtttccagaaagcaaacaaccaaagcaacatttcaaaataaattgcctttaaccaataaraaaaaaaacaaaaaaaaaaa

SEQ ID NO: 271 - DNA, 419 bp, Homo sapiens
  SITE (32): n equals a,t,g, or c
ctgcctctctacagcttcatcttgctttcttnactctgctgtctctgtctgtgctcccagctgcacaggcatatgcagttcctacgaatatgcctccctctacaccgccacagggtctttgcacatgcarattctttagcctgtggaactgcttgctctacctgctcatctcccagttgcctccctacacctggccattctcccatatccctgctttactctgttgagaaccttcatattccagcttgaacacagttttctgggaagccttacctaatcccccaggttaaaccatgttccctttataaatccccacagcatcaggattctttcctcaactgtttttaaatacagtcagcccttcgtgtctgtgggttccccatctgtggattcaaccaacagcagatcaaaaatatttg

SEQ ID NO: 272 - DNA, 381 bp, Homo sapiens
  SITE (13): n equals a,t,g, or c
  SITE (189): n equals a,t,g, or c
gggccccaagaanaagaaagcctgaagcaccgtgttaacctcccctggccctctggctggcccccaggagcctttggttcaagtaaacgaccccagggtggttccccagcaaagctgcttcctctctgctcctacgcatcctgtcctggcgggaagagagcgtctgggtccattcaagactctgatganacccctccccgaggcctcccactgccgggtcccaggacccttcccccttcacctggtgacaggaacactcctttcctggtatggaacgtgagctcccgtgacatgatgataggtcttctccttgggcctcccccaataaatctgtaataaacmtgaaacccacctacagctaaaaaaaaaaaaaaaaaaaaa

SEQ ID NO: 273 - DNA, 570 bp, Homo sapiens
  SITE (28): n equals a,t,g, or c
  SITE (44): n equals a,t,g, or c
  SITE (535): n equals a,t,g, or c
gatgaaaatggttgcacggagtatggcncccaaaaatacacaangggggctgaaaaagttcaacatattttaagtcaattaatcaaattgcattgattcttgatgctttccttagaggcctacatgatttcttagattgctctgataaactatcataaggggtccacttcccctcatttaggctccccccagggatttcktttcccccatgtcatacacccagtcctaaatcaacccccaaggctatccttccatcccttctgcagagggaacttttgtcagactctgcaacaaactcctagctctatccagagtgtcctctgctgctaagattggtatctttctcctcaaaagcctggatggtgaatgggggtgcattagtcagaattctccagagaaacagraaaaataagattcgcgtgtgtgtgcaaacatatatataaataaataaaaatatatttattttaaggaattgactcacatgattttgaaggcaggcaagcccaaagtctgcaaggggtgggccaccagaaanctggtgctacagtgcaaggtctgaaagttgccaaa

SEQ ID NO: 274 - DNA, 522 bp, Homo sapiens
  SITE (428): n equals a,t,g, or c
  SITE (466): n equals a,t,g, or c
cgcctgcaggtaccggtccggaattcccgggtcgacccacgcgtccgcggacgcgtgkkcagagcctagaatagtcataggataatatgatggattttcaggatgggagtcttgaagtgataaaccatacggtgcacaaaatttatgcttctaaggaagacagtgaaatctttgtttatgttaactgtgtgcctttttgaaaaagtcacttagaaaaatcctcagaaagcaactagagaattgaatacgccgaaattcatgacaagctatgaagctggacttttaccaagttacacatgcctaaagaagatacacaatcttcactgtagtgaaactgacactggaaaatgaagctagtcactcamatagataaaaaaaaaagtgacatcttgtgttacatctgcgccatcaaacattttaaaacatanatacatttatttgttacagtttccttttaaattaatanagaaaacacaatggaacttaaatatgaacccctgacataaatgtgttctaagtcaa

SEQ ID NO: 275 - DNA, 659 bp, Homo sapiens
  SITE (626): n equals a,t,g, or c
  SITE (650): n equals a,t,g, or c
  SITE (657): n equals a,t,g, or c
ccccctttaaatgggtaatgtgtcaacatcttaacaaggtttaaggaagacacacctatgaggtgaaaacaaatcatcactctataatttcttagtattaccaaatatcgagtcaagggcctgatcagccccaaaagaatgaggcacttttaatgtgacaccattcctggcagtctcaggttcggctctcccaggccccggatgcagatggctgttaggggctggccatcctcatctcaacggtcctggaaggcaccactttcagggcatatgcaatgactaacattccggtgagcaatgctggactcaatccgtagactgttatttcatgttcccagtaccccgtgcaggaagggaarggaaatgagtaatagatgtatcagtcccattcaaaatgtgtatgtctgcgaagctgaaggcaaaaattaaatactaaaaaaagatacaaaaatttaaactttaaacaaatgaaaatttaaaaataaaataactttttttaatgttacccacagaaaatcggtaagaattttaaaaaatgtgtatgttctccatgccatcacccccattttgcacacaaagaactgaggtctgagtgctacatgccaaatggccaacagtgacaaatnaaaactgggtgtgggattcagccngcccccnaa

SEQ ID NO: 276 - DNA, 432 bp, Homo sapiens
  SITE (316): n equals a,t,g, or c
  SITE (408): n equals a,t,g, or c
  SITE (423): n equals a,t,g, or c
tttcaatactatgctaaagaaaagaagcattctaactttgtgggaaaattcaaactgtgagtgaaggtaactccaacaaagactgaaggttaaaatatcaaggcatgacacaaggaataagaagtggaaacagaatgtagttacaataatctaagtgagagtttataagggactgtgaaactatgaatacaaaagataacaacttagaagcagaattaaaagaatggttagcaaagctaaaatgccactaattaacatgtgaaacmtatagracytttgtaagaacttagaaagaacatttgtggaaaaatgaatntatttgtctcaaaatattgtttgaaatatcaacttggactccacataaatcctgatgttccctactatttgaaagattttaggaaagatacngccatagaactaacnttttttaaa

SEQ ID NO: 277 - DNA, 447 bp, Homo sapiens
gagggcttctccttttttaatcaatgaccaacttatccagctttggaaatctggacaaagagaaggctgagaggaggcctggtccagtgtctaagggtctctgagtgagtctgtgtcagcatgtgggccccagctgggcgtgtccatgggttgggcacagcagtttcctgagtaagagccagccccaccctcagggcagcattccagcccaaaaagaaatccaggccctccaggttcggcctgttttcaaggccctcaggacagtcaataaataggttagattctgaccaggsgagtagggggaasccggracccccaccaccaggaagtggttcttcttccgaaacaatctccacaggccccgatggttgccacgcacatccaggtcccagatatggaggcacttggcaagctgggtccaggtggtgaagtcatcatctttctcca

SEQ ID NO: 278 - DNA, 661 bp, Homo sapiens
  SITE (592): n equals a,t,g, or c
  SITE (652): n equals a,t,g, or c
  SITE (656): n equals a,t,g, or c
ttttccaatgtatattgtcatttaatctgataggtaatctgctataaaactatttttcaccctcatacaactcatagtcattaaactgaaacttctttcagcttctgtaccagactaaacacacttctacgtttcttgttcattactagtactttctccatcactgtaagtctagacaatcaacaaaacaacaaatcaaagtcaaactgatagtctttgctgggattccatggtgtaaagagtccctgcatgattgatttcaagctgccagcrtgacgccactgcaggtggtgctggggagacgtgcattatcccccatggtgcagtatctctcccccaagccccacacagacactgttggtgtcaataactccagagcagrtgtaatrgtargcacagtcaawtaattaggaatggctggatttggatatttagggcctttgttttttttaggtttgtataatttaatttctaatcatgtgtgtttaacagccagtttgcaaaattcctgaaaattggatttcatagatcacatccagcacaccactgcttgttagcagcagcgccaggaattcaccgggtgtgcctgaanatctggctggatcagtgaatgaagatccatttccccatctgccaaatggggctaatggancccnaagac

SEQ ID NO: 279 - DNA, 444 bp, Homo sapiens
gagaggacgttcaactgttgctacccaggttgccacttcaaaactgtccatggcatgaaagacttggaccgccatctcagaatccacacgggagacaaaccgcacaagtgtgagttctgtgacaagtgcttcagccggaaggacaacctgaccatgcacatgcggtgccacaccagtgtgaagccacacaagtgtcacctgtgtgactacgctgccgtggacagcagtagcctcaagaagcacctgcggatccactctgatgagcggccgtacaaatgccagctctgcccctatgccagccgcaactccagccagctcaccgtccacctgcgatctcacacggggccgggaccgggctgacctcctggagcacagccggctgcaccaggccgaccacccggagaagtgtccagagtgcagctactcctgctccagcgcggccgc

SEQ ID NO: 280 - DNA, 773 bp, Homo sapiens
  SITE (616): n equals a,t,g, or c
  SITE (719): n equals a,t,g, or c
cggcacgagtgaacaaagtgttcatgatggcagtgatgaaagttatgcatgggctcagcaacatggacttctgctcaccaaagccaaactggctacagctactgctgagtgcccagtctgctggcagccaagaccaacattggctccccaatatggcaccattccctggtggcaggctgatacattggattgcttccatcatggaaggggtagtatttttttcttactggaatacacactttagatacaaatttgccttcctgacacaaaatgcttctgccaaaactaccatccagacccttaacgaatgaaggtttgggtcaccccaccagttaaagaaccacawtcagctgaggagytcgyttgctgagggraaaaggratacataatggrtaatggragraggtaggtatgrataccmgytwtaaccacgtgagcagttacagraacaaagactaattgtcatgaatgtgtcttctttattttataatgaatgtgtatacaacacagctttgttttcatccctttcatatctctttatcatgtacagtatgatatactgacttttatattagagtatttaaatattggttaacttttatatcaagtttttaangtttatgggatatcagggagaagcattaacatcatcccagacttttggatcctcttctggggaggtgttaggttattttgggggttttatgcaggtaggcggnatcaacgttagcaggaagttttacctgggtactgcctttatcagtatgaagttt

SEQ ID NO: 281 - DNA, 328 bp, Homo sapiens
  SITE (258): n equals a,t,g, or c
ggcacgaggacctgccagccccacgctgggggtcccctgacaggcggatctgagtccagagcaggaggccccaggtccctgcagagccaggcagtgctccctgactcagctgggactgggctttcaagtagtaatcaacaacagcatgactagccctgctgtaatagcagcagcagcagcagcagccatttcatcaagcgcctgcagcgaacggagcagacgcgcttattattccatcttacatgggggaaagcgganccacccggggaaagccgcttgacatccatcacgggagatggcggagttaattgaaccagcatgcagcaga

SEQ ID NO: 282 - DNA, 409 bp, Homo sapiens
gctcctcaagtggccctccccggggtccacatgctgtaatgcatcatcccccatattttccctgacactgatgatagattgggttgtatagctgaaagttacagccaaatggatgcagcaaaggaacctacagcagtatttcccagcttaagtaatatgctgataaactcactctttttctgggtatctcaagaccccagggcggaagaaaggggtccagasgcataaccagtgtctcttaccaggaaagtgaggaatacagcaagcacaatcttacaaaaacctgcttctcasacccgcggtgggggaagtctggattccaaagtcctcattcagmcttcactaaagactacaattttactgtcttagggattcaccacctcccttctgaaaacattctggcttctat

SEQ ID NO: 283 - DNA, 410 bp, Homo sapiens
  SITE (93): n equals a,t,g, or c
atcaccatcatcatcgtcatcgtctatacctatcctatgaccctttcagaaatctctgttctccttcgctattcatgggaattctgttttctngatgccctcatgctcaagaatctcctcatagttcctcatccagggctaaattctgatgtcagtattcctcccttcccataacagcttcggatctcatatcccaaaaatgcctttgaagacaggatgatgttggcagtcttgctgtgtcatttctgaagtttactccaaaaaatgaaattctccagtgacaggcatgcttaartgcarctgtggatactgcatgttttgataaagatgaaatttattaaaaagcaaaagaacctccactaaacacccctcttcccattgacgctgggaggggtaaagaaggcttcttg

SEQ ID NO: 284 - DNA, 625 bp, Homo sapiens
  SITE (442): n equals a,t,g, or c
aaaacagcagtaaaattttagaagttagaaagcagctggatgaggcgataactaccttwgcaagctwgrgtaaaccagatcctcaacttaaagkggaggamgctaaggamcaacctgatttatactacagaactccccaaagcctcaaaaattgggagcaccagaaagagatgaaaatggatatgcaaacgggcttataattggtttaaagtctgtttaagaagcaattagacctttagattttcaacttacttcacatagcctggcaactgcttgtgctgtgctctaacgaaaggctggatgttcattctctgaggaaagtaattcaaagtgtctcttgactagggagagcagccatttattgaaggtaaatattccatacagaaatcagtaggattaactggaagttcacatacatactgaattttgagctatatccttntcccgctatggtttgaccagcccaagggggaagacctaatggtactgatataagtggtttcccaacagtatggcccagctccatcaccctcagtgaagactacagccagcagagtttatagtcagctttttagggcattacactccacttcagcatccagaaagcttctgatacaaaaggaga

SEQ ID NO: 285 - DNA, 134 bp, Homo sapiens
  SITE (93): n equals a,t,g, or c
atttagtccactggtaccagcatgatttagtaatgagatctgggctctaactccggtgatgctgatgatcactgtgtgatcttggccaaatcngttaacttccctgagctccagttttctcatttgtaaaataa

SEQ ID NO: 286 - DNA, 312 bp, Homo sapiens
tctaatcttaagaagaaatgctgttgttccttaggtcaaattgactatatagattatgtactttgatgtgatatatgaagataggaatttcagtgtcaaacacaaaagagccataaggaataaagttcttttgagcgccatgtaatgctgtctaattacgagtggtatccagattttcactggaagatacagtatgtaagtagctatgaaagcaattttaaggcaaaattttacttacactgcaaatatatttcccataaaacaaattaaagtcaagttttaaaaatttctttaatttttgatttttaaaga

SEQ ID NO: 287 - DNA, 343 bp, Homo sapiens
  SITE (323): n equals a,t,g, or c
  SITE (329): n equals a,t,g, or c
gttggacaggatggtcttgatctcctgacctcgtgatccacccgtgagccaccgcgcctggcctgaaatattttatttttgttcatctttgttgtgcttataatactcctgttttctgtttattcccctgacttgaaccagatgttaggggagtatttgaagctcctcgtkccctctcttcatcaatatctkctgtctagaaactaaccaagcaccctatctggctccagacctctcagtgatctgtgggaggccaactcgcaggatttcagcagagtttgcactttctaggcctaaaagataaatccttccatgtgtaagtncagatnaaaggcaacatatt

SEQ ID NO: 288 - DNA, 663 bp, Homo sapiens
atttttgtaatcctaaaattgtttccattttagttaaaatatggcagtcagttcccggtttctgtttttgcatatttgaatattcataactttggcttcgcatttgcattacatcttttttagaaaaatgtaaatgttgcaaaaaaaccgaagctgtagttttagaaaatctcagacactgaatttgtatgcatttctaattctkgggtgtattcatarggargactctcaacaatgtcctgttatagtggggaaatatgagagtgaaaatatttaatggcaacaatatccttttttaaaggcacctaaatagagcattagacatttatcaatatatagatagtsckttgccacaactttcacaattaattagctgttgctcttttgcattatttaaatacttaagtgcttggagtcataaaaaatgagctaatctacataaggcatgcttctctagaaatccctgcagccttgaaaataacagcttgtcaaccagagattttgtgtaagaactttttctttagaaaataaatggtgaacatgcttcctaaaaacattatttgtgatggatagatggtgttttatgaaaccccagtgtattttaggtaatttgtggtgacttttaaatggtactgctgtatccatatcagtggatctgctttt

SEQ ID NO: 289 - DNA, 511 bp, Homo sapiens
  SITE (86): n equals a,t,g, or c
  SITE (506): n equals a,t,g, or c
  SITE (507): n equals a,t,g, or c
  SITE (508): n equals a,t,g, or c
  SITE (511): n equals a,t,g, or c
atttctagtccagccgcatttcagcagtgccttctggggtgtccccccacaccctgctttggccccagaggcgagggaccagtggnggtgccagggaggccccaggaccctgtggtcccctggctctgcctccccaccctggggtgggggctcccggccacctgtcttgctcctatggagtcacataagccaacgccagagcccctccacctcaggccccagcccctgcctctccattatttatttgctctgctctcaggaagcgacgtgacccctgccccagctggaacctggcagaggccttaggaccccgttccaagtgcactgcccgccaagccccagcctcagcctgcgcctgagctgatgcgccaccatttttggcagcgtggcagctttgcaagggctgggccctcggcgtgggccatgccttctgtgtgttctgtagtgtctgggatttgccggtgctcaataaatgtttattcattgacggtgaaaaaaaaaaaaannnggn

SEQ ID NO: 290 - DNA, 287 bp, Homo sapiens
  SITE (279): n equals a,t,g, or c
cagaaattggtaacatgatcaccagtcgttgtgaagggggcgttgctgtgctatgaaatataaagcataacagagcacaaggaacattttgaaaatgcaggacctgaccttttgcaaagcaaacatagatttggtgataagaccctctgattctgtgattttccatgtatttggtagataaatgactaacgaggctgggcgcagtggcctcatgcctataatccccagcacttttggaaggctgaggcagaaggatcactttgagcccaggattttgangttgtagt

SEQ ID NO: 291 - DNA, 367 bp, Homo sapiens
gggcacgagtgcctctgacaccctgctggcgctggtgatttccggcctgatgcccttcgacaaactcgccaattctgaaacgctgatttccgacgccctgacctggatccccgcactcggcagcaccgctgggatctttgttgccatcacggcgatgatcgtcattcttggcttgattttcacacaggagatggtgttgtataattctgttggaactttcttttcagcacaattaagaattatartcaagtaaaatgttttccatttaatccaacatatgttaatttctttttgaattttaataaagttccttatttttctcaaaattgactgctgaatatctgacagcataaatcaattgtattct

SEQ ID NO: 292 - DNA, 408 bp, Homo sapiens
  SITE (325): n equals a,t,g, or c
  SITE (334): n equals a,t,g, or c
ttaataatatcagcttaattttartgacaactaratatgctgaagtgaggatttagtattttttaaaaaagcaaaacaaggttcagtagtcctcagcaattctccaagtttctctctttgcctaaaatggtcatagatcttgatttctctgaatcgtgatgaccacacccagtcatcttcacagcataattgcaggtggcagtaaagagagtgtgctgggtaaggagcagttgctgggtcattccttgggccccgacctgcccggggagtagccckgggggagagagggcagtgttgcctatcccagaggtcccagcagtcacantgctctgcnggccgggctctctttatagccagagaaatcaccttaatgcagtctctttagttgtctgctgaagctgtagttat

SEQ ID NO: 293 - DNA, 570 bp, Homo sapiens
  SITE (407): n equals a,t,g, or c
tttttatttacaatggaaaatgttataattctggtccttttttaagtttgaacagaagggttgatcaaaatgtgttttgtctgttttaggcttgatgattcacgcttctctttaaactgccttaaagtaataaatactatggcattctgtttaatacacgaaaggtttccacttgatatacattgtgttaaaacagaagatagccatattcacatctgtttctgaaaccagactttgttaattaacagttttaaaatattaattagttttgacatcttgtaaattttaggtcaaaaatacagtccagaacttcctcaaagtgctaaccttaagtaacataacagtgtttgcctgtttgcttgcctggtaaattttgctttttatactgacagacattactaatgttnagttgatttatcaacagtatttttaaaactcaatttgtctgtgaaaaatgagatgattagaggaacagaaagaaagccacaggtaagaattctcatttgctaaattacaatgattggtgcaaattatgcctatgacattggctttatgcatcattttttctta

SEQ ID NO: 294 - DNA, 454 bp, Homo sapiens
  SITE (1): n equals a,t,g, or c
  SITE (6): n equals a,t,g, or c
ncttgngtcatcaccccagtgagaccatccaggcacacagctcccaggcttgggaggccgcctccagtccaccaggaccctcagggagctgtgacttcattgaagctgggtctaaaggcttccttcaaggctcagcaaactgggttttcaaagatttttgatccctgaagctaatttacacgttatgtggggccatggcaaagacttggccctgaagtggacagaaagaggctgtgctgagtgatgaatgagactaaacagtgttctcatgcttggtgattttgatgagaacatactacataagagttaagagcattataattccctttatcaccatataaacatgtcacttatccggaaagcatacaatttatttgtacatgagaatgtaaatttaaaaattttctgaaaactagattaaatcttgagaagcaattttcaagtaaaaaaaaaa

SEQ ID NO: 295 - DNA, 566 bp, Homo sapiens
gggaattaaaatcccagtgagcattttaaaaaacccagtaaaagcaccaagaatttccatttacttaatagatgattctgtcycaggaaagagagacgtgtaaactatgtttttactaagtttaaattaaaacgatggaaccacacaacactcccttcaaggaagctatttttaaaatagctcttggtaacacctttcagagcattgctgcagctttgaaaggtgaaggagtataccttgaaagctttgtttgtgtctgcgggcatggcatggctgctcccgtcatctgctcctgcatcattcgtgattggtcagcggcattatcttggcccagaatcagagagtaaatgctccgaagcccaaatacattgaggaagtaccaggatgcagaactcacccaggatgcatctaatgtgagtagctcgattccttgctgtaacataggcttaaaacggagggtcagtgggaaatgggaccttggttgtgacaaagcctgagaatgtcatgttgatccatccaccataagaatcatagggaggactttgttacattccctttcatcatgt

SEQ ID NO: 296 - DNA, 671 bp, Homo sapiens
  SITE (29): n equals a,t,g, or c
  SITE (52): n equals a,t,g, or c
  SITE (172): n equals a,t,g, or c
tgtcaagaaggatttttacaacacttaangtcaatgttttgttttcttatanttaaaaagtaatttacattttttgtagcttaaaatattttattgttgattgttagtcttggtgtatgatttcatgtgtaagttttttaattagatgcacttctgtgaaatatcaaaaganatgatttttttgattttacactggaggcatgcccatttggcagcagatgcatcaaatttgcttttgaaaggtgcttttcattggacagaaccataagacactattttgataacattttgagtacggagagagaatacagagcatttttattatagtgctagagggtttggaaggtcatctatttttctctgaggaaaaattgagctgtacatttatcagttcagagtaaatgacagaattgcaagagattatgctaatatgtacataatttgtgtacataattattaaaccatgttaacaatgcaagcttccgttaaacattgaattttaacyattatttgcataccawttcctctgtttaaagrctactgrttctgtatttgggaccactgcacagrtgcattctgctgttaagtgggggctgttatagttagrtactgaagcagaaaaaaaagacttgactttttttttttaagtgtacatgctacttatgctgagc

SEQ ID NO: 297 - DNA, 388 bp, Homo sapiens
ggcacgagcgctgctgggcaagcacgagctggtccccgtgctgggctcgcgctggctcatggtcaacgtggcgcacgatgtgctggcggccgcgctctacggcgccgccaccggcatcatgagcgaccagatgcagcgccacagctactgcaacctcaaggattacccgctcccctgcgcctaccacgccttcctggcggccgccgtctgcggcggcgttctgccacggcctctacctgctttcggcgctctatggctgcgggcgtcgctgccagggcaagcaggaggtggcgtgaggcgcccgcgcccgccgcgccccgatcgcgsgggcgaatccccggagaccagcctccttaatcccttcccccgccgccgccccgcgcggtgc

SEQ ID NO: 298 - DNA, 177 bp, Homo sapiens
  SITE (177): n equals a,t,g, or c
ggcacgagcggcacgagggagatcgagaccatcctggctaacacagtgaaacgctgtctctactaaaaatacaaaaaattagccgggcgtggtggcgggcgcctgtagtcccagctacgcaggaggctgaggcaggagaatggcgtgaaccccagggggcggagctgcagtgagccn

SEQ ID NO: 299 - DNA, 604 bp, Homo sapiens
  SITE (526): n equals a,t,g, or c
  SITE (553): n equals a,t,g, or c
  SITE (560): n equals a,t,g, or c
  SITE (567): n equals a,t,g, or c
  SITE (588): n equals a,t,g, or c
tcgagattctattaatactactgataagggaggggaaaaccctccttccaatcagtgtttctttctacgtagcaccatattattcttcagtgatgtatctgggtctttgtcggctcaatttttttacaatttcctccattccttcctcaatccattgtagtcttttttttttcctctgtcattgatttaaattattagaatgttgttgatgatgtcctaatattaaacgcaatggaaaatttccaattcctatattactttgactcctctgatacttgacacactatgagacattctcccgtgaattctcactttctttggccgatgtgacatccaacctttggtgccccatccacctgaaagatcactccatctttttctttactgacagttctctgtcatccttctatgatgtggcattcttcaaagattcatcttcaggtcttkggaaatgttacgcactgtcatccttatcctgggtctaaccattatctttcagcttatatatccagtctaaatcagttcnggaggctcgtggactcatttcaacggnggtgctnatttttnttttttttttttgggggggcnaggctggagggggttc

SEQ ID NO: 300 - DNA, 309 bp, Homo sapiens
  SITE (156): n equals a,t,g, or c
  SITE (246): n equals a,t,g, or c
ggcacgagcttggactaatgaggggaaattatagagataattttggctaataaagtgctatggatagtattgctacataatgaatgaatcacttgaataactcagaggattcaaacaataccattttcttatcttcatagttcctgtggctcaggnattcaggaaaggcttggctggtcagttctgtttcagggtctcatgcagttgtaggcagatggtggctggaactgaaacagcagagggctnggcagctggagagtgaattggcatctcctcatttactctcagggcttatttcacttaggctca

SEQ ID NO: 301 - DNA, 446 bp, Homo sapiens
ggcagagcaagatggtgagaccttgtctccacaaaaataaaaacaattaaaaaattggccaggcatagtggtccatgcctgtagtcccagctgctcaggagactgrggtgggaagataactggagtccaggaatttgwggctgcagtgagctatgrtcacaccactgcactccagcctgggtggcagagtgaggctctgtctccaacaacaacaacaacaacaaacagtaaaattagacttaaataggtaaaataataaaaataataaaaattcatttgaactatacctaacaacctaaatcgaatcacacctcaggaacatcaaacatttaaatgtaaaaaagaaaactcaaaccataccacaggaaaccattagcaaatattttatagtcatggaataaggagggcattcgtaagaatgaaacaaaatccacaaacaataagca

SEQ ID NO: 302 - DNA, 362 bp, Homo sapiens
  SITE (273): n equals a,t,g, or c
  SITE (348): n equals a,t,g, or c
ccctgtttcattctgtaaaatccagggatgcaggtttcatgtgtagtcttgttttgtgttagttgtaggtctgtgctttttggcacatgtcgagttcttcctaatcttgttctactagggattaaaaaattaaaatttactcaaaatccagagaagattgcatgaaacagaaactgcatatccaagaattgtgctattttttgttcacttcgaagctgacccatttcagtctaaattgttcgtgacctaatgtaagctttaagacttcctggntctgaaacatcaaaaagagagaaagtgttgatgcggtctttttacttcatggtttcttagccctaaactatccgnccgtgtaccctttt

SEQ ID NO: 303 - DNA, 388 bp, Homo sapiens
  SITE (365): n equals a,t,g, or c
aatcaatatacgtaatacccctagtattcacacttcacctgctatgatgatattaccattctcctttggagtyttctaacttatttgtgtagcatttagggcaaaataccaggcrtatgggtgatggcgtgtagtggagttggtgagagggagaccttgagttgtagaamgggtgggcagaacctggtttctgtcctacawcccagatgttgcccatacatatcctgtttgtttctgaccaccctgctttgctgtragggttcccagcccctctgcctttacctgtcctcattctgccccactgtccatgcccagcatgaatctccacttcttccgggacggaaaagttttttcccccagtttgntttaagcccaaaaccaattttcc

SEQ ID NO: 304 - DNA, 429 bp, Homo sapiens
cagaatttgttatttctccaagaccaaaagaggaaccatcaaacctatctatacatgtaatggatggagaattagatgacttttcactggaggaggccttgcttttagaagaaactgtccagaaagaacagatggaaactaaggaattgcaaccattgacttttaacagaaatgccgatcgaagtatagagagattttcacataatcctaatactacgaataacttttctttgacttgcaaaaatggaaacaataattggagtgaaaaaaatgtatctgaacaaatgactaatgargacaaatcatttggttgtccatctgttagagaccaaaacaggagtatttttcagttcattgtaatgtacccttagcccatgattttmcaaataaagaaaagaacttagagacagataataaaaaaaaaaaaaa

SEQ ID NO: 305 - DNA, 164 bp, Homo sapiens
aggtaatttgatcacttataattggaattttttgcaagaagacaccattggtgatagtgacaggacttttgttagcaggcgcccagttgtttctcttagtgtgatgttagacatttagcctaaatccactatttcattcggaatgtgccaaatacttcggaatt

SEQ ID NO: 306 - DNA, 190 bp, Homo sapiens
ggcacagcggcacgagaatgtaagttcatttaaggtaggattcttttaaaaaatataattaatttatttatttattttgagatggagtctcgctctgtcacccaggctggagtscagtggagcgatctcggctcactgcaacctckggtcccctgggtttcaagctattatcctgaaagttaaggttctt

SEQ ID NO: 307 - DNA, 226 bp, Homo sapiens
  SITE (195): n equals a,t,g, or c
gcaccagaaaagcagtatggtactgggaaaaagagatctaaaggcagaacactagggcttcactctcagcactgttaactgagtgacttgactaagtcactgaaattcactgaaactgcagtttccccttctgtcaaagggggataacaatatcagcttcacagggtgctgtgaaggaagcaaatgagaaaatgnaagtgagcatccttttaaattataaaacaga

SEQ ID NO: 308 - DNA, 217 bp, Homo sapiens
  SITE (194): n equals a,t,g, or c
gcggacgggtctgtgtacgcgtggggtaatttaaacatttaagtacatagtactgtgasgtttattatgaaaaacsccagttctctttctcacagctgattactgctccctagcaaaagcccctttcatttcttttctgtgcttgtgggattcgattccatgcttgwatgcatacactactgtagctgtttttncatttagacctccctatgattcc

SEQ ID NO: 309 - DNA, 363 bp, Homo sapiens
  SITE (311): n equals a,t,g, or c
  SITE (324): n equals a,t,g, or c
  SITE (325): n equals a,t,g, or c
gaagcaacaagcatgtccttgtctataagtacagggaaggatagaacaaactttcattgatgcaaacatttaaatagtcatgttacttctgtatccaatgtcctaacattttagggttacttttgtttttttatttgcttacataagcttagcatgaagaatatttttaaacatctcgttttgtctccagcattttttctattaagaggtaaaatgtagtccttgttggattcttgacaatctagtttgttttatctcaggtctcatgatctggtgcctaccctctccaggaaggaaacggcaccatgtcngttgttgttacannccactttaagtttccagttggtttggtcccgatgtcca

SEQ ID NO: 310 - DNA, 370 bp, Homo sapiens
  SITE (365): n equals a,t,g, or c
ggtttttttttctgacttcaaagtcttaagccaccaatgatctgttttttcttatcttccatcttcatcctttttttggtcttttctcaagcggttggcaattcgtggtattaattgatagtatgtgtctgagtgttggttctttatgatgtaatttcttcagaagcggtagttttgaggtatctgtctttaattgtgggatcctgtaggtgcagacagtatggttctggtaatttaaggcacctcagagcatcaccttttgctgatcygcaggacagaactatgcttggattcttaatgtgtagaaatcaaatgtgccttkaataatgtgaaaaggatttycaagggcatcggaacggctcagnaaata

SEQ ID NO: 311 - DNA, 548 bp, Homo sapiens
  SITE (16): n equals a,t,g, or c
  SITE (20): n equals a,t,g, or c
  SITE (26): n equals a,t,g, or c
  SITE (28): n equals a,t,g, or c
  SITE (53): n equals a,t,g, or c
gaggcggagtttccgnctcnctgtcngntctattgcattgcccgaactcccgnggtcgacccacgcgtccggcttcgagctggtggcgctgatggcggattccgtgctctccgacagccccggccccacctgggcagagtggtgacgctcgtgaccttcgcagggacgctgctggagagagggccgctggtgaccgcccggtggaagaagtggggcttccagccgcggctaaaggagcaggagggcgacgtcgccsgggactgccagcgcctggtggccttgctgagctcgcggctcatggggcagcaccggcctggctgcargctcagggcggctgggatggcttttgtcacttcttcaggaccccctttccactggctttttggagaaaacagctggtccaggcttttctgtcatgcttgttaacaacagccttcatttatctctggacacgattattatgagttttaaaacttttaacccgcttctacctgcccaactgtgaccaactaaatgacagatgtgtgagaacaagaactgagggaaag

SEQ ID NO: 312 - DNA, 379 bp, Homo sapiens
  SITE (365): n equals a,t,g, or c
  SITE (372): n equals a,t,g, or c
ggcgcaggccgcgggacccgagcccggggaagcgagagagcggaggcgccgaggatccgattcactccctggggagacctatgggccgaagccgtgtaaatgcgttttaagaggcctcggctccgcaactgccactcctcctcggggtgttgcacaagtttcgaggtcaccggcgaccccccctagcagcggcctggctctggcccccgcgaaggaggacggagtttgtgtgttgcatactttctaaggcggcggctgcagcagcggctccatccagcccgtcagctcctcctgcaaggcatggctggctaacctgagtgaatcggactttgtgatggtggaggagggtttcagtaacccgaganctgctgnaagggaa

SEQ ID NO: 313 - DNA, 631 bp, Homo sapiens
  SITE (94): n equals a,t,g, or c
  SITE (534): n equals a,t,g, or c
  SITE (595): n equals a,t,g, or c
gattggcactgcagcagcacctggcagacattaatgtggatggaccagaaaatggatatggccattggattgctagtacctcaggctcaaggancagtatcaattctgttgatggtgaatctcctaatggctcaagtgatagaggaatgaaatcactagtaaataaaatgactgtggctttgaagacaaaatccgttaatgtcagggaaaaagttatcagttttatagagaatacatcaactcctgtggatcggcatgtgagcagcagtgacagagtgggcaagccttaccgtggcgtaaagcctgttttcagcattggggatgaagaagaatacgacacagatgaaattgacagttcttcaatgtcagatgatgatagaaaagaggttgtaaacattcagacttggataaacaaaccagatgtcaaacatcattttccttgtaaagaagtaaaagaaagtggacacatgtttcccagtcatctgttggttactgcaacacatatgtactgtttaagggagattgtttcacggnaaggattgcttatatacagtctcgacaagcgctgtattctgtagttaaaattacattccanaaaaaaacatcctgaactcattaccttcaagtatgg

SEQ ID NO: 314 - DNA, 515 bp, Homo sapiens
  SITE (378): n equals a,t,g, or c
  SITE (498): n equals a,t,g, or c
  SITE (504): n equals a,t,g, or c
  SITE (514): n equals a,t,g, or c
gccagagcccagaagctgggactacagttaggagggctgctggcagggctgtgccaagaaggacatggrcactctggcgatgtccctgaagcwagacgggagaagacgctggctttaccaccagtgtctcctgttggccatgttgaccaggaaccaggagtkaggggcggggggcctctatgagacagtgcagggcactgatgagtgtggctgagctgtcactcacctggccagcccttgaggacagctggggctcctcacggcaggctgtgttgagaaggcatgccagctgcctggtgttttgtggacctagtaacacgtggccttcatttatcccaggagctggatggcccattctagactggctttctgataggntttaaggtctttggacatgtataagacagaaccccaagcccattcagcctggtgagggtggggcccgtgacggcccacgcctggggggggccttaagacatgagcaagaaaggggcctgngctggngtgaaaaggng

SEQ ID NO: 315 - DNA, 348 bp, Homo sapiens
ctttttttaacttgggaaaatacgttctaagcatactttttggagtaaaacctgtcgaaagttggagactgcctgtacccaggttgatagtcaattgtttttaatgctagtaaatcttaacactaatacaagtaaaaatatttgtgtggaaaactaatcctttctttattcgtgcatttttaactttataggtattaaaactttctttgtatgatcataattttttgatctttttgttttgcaagaaagtgaatggtagcctttcatttgtatgtttgattttcttaaaaatttcatatttattatgktattttacaaatgaaaaattatttgkgagaaaaaaaaaaa

SEQ ID NO: 316 - DNA, 405 bp, Homo sapiens
gatgacccttgatatttgcacagggatatttctaagaaacgcagaggccagcgttcctggctctcagccaacacagtagaaaaggctgctgtggttttttaaaggcagttgtccactagtgtcctaggccactgcagagggcagactgctggtctccacagatacctgctgttctcagctccagcttcaaacctcgagtctcgagagggccacggggtggtttttatgaccggaatcccgcttcctccctcacgtctgatgtcctgaaggtgcagtcccacctgtacagsccctccccgcccagaactgtggaatgggccttgctccaggcatggctgkkgcagggagtgaggggacaatttctgagtgaaagagaaagaatggggggttcggttggtgaaggtg

SEQ ID NO: 317 - DNA, 711 bp, Homo sapiens
  SITE (625): n equals a,t,g, or c
  SITE (640): n equals a,t,g, or c
  SITE (641): n equals a,t,g, or c
  SITE (649): n equals a,t,g, or c
  SITE (682): n equals a,t,g, or c
aacagcaaagcataaccttgaatctatactcaaattttgcaatgaggcagtggggtaaggttaaatcctctaaccatctttgaatcattggaaagaataaagaatgaaacaaattcaaggttaattggatctgattttgtgaagctgcataaagcaagattactctataatacaaaaatccaaccaactcaattattgagcacgtacaatgttctagatttctttcccttcctctttgaagagaatatttgtattccaaatactctttgagtatttacaaaaaagattatgtttaatctttacatttgargccaaagtaatttccmcctagaaatgatgctatcagtcctggcatggtggctcacccctataatcccagcactttgggaggctaaggcaggagaattgcttgagcccagcagtttgagaccagcctgggcaacatagagagctcctgtctttaaaaaaaatttttttaattagttggtcttgatagtgcatgcctgtagtcccaactacttgaaaggctgaggtggagagatcatttgagctcaggaggttgaggctgcagtgagctatgattgcgccactgcactcctgcctgagcgactgagcaagatcttgnctctgaagaaaaaannagaaatanaaatgctgctatcaaaatcaagcccaaccagangtagaagagccaagaagcctgggttctat

SEQ ID NO: 318 - DNA, 452 bp, Homo sapiens
  SITE (2): n equals a,t,g, or c
  SITE (12): n equals a,t,g, or c
ancctcccatcntgccccagggagagcttctgggtgagtcttcgctggcactcctgccccgggcttcctgctcttcagccttggcctgctgcaccttggccaactgcaccacccggcacatcatagccccactcaggtcagagctgtgtctcagccgacgtggggttccgaggttctcaccaagatccagactcaacgcttgtgggtttgttgtctcagtctggcggtggaggttctcccgaggcctcagcgcctctgttctcggaagtctctttacatgttagtggaaccctctgttcctgttgaatcattcttcgtgttaaatgtttctatctcttgactgatacatgatagtcatcatgtatgtattctgcggctgcttttgattttttctctttatccctggttttctgtaatttgataagctttagggtatgtgtgtgtgtttcttt

SEQ ID NO: 319 - DNA, 637 bp, Homo sapiens
  SITE (493): n equals a,t,g, or c
  SITE (612): n equals a,t,g, or c
  SITE (636): n equals a,t,g, or c
ggcgagctgccccagaattggtagggtgcccccctttttcacagagaacatacaggcttttaaaaaaaatctgttagtaaatggaaatgttttctaacatataaaaacctacagaagaagaaaataattttctggatcaaattaraagtctgtattatattgatgtctccagattcaaatatattagaaagcagccgtggagacaaccatcttcattttgggmgaaataactaaagcccgcctcaagcattagaactacagacaaaccctgatgcgacctctccagattgtcccaagtcgattgatttcccagctatattgtggcctgaagcctccagcgtccacacgaaaccagatttgcctgaaaatggctcggccaagttcaagtatggcagattttcgaaagttttttgcaaaagcaaagcacatagtcatcatctcaggarctggtgttagtgcagaaagtggtgttccgaccttcagaggagctggnaggttattggagaaaatggcaagccmagacctgggacccctggcctttgccacaacccgtcccgggtgtgggaattctccataccggcgggaggtctggggarcaaggarccaacgccnggcaccgggccatagccgagtgtna

SEQ ID NO: 320 - DNA, 366 bp, Homo sapiens
  SITE (5): n equals a,t,g, or c
  SITE (15): n equals a,t,g, or c
  SITE (346): n equals a,t,g, or c
cccantggttgtaantttgtagccagtgtgggacacaggagattggcagaccaacacagctagcctctctctagccctccctccacctctaagtccactaacaatcccatgtttgttcagtttgttgacatgtggcatgttcatttgttcacaacttaatcacgggggacatttcagaaaaatgtgtactaagttaaaaccatgtttagtctcctacaacttgtacattttcattttctcttatcagtagattgtccttgttgacatagctcatgcatgaggacacatagcagtacacacacattgaatraattgttagtcatgccaaaaaaaaaaaaaaaaaatntctgcggtccgcaagggaat

SEQ ID NO: 321 - DNA, 338 bp, Homo sapiens
  SITE (322): n equals a,t,g, or c
gcccacgcgtccgagctcctgaaggaatttctgcacctggacttgacagcgcccatccctggcgcctccccggaggagacgcggcagctgctgctggaggggagcctgaggatgaaggaggggaaggacagcaagatggatgtgtactgcttcctcttcacggatctgctgttggtgaccaaagcagtgaagaagcagagaggaccagggtcatcaggccacccctgctcgtggacaagattgtgtgccgggagctacgggaccctgggtcttcctccttatctacctgaatgagtttcacagtgctgtaggggcctacacngttccaggccagtgca

SEQ ID NO: 322 - DNA, 499 bp, Homo sapiens
ggaggcgcacccgggcggccagctgggctcggagtgcagcggggttaggatggacgaggacgtgttgcaccctgaagagcctcatcatcggtgagagtggggtgggcaagtccagcctgctcttgaggttcacagatgatacctttgatccagaacttgcagcaacaatagacaatgcaggaatcacatgaacctgtccatccacagataaagtggtaaagaaactgccgtattagatacatgatggtatactcttcagccataaagcttcgggaaaccctgtcatccgcaaccacgtggagaaacctgtccatccacagatgaagggrtcaggaagctctggtatatatactggaagggaaatgctttttggctaccaaaataatgaawttttgttgtttggrgcaacacagrtgaacctgtccwtccacaaatgaaacatcaaggaaactctagtwtgtacacaggcaaaacatttcagctattcaaaatcatggac

SEQ ID NO: 323 - DNA, 400 bp, Homo sapiens
ttctgagcttytattattttgggatattgtcatctttctaataggtagaattttagtgaaagtaatcaggaccttttcaagatagacttctgcataatytcatcctgtggctttggacgtactatccaaagaggctgtacatccagcaagtcactagttagtgaataggaattcttggcgtgtaatgccatttcttgtagctgaaggaagacatgtgataagtgattaacctgttctgtgcttcagttgactcttataaggacagtcattccctttaagcatcttaagacaaaaatatttatctgttgaattggaatttactaacagagggaatttgaattggaatttacttccagctgcactcatgcaagaatttgtgatgtatactaaaaaatacaaa

SEQ ID NO: 324 - DNA, 642 bp, Homo sapiens
  SITE (541): n equals a,t,g, or c
  SITE (609): n equals a,t,g, or c
  SITE (614): n equals a,t,g, or c
  SITE (617): n equals a,t,g, or c
ctgcatgcttcctccagccagcagaggaggatcgccctgcatggaaaccctcctgcacttcacatctctccaggaagtcctcagtccctccaaggaactcaccttcactaggtcaagctcatcagataatctgtctatcttaaattkgaccgatttgggatctcgattacatctgttaacttgtttttgccataaattgtaacacaatcrcaggagtgacatctcctcagtrgctttgtctacactcaggargaagtgattatataagagcaaagatcactgrgggtcatcttaggattctgtctaccataatattataaagacacagtaattaaaagagtataacagatttctgcttctgtctgttagaataaatcatatcagactaaccctgcctccataaacaamcgtaaaattgttttcagcagtgtacracaggcagtmcarsagaaaacttaagggggargccccatgrtttcctagttstttggggagawtttctcmgcagctgcatagtgggctagagtccactccagggcangggcagcccactgagctgagaaggcagagatcagagttcaagaccattgaagcaactgcaatctgcanggcanggnaccaatgaggagacagcttgttcaa

SEQ ID NO: 325 - DNA, 422 bp, Homo sapiens
  SITE (405): n equals a,t,g, or c
gctggggcccttgggtgccagccctgtcttgacggtggctcctgctgagagagaggccctgtattaatgtgagccctgggctgcctcccccttgagggtccttgtcatcttccgggcctccttcagcagaccggacacaggggcagtgcaggtgaggggcttgggggagctccttggcagctccaggggatgcttgtgggcgctggcttatcttgtctcaggctaccttgctcaggtgacgacagggtgggtggatttgggaaaggttggctcagatagtggtccctgcttrtcccccagggcctgcctargctmcaactgacagtaatcccaagagctcccctttcagggattgacggagtgatgtcacctgtgtggactcagctgccacctgggattgtggtngcggcgggtctgtcttg

SEQ ID NO: 326 - DNA, 539 bp, Homo sapiens
  SITE (306): n equals a,t,g, or c
  SITE (314): n equals a,t,g, or c
  SITE (342): n equals a,t,g, or c
  SITE (401): n equals a,t,g, or c
  SITE (408): n equals a,t,g, or c
gccatatcctctcccacctcctgctctttcctccagttgtgtgcctcgtaacstcttcctccctccaaggctaaatcaaaccctacctccttatacaggaggaagtaatttctgggttgatgtatgcatccggcagattcatgctgagccaacaggttaggkgctggagaaacagtgatgagcttaaccaggccctgccagcctgcccaccccgagtctggtgagggtagcaaaaaacataaagtggaattgataaataatataatctatccatatccatatttttattttttattttttggggangaatcttngctctgtcacccaggctggagtgcagtngtgtgatctcggctcactgcagctctgcccccgacccccggttcgagtgattctcctgnctcgggnctcctgagtagctgggaatgcaggtgcgtgccacgatggccgggtaatttttgtggttttagtagagatggggtttcaccacggtgggcaaggtgggtctcgaactcctgacctcgtgaattgcccggctt

SEQ ID NO: 327 - DNA, 178 bp, Homo sapiens
  SITE (168): n equals a,t,g, or c
gcccacgcgtccgggaccggccgggttccgctcctgctggagcccggtgcgtggaattccacgcgagtgccggggagttctggggagccgggcttctcttttggcccccagcgtgttgaccgagcccgcttcgcacagcccttcctagggtgtggagagcgggccccnccttgaaagg

SEQ ID NO: 328 - DNA, 449 bp, Homo sapiens
gactagttctagatcgcgagctgccgcccttttttttttttttktwtaaaaataatactccatgcattgkgggtgggcttcccctccgcaggccccarcccaaggcagctgggcctagctgtcctcccccctcctytgattcatggaatgaaacttgttcatgagttcttccagctccgacccactttgctgcttytccaggaaggccttctgcatggkgagctggctgtacacgcggacgccctcctcgccgcacactttcttcagctcctccttgttgmsgsagaagagctgcggcccggtcaggatgcccaggttctccacgatccgcgggctgaaggcttggcttccagccaggcgcggamctcgtccggacccgactcgtargtgarcggctggctcamgggctggctgcgctccacgcggaagtgcctctgtggctgcgcctt

SEQ ID NO: 329 - DNA, 330 bp, Homo sapiens
ggtaaatattcccaccatggtcaatatcaggctacccacgtgaagtcactgattgagttgggttgctcaagctgaggccagccgctgcagcacactgctagccctgaccccaacctcagacacctctgacaatccttggtcccctctctgtaccttcctgcccaccaccaccaggtatcccggtgccggaaatgccggaagcgctacgagccagtgccagctgacaagatgtggggcctggctgagttccactgcccgaagtgtcggcacaacttccggtgaggrcgctgaaccccagcaccccctcagccctgccctaccccagccctg

SEQ ID NO: 330 - DNA, 1149 bp, Homo sapiens
ttgcaaaaagctatttaggtgacactatagaaggtacgcctgcaggtaccggtccggaattcccgggtcgacccacgcgtccggcccgagccgccagcagggagcttcggagagagaaagcccaggaacatcccagagagagctgggcccatcctcagccctacccagccccgcagcccctagccctccgcccagaaacccagccctgtccggcgtgccgctcttctcctccaggccggctgctgctgcggccagcgttgccggggcatcccttcctccttcccatcatggcagtgtaccgcctgtgtgtgaccactggtccctacctgagggccggcacactggacaacatctctgtcacactggtgggcacgtgtggtgaaagccccaagcagcggctagatcgaatgggcagggacttcgcccctggatcggtacagaagtacaaggtgcgttgcacagcggagctgggtgagctcttgctgctgcgtgtacacaaggagcgctacgctttcttccgcaaggactcttggtactgtagccgcatctgtgtcaccgaaccggatggtagtgtatcccacttcccctgctatcagtggattgaaggctactgcaccgtggagctgaggccaggaacagcaagaactatttgtcaggactctcttccctyctyctggatcacaggacacgggagctycgggcccgacaagaatgctaccgctggaagatctatgccctggcttcccctgcatggtagacgtcaacagytttmaggagatggagtcagacaagaaatttgccttgacaaagacgacaacttgtgtagaccagggtgacagcagtgggaatcggtacctgcccggcttccccatgaaaattgacatcccatccctgatgtacatggagcccaatgttcgatactcagccaccaagacgatctcgctgctcttcaatgccatccctgcgtccttgggaatgaagcttcgagggctgttggatcgcaagggctcctggaagaagctggatgacatgcagaacatcttctggtgccataagaccttcacgacaaagtatgtcacagagcactggtggtgaagatcacttctttgggtaccaagtacctgaatggtggtcaaatcccgtcatgct

SEQ ID NO: 331 - DNA, 539 bp, Homo sapiens
  SITE (481): n equals a,t,g, or c
  SITE (499): n equals a,t,g, or c
ggcttatgctactctgcgccctcctcttcgcccgcctcctgcgcctgcctccccccacccctcgccgcgccgccggaatttcctgcgccgccaggatttcctgcaccgccagccgcctcttcccccagcacaaggtgctctcggggcacatagtctggcacgcgagggccccggcggggctgttagaggctcgtggtcatcctgaccatgtggtccagggcgccccggtcctctgggccccgcatggagcgcggcgtcagcgcggacagctcgcagtccctgagcctctgcaggcagttcttggagccctcgggcttttgcggcctctcggggagcggcggcagctcaagctggtactttttccccaacagctcccggcargggcgctccaggagcctctgcatgaggcggacgtataagtggccactcctctggcgacatcccaaggcgggggccctcgcgtggaaaacgcccctgctanctcaggctccgatgcganccgttcgaacctgcatggcggctttcaaaccgaaagcgtc

SEQ ID NO: 332 - DNA, 416 bp, Homo sapiens
  SITE (397): n equals a,t,g, or c
ggtacaacccacgacgtaccgggaaaggtgtttttccggcgccattacccactcaccaccctccgcttctgtggtatggaccctgagcaacggaagtggcagaagtactgcaaaccctcctggatctttgggtttgtggccaagagccagacagagcctcaggagaacgtatgccacctctttgcggagtatgacatggtccagccagcctcgcaggtcatcggcctggtgactgctctgctgcaggacgcagaaaggatgtaggggagagactgcctgtgcacctaaccaacacctccaggggctcgctaaggagccccctccacccccttgaatgggtgtggcttgtggccatattgacagaccaatctatgggacttagggggattggcatcangtttgacaccccttgaacc

SEQ ID NO: 333 - DNA, 341 bp, Homo sapiens
ccacgcgtccggcatggaaccatctgtgtctatgtcaagctaaactggggttcataccagggtctccaaccatagcccatccccactggggtccttccagctcactcggcttctggatgtacgactcccacaggtggaggaaggcccccagagaagtctgctgaaaattgttattcatgaatggaggttggacttcttcagatacacttcccgagtctgttaacatggtgatgtgacgtttgcccttcatgttactcatagggactattctgttagctaccaattctgctgctttaaataaaaacaccattaaaaaacaaaaaaaaaaaaaaaaaaaaaaa

SEQ ID NO: 334 - DNA, 303 bp, Homo sapiens
  SITE (283): n equals a,t,g, or c
attttgtttgagctgttttggtgacgctgtagagggtacgcctgcaggtccggtccggaattcccgggtcgacccacgcgtccggttctagatcgcgagcggccgccctttttttttttttttttttttttttggtattttaatgaacatttattgtgaactctagacatgagagtggtttagtgtgttgcatatcaagtatcctgagatgataactttttgtagttgtttcttcatgctttcttttttagctgtaaccactgtcagtatgcttgtaggacantaacataggcagttcaagat

SEQ ID NO: 335 - DNA, 673 bp, Homo sapiens
  SITE (580): n equals a,t,g, or c
  SITE (635): n equals a,t,g, or c
  SITE (663): n equals a,t,g, or c
  SITE (667): n equals a,t,g, or c
ctgagacggcagcaggaagggagctttgccaggtttctcgcctgccctgctagaaggaggcccttgatcctttaccaccgtctcctcccctctggacgagcattcaagcctggggtgcctgaaagggcagtcctaccggacacatgtaaagttgtggggagacagaatcccctctacgctttcttcaggtgatgggtacattctgagtacctcttgcccttttcccaggtgacggccctgctcgggaggccctccagtctctgagccagcggttcgggtgcaggagcaggagatggaactggtaaaggcagccctggcagaagcccttcgcctgctgcggctgcagktgcccccttcctccctgyaggctctggcacaccagctcctccgggggacagcagtcttgcagcccccccaggactgccacccacgtgcaccccttccttggtgagccgaggcacccagacggagacagaggtggagctcaagtcatcccctgggaccccctggcctggagcaatggacccccagcccctcaagggccaagcgaaaagcctaacggggacccaatctgaaaganggggcagcagcagcagtggtgtgggttccctgggcccccggggattcttcagccntgcagccccaaagctgttgaacacccgngaanaaaatt

SEQ ID NO: 336 - DNA, 583 bp, Homo sapiens
  SITE (526): n equals a,t,g, or c
  SITE (544): n equals a,t,g, or c
  SITE (552): n equals a,t,g, or c
gatttgttaaagagagagtttaggcacagaaaggaagtcttctcatgctttcagtgctttcagtgacattgaaggctttggtcagttcataagggcaccagtgtgaaattagttcatgataaggacaattgtgagaaacctccagttggtcaaatagccttcggaaacttactgctcattattctttctgatttttcttgggaatattttgagagaaaagtcattattcccttgtatttcagaatcatgttaagaggtagcttaactgctattcagctgcagctcaactgagtgaaaaaggacaactagtaatggtaaactgaaggaaagactagtggaatcttgagaaagaataagagaaaaaagagaaatgttattgttttgatattacmgattaagcyaaccacmgtacckgattcttagcaggtgcacaataattatttagtcaataattaatggagcaaatatttattaacgtaacattgtatgtctgtgctgtctagttgaagaatagtaccaaacgaanaccctgaagggctgggtngttgcgtnggctccacaccttgtaaatccccaagcactt

SEQ ID NO: 337 - DNA, 657 bp, Homo sapiens
  SITE (58): n equals a,t,g, or c
  SITE (73): n equals a,t,g, or c
  SITE (537): n equals a,t,g, or c
  SITE (599): n equals a,t,g, or c
  SITE (619): n equals a,t,g, or c
  SITE (638): n equals a,t,g, or c
ctaaaaataaactgctttgaagaaaactggaaaaggccactgaaggtgttccacttgncaccatcaggtctgnagggaggaagtgtaggatgccttccagattgatgttccatcaagtatacgtggaaagtttcagtataaccgttaggacactgtaaatgctgttccctcaggccctactgcctcctgccaagtctcaggtaagacacagctacctccaggaagcatttttctattcaattctccttttattttagaaaattttggacatacagaaaagtggaaatactataatgaaccgccacatatcattaatcagtttcaacactatcaagtccagtgtttcctttctctgccacttccacctccattactctgaagtaaattccacacatatcacttcattcataattaagttatgtacccctcgaaggyaaactctttccttttatttaccaatttgaaaatgagtctgttcccaagtatcctataaagatgattactgagtttttttaaagtatcattttgaacccattnaaacatatctggatgccagttagcgtcccttgtgggatgttccaaactgtcccatcttttgncaagccagggagcccttttncaagttggcttggagttcnggacaggggccctagtaaa

SEQ ID NO: 338 - DNA, 536 bp, Homo sapiens
  SITE (76): n equals a,t,g, or c
  SITE (534): n equals a,t,g, or c
gcagattcatcaggatgagtgggctgggctagatgatcttcagggacgctctcagtttccaagtgctgctaatatnggtgttcactttcggtagagcagtagaacttctctgtagaacttctctgttgtttttgacttggtcctttggggagtatttactaagcagacagtgtagtacatgctctagctgagggtcacgatgactcagaatccttgtcctccaggtgttgcaataatcggagcagccacttccctcagcctggccgcatccagataagcagagtgattacggaggtgccttaaggaagcagcgggttgagggtgctttggaggcatgaggaacaattggcccctattggaggaagcttctcttttggaaaagaagttgtttgagctatggcttaagagggtagggtaaacttaggtgcatagagggaggttatcccaggcatacaagacaacctgggcccaggctcctgaggaaggaaaaccagtcaggctggcagactggacctggtaggatgaaacgtgccntg

SEQ ID NO: 339 - DNA, 443 bp, Homo sapiens
ggggcacaggtcaggcgctgtgcggccccctctacaccagcttggcccagctgtacagccaccatggctgccacggcccggccatcaccttcatgacgcaggcagtggaagccagtgctattgccggagtccgtgccatcgtggaccacctggtggccctggcctggctgcacgtgcttcatgggcagagcccggtggccctggacatcctgcagtctgtccgggatgcagtggtggccagcgaggaccaggagggcgtgattgccaacatggtggccgtggctctgaagaggacgggccggacgaggcaggcagccgagagctactaccgcgccctgcgggtggctcgggactgggccagcaaaggaaccaggcagtggggctggccaaattcgggggctgttcctgcatgcgggtgccagcaagctggcccaacactaact

SEQ ID NO: 340 - DNA, 381 bp, Homo sapiens
  SITE (275): n equals a,t,g, or c
  SITE (345): n equals a,t,g, or c
  SITE (348): n equals a,t,g, or c
cccacgcgtccgcccacgcgtccgaggacctgcgggcaattgagacccgactgccgtcccccaagcccggcctcagcctggagctccagctacccacatgcaccttacctgggttccgcccggtccctgagtccccacaaaatggctgatggaggaagccccttcctaggtcggagggactttgtctacccttcctcaacccgagaccctagtgcctctaacggagggggcagcccagccaggagggaagagaagaagagaaaggccgccaggtncaagtttgactttcaaggcgcagttccccccaaaggagcttgactctgcagaaaggtgacatttgtttanaanccaacaaaggaaggtgggaccaagaaattggct

SEQ ID NO: 341 - DNA, 689 bp, Homo sapiens
  SITE (12): n equals a,t,g, or c
  SITE (70): n equals a,t,g, or c
  SITE (78): n equals a,t,g, or c
  SITE (580): n equals a,t,g, or c
  SITE (652): n equals a,t,g, or c
  SITE (662): n equals a,t,g, or c
  SITE (689): n equals a,t,g, or c
gagagagagagnaagagagaaatgtacctccctggccttgacattcctttcatcttatacccaccccccncccccccnattattatagattaatcacattagcctgagaattgggacagctgtgtcagatgagcagtgcttctaacactgtaagtcatgggagggaaagaaaggtctgcactgttaggttagaggggaaacgtcaggtcaggcacagctagaaatgagacagaggactgagacagtgtctacctgaggactttgggaagaagcgggatttgaaatgaacttcagaattacatatctagaagagctttatgggaagggataatggggcttttcctaccaataggtaaaaaaaaaaaaatggtccagtcacagtttgcaaacaagggatagggagtgagctgtgagctgcgttggagaatgtagcaaaatagcagggagatgatggagtcctagcagttgaaacaaagcaggtggaccgtggctatttgaaacaaaggaatgaagtggaaaacgagggacagtctccatatagtcaagcctggtgaaataacacctagttttggaggtacgngtaaggcaagcagcaagtggatccaaaaccactgggattctccaggaaatttagtgtaggtattctgtgtanaaccgggaangggtgtaacaaagtcaatttccattcn

SEQ ID NO: 342 - DNA, 573 bp, Homo sapiens
ggccgcctgaagtgcaacactctgtatttccacaaggatcacatggacctgcgaacccatgtgaacgccatcgccctgcaaggctgtgaggtggccccgggctttgggccccgacacccatttgccttcaggatcctgcgcaaccggcaggaggtggccatcttggaggcaagctgttcaraggacatgggtcgctggctcgggctgctgctggtggagatgggctccagagtcactccggaggcgctgcactatgactacgtggatgtggagaccttaaccagcatcgtcagtgctgggcgcaactccttcctatatgcaagatcctgccagaatcagtggcctgagccccgagtctatgatgatgttccttatgaaaagatgcaggacgaggagcccgagcgccccacaggggcccaggtgaagcgtcasgcctcctcctgcagtgagaartcccatcgtgkggacccgcaggtcaaagtcaaacgccacgcctccagtgccaatcaatacaagtatggcaagaaccgagccgaggaggatgcccggaggtacttggtaaaaaaaaaaaaa

SEQ ID NO: 343 - DNA, 345 bp, Homo sapiens
  SITE (279): n equals a,t,g, or c
  SITE (291): n equals a,t,g, or c
  SITE (333): n equals a,t,g, or c
gcccacgcgtccggtaacgggttacaaaatacttaactgaaatccatatccagggagacaaagcaaggagtgggtttacatgagamccagaccagccacagggagagagtgggtaaggggccgggagcctggggctcagcacagagaggcctagtacactgagcctggccccatccccatcccccaggaggatctaaaacaaacacacaagcacactatgaaccgatggtgctgggactcctgcccctcccctgggctcccttcaatcctggcttcaangcccccataggnttaattaaatatgttaaacagatttggttggggggccctggnagattagaaggg

SEQ ID NO: 344 - DNA, 391 bp, Homo sapiens
  SITE (126): n equals a,t,g, or c
  SITE (185): n equals a,t,g, or c
  SITE (316): n equals a,t,g, or c
  SITE (360): n equals a,t,g, or c
ggcggaggagaggagtgcgtggctgggtcggcgggcggcgcccgcttcctccccgcggccgggcacacgtgggccccgggcgccgcctccccgcgccgcccgccgcccgccgggtcccgcgcgtcnccacccacctcgggccgcccccgccgccgagccgcccggggataaagtggcggcgcagncagcccctgtcgccgcgaascgktcgcgcgcaktcgtcccggccctggccgccgcaaacgargatccgctgcgctcggggaacgcgacagcgctcgtggccccggacctgaagaccttcagcatgccagangaaagttccccaggcggaccccgagagcattccctaccaggacntcctcacctggtcaatgcagacggacagtac

SEQ ID NO: 345 - DNA, 463 bp, Homo sapiens
  SITE (417): n equals a,t,g, or c
  SITE (460): n equals a,t,g, or c
gcggacgcgtgggccgcaactgtggctcccgaagctgcttcgggccccagcggtgagggagaagactctcaaccagggtgacttctaggcgtctccckgagctaccggggacactggcgttattcccggaacactgagatagggaatgctcgagaaacagaagcaggagtattttatacagaaatcttgtgaaaccactgcccaaccagagcaatgattgttcaaagagtggtattgaattctcgacctggaaaaaatggtaatccagtggcagagaatttccgaatggaagaagtctatttaccagataatattaatgaaggacaagtacaagttagaactctttatctttctgtgggatccttacatgcgttgtagaatgaatgaagacactggcactgattatataacaccttngcagctaactcaagtcgttgaaggtggaggtattggaattatngaa

SEQ ID NO: 346 - DNA, 147 bp, Homo sapiens
ggctggttctgtataccaggcaaaatatgatgttctcagattttagtacttttgccagtctggcaaatatgagttagcttctctttgtagtcttaatttccattccccttaatcttaactgatattgaatattttatatattttctg

SEQ ID NO: 347 - DNA, 583 bp, Homo sapiens
  SITE (48): n equals a,t,g, or c
  SITE (102): n equals a,t,g, or c
  SITE (527): n equals a,t,g, or c
  SITE (577): n equals a,t,g, or c
gcgcaactgctacacctccagcgtcttcagcaccaacacgcccttcgngtgctcaacaaggtctggttcgagacgtgcatgtacttctgtacccgcggccgnagaaccagcgtgagttggaggaggactcttttgggctggccatggacgaggacggtcgcaagttcgtctacttcaagtccctcgggccctaccacaagtcgcgctcgtcgtcgtggagcaagaagcgcgccgagagcagcgacgaggagaacttgccccgcatgtatgagacgggcaccgagttctgcccctacgccagcttcgtcaagtacctgtcraaacgcaaccctctctgcaaggcgttcttccagcggccccgggaccactgcagcgagggcgatgtgacctggtacgagaacaaagccatcgcaagaacttgctaggcactcggatgcagatgctctccaaggcggccaagctcttccaagacctacaccaaccactgcatcggcgccgtctccatcgccamgstcaacagcatcccntcccaccaccaacgcccccagccgccctcgctggggaacacttacatccnccccaa

SEQ ID NO: 348 - DNA, 313 bp, Homo sapiens
  SITE (209): n equals a,t,g, or c
ctgctgccaatcttctccgcgctatggctgcgttcggccgtcaggaaattaaagagggtgctttactgttgccctgaaattttcaccatgcgccaaggacattaacgacactgtcaggcttctcaaggagaagtgccttttcacggtacagcaagtcaccaagattttgcacagttgcccctctgttcttcgagaggacctgggtcaantggaatacaagtttcagtatgcatacttcaggatgggaattaagcatccagacattgtaaagagtgagtacttgcagtattcactaaccaagattaagcagaga

SEQ ID NO: 349 - DNA, 762 bp, Homo sapiens
gcccacgcgtccgcccacgcgtccgcccacgcgtccgatttttttagtgtcttatactacccacaatgtgggctgtacacctgtcgctctgcctccacccccacaaaccaaaagtaagttctgtggtaacaaggatgggaattatttctaggttgcagtccatgagctgggaaaggaggcagtgctcttgggagaaacagcagaggcctcaagtttcgggctgaagcaacagagtcccaaccagtgggcgtatcccaagatgaagaattttggaatacatacgarggtctgcaagaacagctcagcaggaatactcataaagagactgagcctgtgtatgagargggtaaggagcttcatgataattttcttctcctgggagctgtgataatagtttattcacccaaaatgtcatgggcattttttgaataccctgctcygtggatttgtaaaaccagccttgatagcaactatgatgtccttccaggcagcagtagaaatgccaactgtggatgaaagtgggagtaggcctagagaacagaaatatctaaaccacagaactcttggtaataacagtgtgaactctgttccttagactagtggagaggaaggaaagaaatggagtgggaaggcttggggccacttcatccttgtaaaatacagaaggaattgagatcagatgggctgttagtggcagaatgtgaaaacagttgtgtaccaggaaaaacataataaaagacaaaaaacttcatctcctaccat

SEQ ID NO: 350 - DNA, 494 bp, Homo sapiens
  SITE (18): n equals a,t,g, or c
  SITE (429): n equals a,t,g, or c
  SITE (481): n equals a,t,g, or c
  SITE (492): n equals a,t,g, or c
  SITE (494): n equals a,t,g, or c
ctctctcccccaaccccntcaatccccctttctctcctcatccttttcccctctttctccctgcctctttttggttatgccaggcaatatctaatctgcattttagcaagtcattcctgacaaatggaaaggtgaatgctcttccacagttctccctggcaaggcaatttttcttgttagcatccttctgtacgctccattaccctttttcctttatgtataggttaagaggaaatgatgaggctctgatttatcaatgagaaatcatttacactgtaggacattcaaatcctttagtctcagacttaagatcagtttcactccaggtttctatgctctgtggaaatttcatcactggacatgctttccttttaagaggttgcccttttttgtgttctccttctcttcctctcccataaccaccgaggncgagagagccagccaattatcaggatggaggcaccatttaaggagccgggancccgtttagtnan

SEQ ID NO: 351 - DNA, 574 bp, Homo sapiens
  SITE (536): n equals a,t,g, or c
  SITE (551): n equals a,t,g, or c
  SITE (555): n equals a,t,g, or c
ttttttggagccgccatcctctctctgtccatcgcatccgtcatttcgggcattaatgagaagcttttcttcagtttgaaaaacaccaccaggccataccacagcctgcccagtgaggcggtctttgccaacagcaccgggatgctggtggtggcctttgggctgctggtgctctacatccttctggcttcatcttggaagcgcccagagccggggatcctgaccgacagacagctgctgctacagctgaggcctggatcccggcctttccctgtgacttacgtgtctgtcaccggcaggcagccctacaaatcctggtgacctgctctcccaagaacagagcctgtccccagatgtcccagtagcgatgagtaacagaggtggctgtggacttcctctacttctccttgctggatcagggccttcctgcctcccgctgggcaggtctggccttgctctcttggcaggccccagccctctgaccayttgcagctcaccatgcagctgatgccaaattgtggtgtccatgtgcacancctggggagccatgncacnttcaaagggttccttgctg

SEQ ID NO: 352 - DNA, 517 bp, Homo sapiens
  SITE (59): n equals a,t,g, or c
  SITE (482): n equals a,t,g, or c
  SITE (508): n equals a,t,g, or c
tcgacccacgcgtccgcccacgcgtccgagacagccgcccagcccgctctgcgacgcancagtgaatagtgtggtacctccttgtctcggttcaggtccagacctccccgtcttccggctgccctgaacgtcaggcgacctcaggaccctgtgattggcgcctgcggrcggaccgtgaccgaggaaacccctggagggacttgggcattccttgggctccgtgcctgttcttcgtgctcctttcgggcaaggatctcacattatcagtctttgaccgacacagaatgcctggcatttgataaatgtttgttgaacttgaagagacatatgggacaatgaatctggcaaaggggaggaacacctttgggtcctacagttttggctggacactgacattttttctaaggtgggtcacaaataggcctacttttttacataaataactgggctagaacccgtattttttttcactacaggaggcncttaatcttaaagtttgcccgggggnttttaacac

SEQ ID NO: 353 - DNA, 700 bp, Homo sapiens
  SITE (644): n equals a,t,g, or c
  SITE (678): n equals a,t,g, or c
  SITE (692): n equals a,t,g, or c
ggcacgaggtcaccaaagagcttagtcaacttacttaaacacattgaaacttgtttttccttaagtcataaactggcataaaaatttcttggagaaataaactgactgcttcccaacagacctgaccattgtgcagtagctgattaattaaagagttactattcaaatgagctctgactatttttaaaagcaacaaccagggtttggatggaacttctttgagttggagatgcaaacgagatccaaggtgtgcattctgtctggtgtatatttctgatttgatgagaagcagaaagtgggggaatctgacaagccaaaatcagtttggttagactaaactgatttcgtttcttcaagtacatttttatgttgaaatttaggcacaacacattaatagaataaagacataaaataactaatcatcttgatagatgcagaaaatgcatttgacaaactccaacacccttttgtggtaaaaacaacaaactagcatagaagagaacttcctctacctgataaagagcatgtmcaaataactcatggctaacataatacttaatgctgaaagactggtgcttttccttaagatcaagaaccmacaaagatgtccacccttgctacttctggtgaacattggactgganggtctaaccagggcaataagatatgataaagaantaaaggcatcagantaaaaaaa

SEQ ID NO: 354 - DNA, 405 bp, Homo sapiens
cagggtatgtgctcatctactcccactttccggcttttgccgccttgggaaaagtgggaggagaggttgggccaagctcggcatgcggggtggggcctgggcgggaggcggtgcgcacgtgccgccccttggtatggaaaggccggcccgtgacgcggtcgtgcggctccgggcttgcggcctggcgtcattttccttaagttgtttgcttaggaaggaacaaatgattgttttagtaatctgttttcaagggttattgggtacctatatgcctgtgtgtgagcgtcccctcccctgatgtctttatgagcaccatactggcttatctgctttgtccatggccatctgaaatttcactctcccggcctaattctccttcggtcttacccatttcagtaaatgacg

SEQ ID NO: 355 - DNA, 502 bp, Homo sapiens
  SITE (395): n equals a,t,g, or c
gatccccccccacgtgctctcctcagagtttgctgtcatcgtggaggtccacgcagccgcacgttccaccctccaccctgtgggtgtgaggatgaccagtctctmagcaagtacgagtttgtggtgaccagtgggagccctgtagctgcagaccgagtggkccccaccatcctgaataagattgaagcggctctgaccaaccagaacctgtctgtggatgtggtggaccagtgcctcgtctgcctcaaggaggartggatgaacaaagtgaggtgctttttaagttcaccaaggtggacagtcgacccaaagaggacacacagaagctgctgagcatcctgggtgcgtccgaagaggacaatgtcaagctgctgaagttctggatgactggcctnagcaagacctacaagtcacacctcatgtccacggtccgcagccccacagcctcggagtctcggaactgacccgtcacacacacctgcctaaagacagggatggctgt

SEQ ID NO: 356 - DNA, 355 bp, Homo sapiens
  SITE (126): n equals a,t,g, or c
  SITE (287): n equals a,t,g, or c
  SITE (317): n equals a,t,g, or c
ggcacgagcacaccactgcgctccagcctcagtgacagattgagatcctgtctcaaaacaaacacacacacacaatacggtatcatttacatcagctccctccagaatgaaatacttaagtacaantctaacaaaatatgtacaagatttatatattttttaaaaactatgaaactctgatgaaagaaaacaaagaagtactaaataaataatgttccacgttcatggttaggaagactcaatattgttaagatatcggttcttcctaacttggtctatagattcantgcaatcccaatcaatattccagcaagttntttcttatattgacaaactgattctgaagtttatatgg

SEQ ID NO: 357 - DNA, 466 bp, Homo sapiens
  SITE (411): n equals a,t,g, or c
  SITE (422): n equals a,t,g, or c
  SITE (458): n equals a,t,g, or c
taataaaaagtgaaggcatggaaatactattttggatatgtttcactaataaaaagagcaagacttcagtattagccttctattggaatgtaaattattctgacttgaacccacactgaactgcctgcagcctgtaacttagaaggaaaaaacaaagtgccaccactgaactgctggccttctaacaaatatcacctattagcattcacaatgaaggcaagcatgaatcagcatgaaagtataccctatataaggtttcttttagcttctctcaagtcttgacacacacctgtgtcactgacagctagtatgcaaattgcctaaaagctccattaggctagtcttagggcaaggawgcccatctgttcgttccgtggacactttccctcctaggatcctcatgtgggggantatgtccttgnggacatggcagatgggatggattttgcggccatgtntgggtatt

SEQ ID NO: 358 - DNA, 338 bp, Homo sapiens
  SITE (297): n equals a,t,g, or c
  SITE (328): n equals a,t,g, or c
  SITE (337): n equals a,t,g, or c
taacttgtctaaatggattcaaaaagaagcagaaaaattaagtggttatgaaccttggaaaaagatatgtgtcaaataatttcctcaaaaaagtcccttggcccagagagttttatagacacgttctttcaaattgtgagagagcaactatttcctataatagaaaaactattttagggcacagaaatctataaaagttatcccagttcattttatgaaatgaacataacacccttaaagaacttgacaaagaggttgagcatggtggctcagcctgtaatcccatacttgggaggntgaagtggggggcggatcacaagtcaagagnttgagaacnt

SEQ ID NO: 359 - DNA, 413 bp, Homo sapiens
  SITE (401): n equals a,t,g, or c
  SITE (410): n equals a,t,g, or c
gtcccggaatgcttggatttcatgaatcccagcactgcccttgttccccaagcttcagatggttcaagcgaacctgtcaggaagcagaaccagtgtgacaatgaataagctcctggcaggaacctctgtagctcagcctctccctgatgtaatctgggttacttgtgttgcagcagaactgggaagaaaggaccctgaaaagttagctggttccargtgaccctccaaggkawrgagtgctggattcagagcccacctcaggggaagacaggaccctctccaagatggtttccctagaagctactacctctccctggaaggtggagatatttgctggtcaaagcaagaaggccctctgcagatgctgacaccttgatattggacttcccagattccagaantctgagaantaa

SEQ ID NO: 360 - DNA, 447 bp, Homo sapiens
gcggccgcccggggcggcggcttctcggtttcctcgttgaggacttggagatagcactacctcatctgtaaaatgggtcttctctcctgtctggtggtcgcagagatcacctcgcaaggacgtcaagagccagcgaaggctctgctggcctgaaacagctgtgcaaacctcagaatcacgctcttgaatgggacggtcgccgccccccgcagccccagggcgaggtgcccccggtytgtaggagtgaaattctaactctctgccctgggaaagccccctgccgacctctccccacggccccacccggggccccgcacgtctacccgccgcgcacgggccaccgcgcgttcccgcctgaagttttcgtacgcgctgttcctttcgcgtagcaaattycaccgacctcgaggaaatgccaccttctccaggggccttcccagaccccct

SEQ ID NO: 361 - DNA, 247 bp, Homo sapiens
tgtgtggtcccaggggagaggcccagagcttgtgggaaccgacttattttgctgaggcagcgtcatsttttcatcctaccaactccttttcctttctragcatccttcaagctataggtccttctgcctgcattgtcttttatgcctcatgaccattggcaaaaatgggattgtctttgttttttagatgatgaaactgaggcttgcaaggtttagagccccctctgcactaggatctgaacccagc

SEQ ID NO: 362 - DNA, 645 bp, Homo sapiens
  SITE (3): n equals a,t,g, or c
  SITE (8): n equals a,t,g, or c
  SITE (18): n equals a,t,g, or c
  SITE (60): n equals a,t,g, or c
  SITE (66): n equals a,t,g, or c
  SITE (612): n equals a,t,g, or c
  SITE (643): n equals a,t,g, or c
ccnagccngatttacccntcactaaggggacaaaagctggagctcccaccgcggtggcgnccgctntagaactagtggatcccccgggctgcaggattcggcacgagcagaagtggccagttaatggggcttcattcccctgcactttggaaatgaccagcagtcccaaatgcatttgagagtattttcactcatgagagaaaacgtgcttctcagattctgaaggctttctgagtgaaaaccagacaaaacagacagtaagagtgctaataagtatgagacatctttctttttgttttccccccaccccaatctctcacctctggcttaaattcttaattttatgaaatgatacttggctgggtgcggtggctcatgcctgtaatgccagcaccttgggaggctgaggcaggagaatcacttgaacccaagtggtggaggttacagtgagctgagattgtaccactgcactccagcctgggcgacagagtgagactctgtctcaaaaaaaaaaaaaaaaaactcgragggggggccsgtacccaattcggcctawartgagtcgkrttacaattcactggccgkcgtttacaacgtcgtgacttgggaaancctggggtacccacttaatcgcttggagaanat

SEQ ID NO: 363 - DNA, 449 bp, Homo sapiens
  SITE (442): n equals a,t,g, or c
gcgggaaactgggaaggtacagactgctgaggaggaccatccaaggggctgmccttctcactgctctaggcttgatggaccagacaaataggatgatggctgcccccacacaataaatggtaacataggagacatccacatcccaattctgacaagacctcatgcctgaagacagcttgggcaggtgaaaccagaatatgtgaactgagtggacacccgaggctgccactggaatgtcttctcaggccatgagctgcagtgactggtagggctgtgtttacagtcagggccaccccgttcacatatacaaaggagctgcctgtttgctgtgttgaactcttcactctggctgaagctcctgaatgggaaaaagcttttcttcttgactgtgaccctcttggaactgaattcagaccaactgggaatcccagaccgagtttgnttttttt

SEQ ID NO: 364 - DNA, 499 bp, Homo sapiens
ctggagagtgaggactgcaagctcccctgcaacccatgcgccaccaccaatgctagtggcaactcctgtggaccctgtggcacctctcaaaagggttgctgtaattgaaaagcttgtatcctctttgaagacatctacaaagccatttagatcaaccacaggaaggatcctcaagtcctgacttttctggagctcagctgacatcaagaaacctcatcttgcctctatgttatttctagaatgctgaaaagctttcctgacccaagcaaagacacacatcatcaacttccaatgtctggacaactccttcctgttgagggtcgagcctgtttgtttctaaagatgttcagctccctgtaatctgagctccagttactacttaaggtgtttcctgaacgtactactgcatttcctgttttccttttttctttggcattctctggaatgcaaggaggagacttcatttacttcccaataaacttcatttctctggcataat

SEQ ID NO: 365 - DNA, 510 bp, Homo sapiens
tcgagttttttttttttttttttatagaacatctcactattgcttgtctgtctccactcccccagaaaagtgaaaggatgcatgttccacagtcagagagccaccttgtcccaccatcgtatccacatcacttagaacatgatggccagagatgatcaagactgaatgaataagccacgaggaagagagagcttgaacacaatggggataataatgaggctgggggtggtatgttgaatcccaaatccatgaaaattttctctagccattatctaaatttkayytttccagatatttcaactcatttcccccaatattttattattaaaaatttcagacatataggaaagttgaaagcatttcttttcacatactccagaaaaaagccagtaagttgaaagcttttttacagtgaacacctttataaccactatttagactacagcctatcatttacatttkgctatacttgtcttatcacctacttagctagatctgtyctyctatcca

SEQ ID NO: 366 - DNA, 440 bp, Homo sapiens
  SITE (279): n equals a,t,g, or c
caagcttggtgaaattcctccctgtacacaccctattaactccttggctgtggtcccccagctacaccaccagcccaggtcctggctgccagctttcctcctctgcccggcctctagcgcagtcgctaactactctgctgggctccctgggtctctgcccaaggccccgcacacactggggcctagcatagttcctgcctatgccaggagctggctctgtgtttaagaaaaggaggactgaaggacaaacaaccaagagtggcccagtccccacccccnacatctagctcagtctcaaatctgagtgggaccaagtgcaattcagggcctttttctccactcacctgcacccagaagcagagaaaagcaggcactgttcacttttcctttattcttaatggccttcctctgttgcaacctcaataaacagcacaatctca

SEQ ID NO: 367 - DNA, 69 bp, Homo sapiens
agtccccggaatccccggtttccaaggattccctgaggtggctggcccccctgggaattacggaattcc

SEQ ID NO: 368 - DNA, 224 bp, Homo sapiens
  SITE (81): n equals a,t,g, or c
  SITE (138): n equals a,t,g, or c
atggggaatattaaaaagaagcctttggctcttttagctatatagaaacagtcctcgtcctttctaaatttcctcttcagntggaaattagcaaaacaaactccacttacaccttcaatattagattcttaattttgncaaaattcctaactataacctgggccgaatatagttagaaggagtaggtattctctaaagtgagggcttctcccagaccctcccca

SEQ ID NO: 369 - DNA, 320 bp, Homo sapiens
  SITE (21): n equals a,t,g, or c
  SITE (128): n equals a,t,g, or c
  SITE (287): n equals a,t,g, or c
ttaaccacctttctacctctnaaaagttaggatattcccgaacctatttcgtacaatcagtcaaaatactatggagcaaggattaagtcttacgaagacgaacagaccaatgcttattcccctttctnaatttgtaaaatagcctaactagtttataaagaagggtcatcaagtacctcttttcaaaacatcatctcttaatctgtgtacattagcataaaaagcctgtaattcataaatgtccaaaatgtactcaacwttggttattaaaaaaaaaaaaaaacctngggggggggcccggtccccatttggccctttgg

SEQ ID NO: 370 - DNA, 509 bp, Homo sapiens
  SITE (332): n equals a,t,g, or c
  SITE (505): n equals a,t,g, or c
ggcacgagctttctgtcatcacagattagcttgtcttttctagtttatataaatggaatctggagtatgtactttatctggtttatgtactttatctggtttctttcactcaatataaattgagattcacgcatgctgttacatgcagcaggagctcattcctctttactgmcatgtggtattccaccatatgaatgtattagtttgtttatccatttgcttgttgatgcacataagttgtttccagtttgaggctattacaaataaagatgccatcaagatttgtgtgcaagcgtttgtaatggacatacatttgcacttctcttggagtnaaaggcctaggagtgaaatggctgggtcttatggtaggtgggatggttaactgtttaaggaattgacaaaccgctttctgaaggaaggttatatccattttacattcctaccaggcagctcattagggttccaaattctccacatccttggccaacacttgggcatgaatagncttt

SEQ ID NO: 371 - DNA, 339 bp, Homo sapiens
tttttgccgaggtaagycctgtccattaaatgaccaaatggagagaggctctccaaaaggaagtgatcctgtatttgggaatagggcattgcaatgggaatgcctgtgcctatagtcaactatgtacatattcagaggagtaaaggaaaacaagtttttaaggacaaatgaygaggattacaaaattactttgaggtaattattcttggctaccaagatcaataacaaggatgacaccagtccaaggttgacaggcagttgctaggcagattttctcacgagagaagttttttggtgcaaggttgcagtggcctttgtgtaaggttgtagtttttgttc

SEQ ID NO: 372 - DNA, 376 bp, Homo sapiens
  SITE (365): n equals a,t,g, or c
  SITE (372): n equals a,t,g, or c
aagatggcaccagcaatttgtatttatatgtttccaaggtctgtgacccaaaggcaaggcccctacttctgctccaaatcagaagcccttgaggaaggaatttgagtggcttatcttgatcatattgtttctaaccctatggccagggcaggcraggtactacgattgatgcctccagcaaaagttgggtaggaatggttttctaaggaaacagggacgctgcaaatattatagcatagtaaatatctacacttycatcctttggtagctcagcacgtgtgtgtactcacatttgktctcatacatacaatttcaaaaatgggttctgcctaatataatgcaaagatttcacccacaacttaaanctttttncaaa

SEQ ID NO: 373 - DNA, 377 bp, Homo sapiens
ctaccaggggactttggggggtgtagttgcaggcatggtggtcacatgccctcaccaggactccccaagcccagggaacctcttgggcaaaggctccaaggcatgaaacagcctctcattgagggaactgcagaaagccccatgtgtcctcactgaggtcagcagcattctgytctcccagctcctcttcatgcctgcactcgagcagcactgacccgcccagccacttctgtgccggaaagaccgggtaacgaagacgacaacatccctgctctcttggggtgtgtcagcgggtgatggaatagtgaggagctatgaggaagacaaaacagggaccagggcacagagagggattgcattccgccttcttgagcgcc

SEQ ID NO: 374 - DNA, 175 bp, Homo sapiens
gggaatgacctcttccacacaggagagggtctggtgggaccaccattcgaggccctctctccccacctgccccctgcccctgccacccacttgcaggtaagggacaggctcctacgcagcctggtcagtcactgctccctcctggagtctggctattgaaaagagggacaaagaa

SEQ ID NO: 375 - DNA, 556 bp, Homo sapiens
cagagcctcagggtagtaactgatttgcatataatgatatgtctacgtaaaatgtgtagttgtaataaatacaaacaatggtgggtttaaaaaatttttttttaaatgcacctctttcttcccgtgctggataattatcatttactgggtacttactacactctggcactgtgttcaatacatttaaaaaaaatttacatttggtttctttttgttttaaaacagcaacctacatcagctatcctcataaggataggtcaattgttccagaaacagaaggaatttatattaggtcccttgcttttccacatatattgtaaatgagtacaaaggaggtacagctttgggatggaaagacttccggggtttctgcatgagggaaaatgggccttatgcacttaaaatwttaacaatcctaaggagcttaaagggatttgcacatcacaaccttaaacaactttgttagaggtctatttccttagtctaaaattagaatttgtctctaatgtgctcttcctacttaagggtccagattctgttctttcctgccaaccag

SEQ ID NO: 376 - DNA, 314 bp, Homo sapiens
  SITE (302): n equals a,t,g, or c
  SITE (308): n equals a,t,g, or c
ccacacgggtggctgagatagtgacacttgctttcagatggttcaatgtatacaaactgtgtttcatgcaaaacattattttaaatattgtataaaataactttcaggctatgtgtatcaggtgtatttgmaaacataaataaatgtcctgtttagatttgggccccatccccttatatctctcattatgtacatgcaaatatttcaaaatccaaagagcatctgaaatccaaaacacttctggtcccaaatattttggataagggaaacttaacctgtacttcttgtgcttaaaagtttanttgacnattcca

SEQ ID NO: 377 - DNA, 222 bp, Homo sapiens
tgatttccttaagttggactttgcctttcactggtgccttcctgattagcttaataactaaccttctgaattctttttcaggtgaaacagggatttcttcttggtttgcatccattgctggtgacctagtgtgaattttttggggggtattaaggaaccttgttttgtcatattactagagttgggtttctggttcctcctcatttgtgtagtgtctgtcca

SEQ ID NO: 378 - DNA, 392 bp, Homo sapiens
  SITE (377): n equals a,t,g, or c
  SITE (379): n equals a,t,g, or c
ggcacgagcaaaattttatagtgttcagtgcacaagtgttacaattccctggttaaatatattcttaaatattttaccgttttgatgttactttatttttattttyctgtttgtttttgtttcatttgtttgtttttgagacagagtctcactccagcctgggcgacagagcaagactctctctcaaaacaaaaagaaaaaaaaaggaaawtagttgttacagtatgttttaggatatatttaatcaagcacatagtctgtaaatgcacctattaggtaggatgtttattatggtaaatggttacagtttttgctaaattttatacattggtttttaggaagtctcttatactggattaaattacattttacatagncnatattacccacat

SEQ ID NO: 379 - DNA, 479 bp, Homo sapiens
ccactactccgccctaaatgtacaaagcaaccgataaacacatgcaaacttgaaattattgcagattgtcggagccctacaaaaattcagccctgttacttaaaacaagtcaagaaacccaaatgtataagaagttgatgttttaatggacagagaactctgtgaaaggcttttagcttacaagttggtggaatgtagtatcatttaatgtccttgtactttaatattcgcaaatgtcatttctgattacagaatacagcttctctccagtcccctgattcatattatagaaagaacaccaacttagtctaaggaaaattgaaccctcccaactgtatttgaacccatccttctcgctaacaagtgtcagtcaaaacagagagaataactaacatctaaatcttggatatgtcttatttgtatttcatttttgggcttacagttatgatcaagcagctattcttgtttcttttctgaaa

SEQ ID NO: 380 - DNA, 503 bp, Homo sapiens
  SITE (20): n equals a,t,g, or c
  SITE (29): n equals a,t,g, or c
  SITE (54): n equals a,t,g, or c
  SITE (502): n equals a,t,g, or c
  SITE (503): n equals a,t,g, or c
cggggggggggaatgggaangctacctcncactattgggttacaaaagctgganctccaccgcggtggcggccgctctagaactagtggatcccccgggctgcaggaattcggcacgagttttatttaatttttatggggttttttttgttgttgttgttgctgttgagacagagtcttgctctgttgcccaggctggagtgcagtggcgcgatctcggctcactgcaagctccacctcttgggttcaagcagttctcctgcctcagcctcccgagtagctgggactacaggcacacaccaccacgcccagctaatttctgtatttttagtagagatggggtttcaccatgttggccaggttggtcttgagctcctgacctcaggtgatccacctgcctcagcctcccaaaagggggggcccggtacccaattcgccctatagtgagtcgtattacaattcactggccgtcgttttacaacgwcgtgactggaaacccaacnn

SEQ ID NO: 381 - DNA, 784 bp, Homo sapiens
  SITE (9): n equals a,t,g, or c
  SITE (23): n equals a,t,g, or c
  SITE (40): n equals a,t,g, or c
  SITE (73): n equals a,t,g, or c
  SITE (92): n equals a,t,g, or c
  SITE (645): n equals a,t,g, or c
  SITE (738): n equals a,t,g, or c
  SITE (769): n equals a,t,g, or c
gggaacaancggttttccaaaangcaaattttaaataaanaaaaaccttttaaagctgccctagcggcgaacngttggtttgccttttaacngttggctgtttcccgaagcttggaaatgcatttcctttcacctactccattatttctttgttgtcttcccacgtatcagcttaaatgttacaatagcaaaatggaggctgaatcatacaaccttgatatattttaagtagctctcatcactctcatcactactgaagattttaattatttgtttgcttgtgttagtgtctcactttcctccccagaaggtatctttatgaaagttgagatcttttctatagaatcccagcccctagaactgcatctggcataacagatttttgtaagtattgcttagtaaattacagaatccctaaacatttagttcagaggtcactttctccaggaagaattcttgaactaactgcgcaggagaaatttccccttctctatgctcccatcttcctctgcttgtgcttaaaactaacattcatcaagttgcatcatattaacttatttgtatatctatcttctgataacactgtaagttccttgggaaggcaaggagtttatcttagcctgcttcgtaattcctaagtttatnttccatactggtggcctgggccacaaaagtcacttcaatgggtatctttaaaatggattactctttggaaaacctggaaactatccttaaaancagtttgttaaatctatctaccataggtttntggcatccgggtggg

SEQ ID NO: 382 - DNA, 565 bp, Homo sapiens
  SITE (531): n equals a,t,g, or c
  SITE (536): n equals a,t,g, or c
agtggaaatagtctagtcaccagtccctaagtgctgatttgtggaccagttgctgcaggtctcaattcccgggaggtcccgtcgctggagattctgatcaagtagattgcacagcactcaggaatcagtcattgtataaggaaatccccaggagactctgatgcatgactacctttgggaataggctctctgggttttacaaagccattttctrtaaaactataatttgaactcattttcgttggatgtggaatgcagtttggggattgataagggcttagttcacattggaagaaaatcagaattatagagtaattataaagagatgtaattaaaatacaaataccaatctcactaatgtaaactaaggttaatgttgccaaatacgactgttttaatgaataaattagcacgtgaattatatactagtaaatactgctaaagtagcataaaagtgcttgaaaacactgtttccttaggctgaacatcaccttgaatcttgtcgatgttccaactgtgcttaaatgcagntgccnggttacttttcgcccgtttcaggacacat

SEQ ID NO: 383 - DNA, 1068 bp, Homo sapiens
  SITE (56): n equals a,t,g, or c
ggcacgagccaaataataggtgctacattatcaagcagatatatcaagagattgtnataatgttaatgaaacccctttgctcatcactcatttccaaaatttatattttcaaagggaattttgtacagagttcctaaaaaaagggatcatgaatgccagtgtattgcctcactgattgctaaatgaaagaggactatactgaagcattcaaagaacgtgatgtgcctctggggcaactgaaggattgctatctgacttatgcatttgaaaaccttcaaagtggaagtttgtctggaatggcttaggcaaacagwctgggwtggaytgakaattgwatgtatacatawaatttggwttggtcagatgagaacaccaaatgtggtagctagctcacctttatttatgagatttttattgggttgatttgtcttgaaagaatcaaatctaagagaaatgtttggaatggctagatgatcctaacagaagaaatcttacaggtctttactgctaaacctaaggagatgagagtaaacagtaagtggccaactcaaagaagcatggactatgttgaaacatggactatagctgcaatttcccagtggtgcagttttcaagcgytttaccccaggagagaaaaaaataaataaatgaaaagtagccatttcaccattcagaggatagatactgttgcccagtgaaaactgcatgaattatgtaatagttttatgcttgtttcccccactcaccattccaaaactgtaagacttcaagatagaacaggaggtatgaaattttaacagcacataaaaaaatagtgaacattctatccccgcacttcattgccrttactaaggctaaggcaggactgagtttagaatgcagcaaagctttgaaatgtataagagataatatctctaatattcaaatacaccataaactcaaaacttagaatcaatcctatttttaaaatactgaatgtgacwagaaacgttataaaagttttcaagatatcagtatatgatagaaagagatgtattgctttagcacaaatcattctacaaaaaaaaa

SEQ ID NO: 384 - DNA, 333 bp, Homo sapiens
  SITE (199): n equals a,t,g, or c
  SITE (239): n equals a,t,g, or c
  SITE (246): n equals a,t,g, or c
tattctagcatggatggactgtccagggagtgccatattctgaggtaggtcagcagaaaaacaaaggtgtgacttcccctagtcggtaattacttatgtsctgaacacccaggtctgctaaatcagaatctccaggttttagcagaaaagctcctaagataattctgctgggcagtttagaaaaaaaagaaggaaatgnaaaaaggaaaagtgagaagacaaggaaagttaaaccctgncattgtnttctgtggctaggatggtccagcaagacagtttggcctcccagaatggggccaatgggggccatcaggcagacctgcccgggaagtt

SEQ ID NO: 385 - DNA, 419 bp, Homo sapiens
ttcttaaagtgtcaattaccactttatactgtaaattagtgtgctttgctaaagaagcctctattttaattcccaatttatttatggtcaatctgttggacaccagataacactgcctcttaaaatttgtgtacaaaacaaggagacattaaccttgagtaaaaaatgttgagaccagttcttacattttcattctaaattcacaagtacatattctaaaacaatggtctcatcctcagtttcttaaaaattaaatagtatttcttattctaagattatagattttttaaagatctaatgaactgtgaacactgtgggtaaacaaaacactaacactttttgaaataaaattaaatgaaaacaaattggctaaatttcatttttcctttaacatgttatacattaagccttaagataaa

SEQ ID NO: 386 - DNA, 555 bp, Homo sapiens
  SITE (17): n equals a,t,g, or c
  SITE (40): n equals a,t,g, or c
cacctttccctcaaggnatggatggtgagaggttggaatnccaaatacccctcaaaacrggagttttaatctctasgctatatycccmaaacctaaatggagtgagaaaatgaatctttaatttttcttttatattagattaagtcagaaggcacgatttcactcttgactttgataattacagaaattgtagtttcaatattctttaaaaatacctaaaatcaggtttataactttcatttgcccctagaaaatgaaggcaaacaaacccacccatgatattcatgctggaaatgagaaaaccaaggtcatagcaaggaagtaaaaccaaacagaatctctccccatcgaaaaataaccccgaaagctagaatgaaagatgacaaaattatgaccaaacacacaaaaaatacttcagtaatcataaatttgaaaagaaaaaatataaacgatgggaaagctagcttgggcccacatgcctaacacctcctctgccgcaccctcctttgcaattgagatgaccagcgacagcagaacctgggggttccaggtagg

SEQ ID NO: 387 - DNA, 396 bp, Homo sapiens
tgaaaattgaatctcactctgtcaacccaacgctggaaatgcagtggcgcgaatcttggcttactgcaacctctgcctagcctcgctgccttcactcctcacaagagcacccccacaagaatcttcctgtaccctaatctcaatttcagaatcagcttctcaagaaccccacgttggacagggcagacgaccgtaccaacgaggagtcatcagttccccgccagcagggctcagtgtgggtttcgatgacttttttagtttcgcctcagtctttgcagttactattctctgcacctgaaacactgtttctggtctttccacagctcttcactcagggttcagctcaaatactgcttcctcgagaacattccttgaccacttatcctgaagtattcc

SEQ ID NO: 388 - DNA, 500 bp, Homo sapiens
  SITE (2): n equals a,t,g, or c
  SITE (4): n equals a,t,g, or c
  SITE (33): n equals a,t,g, or c
tngnaacacgacagggtctattgggtacgggcnccccctacgagttttttttttttttttttgagacaacatctccctccattgcccaggctggagtgcagcggcacaatcatggctcaccgcagcctcgatgtccagggctcaagcaatcctcccacctcagcttcccaagtagctgggaccacaggcgcacagggcacggctaatttaaaaaaaattttttgtgtagagatagggtctccttatattgcccaggctgatctcaaacacctacttgggctcaagtgatcctcctgcctcagcctcacaaagtgctgggattacaggcatgagtcactgcatccaacagattgatttctaatatgtcaccaaaaggagcacctttagctatgattggtgggaaaaatatgactaaaataggtatccaaaaagacaagggaaatgctggatagaagagccattccatgaagaacccaaggcagtgattttctccctctgcc

SEQ ID NO: 389 - DNA, 426 bp, Homo sapiens
  SITE (23): n equals a,t,g, or c
  SITE (42): n equals a,t,g, or c
  SITE (49): n equals a,t,g, or c
  SITE (269): n equals a,t,g, or c
ttgaacccctaagaaacccccangaaaacctttaattaaaancctatantaattgaaaggttacccattttccaggtactgtgcaatgtgaatccatttaaagtttttggtgaccccatgtagaaaggaactgatcctagtcctaaacatggaactatctcttaaatcaagataacagctgtaatcatatagatgcttttcctgagttagttgttttacgtcttcctttgtgtgacttaaagtttttagtttgactctgctacttttgntctatttgtgcgtggcttgatggatttttcctgtccccatctatacactcgtcacaatgaggggctactaaataaggcagtgttctctgtttgtgtagtccccacagctgtttcctatagtaaagactctggaaaacaatgacctcatagtttccaa

SEQ ID NO: 390 - DNA, 427 bp, Homo sapiens
  SITE (425): n equals a,t,g, or c
actcccatgccttggctcatcatctgcttttctgttttgtagcccagcacttccagggttagactacaaattctagaagaaatgtaggcttttttcccctctgtgtttaaaaatgtcctacaaatctcaaagaattaatcacttaggaagtgtgcatctaactctggattttatgacagcccagagttgttcattttacttcagggcatttgagaaatcatccatttatcctctttcaggttttggaaaatatatcttgcgactgscacagattgcatatcctagaaagtgagcttattctggctgaagggaaagaatgtttcagcaagagtggaaattgtaatgggccactcatgaataaaccctacatgggacctgagacccctggcatgaagagtactagcagtttataaaccagagattgnct

SEQ ID NO: 391 - DNA, 158 bp, Homo sapiens
  SITE (53): n equals a,t,g, or c
cagagccagtacacccaggacccagctccaggataaccttggcagtctcaggnaccaggccagcacccacagccctaggacccagccatgaccttaagtacccagcttctaggcctgccccactgccaggccaggccccatagccccagactccaggc

SEQ ID NO: 392 - DNA, 344 bp, Homo sapiens
  SITE (272): n equals a,t,g, or c
agatccgaggtatctcctggagaagccatctatgatgtcattggggaaatgccgctagcaggactgtacgaggaaatcatggaggccgaggctgtgctccaagatgaggaggacggaagtgtggtgaaggtggacacagaagccgcagtttcaggggaggtgtctaacctcctggagggacagtctatacgtgcggagggaggacacagcagacctgtttctcagggatgacgaggctgcgtttcctctggaggagatgacgttgtaaagcnacctgaggatgagatacaccagctggctgtcgaaatcacagctcttcatttcttgtacaattgtagtggatt

SEQ ID NO: 393 - DNA, 504 bp, Homo sapiens
  SITE (486): n equals a,t,g, or c
  SITE (493): n equals a,t,g, or c
gcctgcaccgagacctcaagacccagaacatcctgcttgacaaacaccgcatggtcgtcaagatcggtgatttcggcatctccaagatccttagcagcaagagcaaggcctacacggtggtgggtaccccatgctatatctcccctgagctgtgtgagggcaagccctacaaccagaagagtgacatctgggccctgggctgtgtcctctacgagctggccagcctcaagagggctttcgaggctgcgaacttgccagcactggtgctgaagatcatgagtggcacctttgcacctatctctgaccggtacagccctgagcttcgccagctggtcctgagtctactcagcctggagcctgccagcggcaccactcagccacatcatggcacaagccctytgsatycgkgccttytcaacttcacaccgacgtgggcagtgtcccgcatgcggagggcagagaagtccgtgggccccagcaacacanggagcangaccaccaatg

SEQ ID NO: 394 - DNA, 577 bp, Homo sapiens
  SITE (536): n equals a,t,g, or c
gggagaacctcctacaacaaacaccgccgaagtttccctctccagcgcgatcgccaatcccaggagcgcccggcgcgtgggctgggaaggagccgagcggaaacctggaagtgagccgcggcgcaggcgaatcctgcgsgttgctggtggcagcgccaagagaccccgcacagaaagtgggctgggagtctcgcttgctgtacccgcacctaagtgctcagaagcggcctttcgctctgcagagggggggtcttagaagcttggggaagaagcacattgtttcggagttccttgktgcgttctttctycttgggargagggaattgcacaaggaaaagaakagaagcctttactttgtaactgaaattctccagagttgagttgcgtcgtacagactcggtgcatattttaatacaaaactaagggaagaggccatttgatacttgggcttcatctcaacccgtcagcccgggggtgacttcaaacagacgcaagattgggctctggggagtaaaaggaagaattaggatggcggntttcaaagggaagttaagtctaaacatgcttctttgaaagt

SEQ ID NO: 395 - DNA, 742 bp, Homo sapiens
  SITE (691): n equals a,t,g, or c
  SITE (701): n equals a,t,g, or c
  SITE (715): n equals a,t,g, or c
  SITE (719): n equals a,t,g, or c
  SITE (741): n equals a,t,g, or c
gtcgacgtccaggggaatgactgtgcaagstagtatctaagcacctgagaagcagtagtgctttgtcgccggctcacggactcccatgcagccttcctcaccaatttggcacaggcagcagtctccctcccaggctctccccatctcccctgctttggtgttgagtgatgagctgagtcagggatagggagtcccctggtgctaaccgtgaacgtagagacttgttctgaggacatccacacaatagtaggaatctccccaaccaatctgtgaatttcatgggggccaaaactgtattttgctcactgctaagtccccagctcaccttaggggctcagcaggtccctgttgaagggaggaaggggaggagagaaggagaaaggcaagcaggcagacagctatgggtctagcatctgcagtgtgttagcgttggggaaacagaagaactagaaggatggatatgctgatgactcctagattggaactccggtccrgttctttctctggagctctagatactcactttttgtgccccccaaatgaatgcattttcttcccactaacccttgatttttcttcattcatggtgaaaaatatcacccttcaatctagtgatccaagtcagaaaactgggagttattcgctactctgtttcatagaaaatccccatccatcagaaaatatgaaaggntaaggctggnatatgaaatatttncagncacttcctcctggaattcccanc

SEQ ID NO: 396 - DNA, 1142 bp, Homo sapiens
  SITE (410): n equals a,t,g, or c
  SITE (430): n equals a,t,g, or c
gggtggcttctacatagccctttattctccctctgcttgtgctgcccgcctgcctgttggcttcgctgtggagctgatgtcccctgtacaaaggatgccctcctccccggctgtggcccattgttcttttaggcttctggactcctcctgggtcttcgctggttggcaagctctctcccctaattggcttttctcctggtgctccccaccttcctgtgggtcgaagcccttctgcccccagaagctcagagaagacaaggccaatatgagagcccataagtagtgagcacttgcaccgggctgtcagtgtgaatgatgaagatttgctggtccgaatacttcaaggaggccgtgttaaggttgatgttcccaataagtttggctttaccgctctgatggttgctgcccanaaaggatacaccaggcttgngaaaatcctagtttctaatggcacagacgtgaatctgaagaatggagcggcaaggacagtctaatgctggcgtgctatgcgggacacctagatgttgkgaaatatctccgaagacatggcgcttcttggcaggctagagacctgggargctgtacagctctgcactgggctgcagatggaggccactgcagtgtgattgagtggatgataaaggatggctgtgaggtagacgtcgtggacactggttcaggatggaccccactcatgagagtctctgcggtgtcgggaaatcagagggtggcctctcttctaattgatgctggggcaatgtgaatgtgaaggcaaaatggaagacgcccttatggtggctgtgttaaataatcatgaagagttagttcagttacttcttgacaaaggggcagatgcaagtgtaaaaaatgagttcggcaaaggtgtcctagaaatggccagagtttttgacagacagagtgtagtctccttattagaagaaaggaaaaaaaagcagaggccaaagaagtcttgtgtctgctgatgagagcaccactcatctgcgaaacgcacgtaaaacaaagtgaaccgtgactgttaaactagggatgggaaattctgcatcttggggggctgtacatttatttatttagttgaagattcactgwtcccatttgaaatacwtctttttacctaaaaaaaa

SEQ ID NO: 397 - DNA, 520 bp, Homo sapiens
  SITE (463): n equals a,t,g, or c
  SITE (470): n equals a,t,g, or c
  SITE (481): n equals a,t,g, or c
  SITE (502): n equals a,t,g, or c
  SITE (520): n equals a,t,g, or c
gcgcagctcaggagcaccttgccatctgcagctccctgggggacgagaagaaacagcagccacccctttctcgggcaccttcagctccgccgagaacgcccgacactcagagaccctgctctttgttaaatgggaatgagacatgacacagacacggggcagccgccactgcagcacgggttgtccactgcccagctctggggccaaaccctcggcgtcgcgcaaaccatacctcccgcgtgacggccgtgtccggcctgctcacctgtgcgaggcagccctgcagagcaggtcaccaggccacaggagcaccagaagagaagccacgtccactgcgagggccatccggtgtcatgtccctgcctycactcagccccaggcccacagctgsagscacgcarccccgaacaggtcaccgtytcaggatcatcggcagtggggggggccgtctccacctcccttnctctacnttcccccgctncccagggcacgcactcctggntcctgcgcgatgcccacn

SEQ ID NO: 398 - DNA, 547 bp, Homo sapiens
  SITE (62): n equals a,t,g, or c
aaggtacgcttgcaggtaccggtccggaattcccgggtcgacccacgcgtccgaatcagcangatcctcgctcagagacctggcagacaccaccttaacccagtgatcaaagttaacctccccagtacatgtacaactactgctgccctgaaaggatgcactgagaacatttctgtgtcatttctaccacagatgcgctacttgaatctaattatgaagagacaagagacaaacccagattgaggggcattcagcaaaataattgccctgtactctttaaaaaacggcaatgttgagaaagacaaagaaagactgaggagctattccagttaaagtaggctagagacactgggaaccaaatgtgatgcatgatccaggatatwyttttattacaatgagcatcattgggacagttggtaaaatgtgaatattgtctgaagagtataatattgtatcaaagttaatttcctggtcttgaggattgtactgtggttatgtaagagaatgtccttgtttttaggaaatagatgttgaaatatcttgaaaa

SEQ ID NO: 399 - DNA, 806 bp, Homo sapiens
  SITE (22): n equals a,t,g, or c
  SITE (35): n equals a,t,g, or c
  SITE (37): n equals a,t,g, or c
  SITE (768): n equals a,t,g, or c
gccctatctcaaaaaaaaaaantttaaaaaaggantnacacgcccatgggtccttgacctgctgccctcctcacctgcttctccccaaagactgtggggacttccagggaggagatgggctagggagagcaggtcccacctccattatctggacaggtgaggcctgggtatttccaattgcctcattttgagcaagagttttgatctgtggcctcctgccaagattttgccattctttcctgacaaactacacggctgttttgtaaccggcattataaaatggttttattaattattaataactatttaatgtgtacacagttatccatgaagaaataggaaataccagtgagttgttaccagcgttgccccaggctgggagagcccttccagctttcctttggcctctgacacccctgccccactgaccgcccaccccccattcctgtctggaaggctcgcctgccatcatcccgcacatccgacagctctcccttcagggtcacctcctccttggacaaagcatacgtgaccccttgtcaggtttcttggctgggtgctcccccagagtttggctcctgcccccaaccaagcatgcatggtgacaatgcacccacttgataactgatcactggtgtcacttccacctccctccctccatgagcgcaactccggttaatacagttgggtcagcccagggtcctcggtgtccccagagtctgccatgcctggtgctgggcagatactcaataaacacccaaaatcagnccgggctcagtggctcacacctgtgacctcagcacttt

SEQ ID NO: 400 - DNA, 676 bp, Homo sapiens
atctccttctgcatccttaactgagaatgaggtaaaataataataataacgataaccatggcattggtatgaaggccatttagctgcccacgctgcagtgtgagtaatgctcagacttcataagcgcagcattggtgctcactgccagtgcagatgttttagggcctcttggctaactcagattcatgaaatggacaaacagtgcactatgttagtttatttgagcactttttatacacacgcacacagtgtctgtgtacatgtacagatatacttcagtcttgatgcagtttcatarttcttaaaatctgtctgaagaatgttgtgttctgtgtagccctcacactgtaagagttcacatggaagtaagtctgcgttggttctgaaagggcacagtgtcagttgagctgacatatactgggtggggtggaaggcgactcacacaccacacctgattcctgktgcttycagamctargctcatggargaagccaaagawttctttgktctcatgcmtttcatggctttggtcctttaaattctggcacatttttagttacttgagtgttgaggtgagtcagaactaccattgtaatatgactcctgtgttctggacttgcagagtacatgatagcaaaataaagccatttgggctgctgcctgccatcattgtaaa

SEQ ID NO: 401 - DNA, 466 bp, Homo sapiens
  SITE (65): n equals a,t,g, or c
atcgcgagcggccgccctttttttttttttttccaatcaggaaatatatccaggccgcggcagcntytccaaactcccgggcttcccacagaatgcgctcgaatgacactggaaagatttcaaaaatccaggcctccccctgttttaattcctttcttcccccaacagatgttgcaggcctggtgaggaagcccatcgtgtgtgactctcacgccactgacggggtttcgtggtgcggccaaattcctctatggccatccccagcatcagtccttcyrgattgaggaagccccttccaggaatgagctccatatttaaaggagtggaggagatgaacacctctccaccttggagccaagaggttaagctttcaggaggcccagggtgggcaggaaggattgaagctgtcctctgcccaccctcagagctgtttctctggactttaattgaaggtcgtgatcctcaa

SEQ ID NO: 402 - DNA, 207 bp, Homo sapiens
  SITE (17): n equals a,t,g, or c
aatgtcaaggtaaaagnctgcaagggtggcagtgttacttctgcctgtccctttcttctggaaatagcttctaagtttttgggggttttttgagatggactctcgttttgtcgcccagggtggagtgcaatggtgcaatcttagctcactgcattctagtgtgggctacagagggagacttcatctcaactgaaaaaaaaaaaaaaa

SEQ ID NO: 403 - DNA, 617 bp, Homo sapiens
tcctggcttaagtccagggcatagcacagcaaaatctaccctttggacgttcataaagaacatgcatagttctggcctcgtggcggtcgcagctctcccagggccctgctcttctctgagtgaccactgccctctggtctggtggacgcctgggcatctgtttctatgaaacaacctgtttgtttctgtgtttcaaatatttgtgtttattatggaagagacattattttttcatggaattctgaagactgtcatttttraaggataagcaggttttggacaatttgcaattcttacaactgtctgtaaatttacattactgttataaatgagaagacccttctgatattcagacaccttgttaaatactggctcgtcattgatgcgtgcarcccagtgtgggctttgtgggggtttgaagtgtgtgtggtttgtagcacacggacattcccctcccaacgcagaggcatctttggcacgagcttcaaccgtaaatccagaaacaagcttgctggctttggacttcatgggccggttaagtaaccccccatagctgaggactgatttaaatgtacttttaattttgtccaacaataaaaaaaaaaataaagcaaaaa

SEQ ID NO: 404 - DNA, 464 bp, Homo sapiens
  SITE (386): n equals a,t,g, or c
  SITE (415): n equals a,t,g, or c
  SITE (462): n equals a,t,g, or c
tacaaatagcctttttgactgagaaggaaaagagaaattcaacaacatcaaagaatgggagtgactaaagtgtgtttttcagctggtacataggagccagtagagagaaaaggttgaagatggagggaagagaagaaccagttgttaggacaaggtgccagggwtgttgggaagaaaacagatccagggacatatgatggagggtggacttaactaccctaagatttgagggcaacaaatatttgcttggggcatgggagtgattaggatggtggcttaaggagagtgacaaaaattttagaatagctgctaaagggagaatgaaacaaatgaagagttgtctgcccagatggtgttaagagccctctgaaagtgaaaccatgaantgttcatcaatcatccaatctgccatggnagatgctgcccttcctttgaaagcagccttatttccttccctaaaanaa

SEQ ID NO: 405 - DNA, 521 bp, Homo sapiens
tgcgctgttcctcggtggcgaccttaattatgagatgagctaatgctttactgacttaaccatggcgcacgggcagtgtggctcataagcccgaaccgggaactccactttgtgcaccgtgagattctccagtgtgatttggaaggaatcatgccaaatgttaccatcagcttgagtctccccaccaatggatctccacttcaggatattctagttcacccttgtgtaacttctcttgactctgcaattctgacttctagtagtattgatgcaatggatgactctgcatttagtgggccttacaaatttccattcactccacctttagagtcattcaacttatgcttctacacttcccaggtaacaaccctagaatagttgagagtttgctgatctttatattcataaatactattgataagtagataattcatactcttggtatgagaccttaggaaaaagttcctatttatcagacaataattgatgattgaaggatgaaggtttaggcccagggacgg

SEQ ID NO: 406 - DNA, 496 bp, Homo sapiens
  SITE (439): n equals a,t,g, or c
  SITE (465): n equals a,t,g, or c
ctgggtgacagagtgagactctgtcccccccaaaaaaattaaattaaattaaaaaaataaaatcagctctaactctcaactagttcctgcagcattctacttattgattttccttttaacttattatctacatatgtttacctttatggtttgtagtttatcaagtggggaagatcatagtgacacaagataaatttactgattacaggcgtgagcactgcacccaggaccaggtcattcctcatacctccaattcttaagagttattgtcagtctcaagtaggcacattggaagtatcttttgcttgagtgatctgaaacctgaaaatttattatttttttttcttttttagacagagtctcactgtcacccacgctggggtgcagtggcgtgatctcgactcactgcaaccttctcctactgggttaaagtgattcncatatcttcagccctccaagtggctnagacaggcatgttcccaccacaacccggtgg

SEQ ID NO: 407 - DNA, 530 bp, Homo sapiens
  SITE (530): n equals a,t,g, or c
aaaaggtcctcacaggtgtctccatacttcgccaaggttgtagcatgggcagtttcagtttcagcctaagagactggtgacatccacaaatgcagttttagaagcagaaaaggtcttggtgcctctgcagtacttgatgtattggggtcaaatctctacaaatttttctgtggtgatagcaaaatcaagagatggcttacaaaaagaaatattgatttttatttttgaagtttttgttttttaaaaggttgggggtgttcagccactgagggacaaaacttagcatctaatttcaattatagtgtcatgcagagtatttctaaagtaattggttatcatgggaaagtattctcttttcaagaagttctttgattctgtaataactagaacaaataaagtagtaaaagaagaaatagttctgtgactaggaaaaaattgcttttgagagaacatagatcaattatactacttctaaggtagctgcagataagtggccttgacacattacaagcctggaaaaaaacatcagn

SEQ ID NO: 408 - DNA, 681 bp, Homo sapiens
  SITE (643): n equals a,t,g, or c
  SITE (676): n equals a,t,g, or c
gtcgacgagatttggagggaggaaaggaattggaagaggaagaggagaaggcaggagatcccacgcagtttagtcaaatggtggtacacaaccgaactggatggtattttcttctgcgtgtgagttgtgaagactttttatgagatcttaggagaagaggtgggtgtagtactgggagtaagtgtcacaaattagagtaaacaggaatgagtctggtcaaagaacatatttctgacttccgggttcaaattttaattatgccagaatccctgagctgcaaaaagttgccttcttggggagtcaaagcttttaaacaaatgaactggaacctcagcgcccactgagctatgcagaagagtcctagaagccagcgctccatgcttgccactcattgtcctgtgaaacttgggccacaggatattttccacaccagtgaaaagacatgtatcataccgaattgtgccctttgatatcctgccgaaaaggccaagatgcaatagtccgtgtgacagcttatccctgagtcctgttacattaaatcggggcataattcaggcaaaggacgtttccttaggtgtttatggaatggccgcggagctgttcaggggctggggtatttgtggaaggccttgtttcattgggngggagctggattgaggttggaaatttcacggtncggtt

SEQ ID NO: 409 - DNA, 428 bp, Homo sapiens
  SITE (2): n equals a,t,g, or c
  SITE (6): n equals a,t,g, or c
cnggcntacttaggtattagttatccataatggtgcaacaatattaccacaaacagttgcttgaaacaacacgcatttattatctcaccatttctgtgtgtcaggaatgtatgtgtagcagagttgggttctctgcttaagggtctcacaaagctccactcaaggtattggccagagaggtggtttcatcttagactcaatgggcgatggatctgcttgcagacttacacagttggcagaattcagttcctgtaggctgctggacacagggcttcagtttcttgctggctgttagcttgagtctgctctcagcttattgccctgtggccctctccatatggcagctcacagcattgcagcttgtttcttcaaagccagtaaggaagatagkcytcttcaagacaggcattatagctttatgtaatgta

SEQ ID NO: 410 - DNA, 329 bp, Homo sapiens
  SITE (127): n equals a,t,g, or c
  SITE (129): n equals a,t,g, or c
  SITE (328): n equals a,t,g, or c
agggaaagggggttttcccgaagggcccatggatttgtacaggctgccctttgtgctacacgaagtcctttaatcaatttactcttctcagaacccctgcgaggtaggtgtcacccacccccatgtncnacgagcacacagctgctcagtaaatagtggggctggaattcggaagtccacggtcatccctcagcatcaggggcccttggwtcagggcaaggggcacaagaggctcacaagcacgagagactgaaggaaagcaagaactgcctttcctaaaactgatctaaagacagcgcctgctgacaggaggtcacggctgtgtttnc

SEQ ID NO: 411 - DNA, 543 bp, Homo sapiens
aaaatgaggtctgttttctagttagagaagattgatctattcaaaggactttaaattttgttgattcactttgggtgcatccatgtraaggtttgagttttgaatcatcatgattttwagccagtaaaagtgttctgggttttagcttcacccacatggacctcaactcgctatttagaagtctactgcccttcaggtgggttgccaacagactctgcctttgctgtacctgggagaatggcttcctcatcaccacattctgcatccttccaagatggcagtgaagatcttcccagggcatctggcattagcagaatgcggctgatgaggaaatatgaccccagtttaggccgttttaccagaatattacacaaattacaaaataacttgatagctagaagagaggattttgaatgtttttactacaaagaaatgattaatgtttgaggtggtggatttgttaattaccctgatttgatccttgtacaatgtatatcaaacatctcattgtacaccagaaatatgtataattttgtgtcaatt

SEQ ID NO: 412 - DNA, 433 bp, Homo sapiens
  SITE (8): n equals a,t,g, or c
  SITE (19): n equals a,t,g, or c
  SITE (94): n equals a,t,g, or c
agtgattncctgatttagnatcattagtttgatgactagttttattatgtgagtgtgataaaaggttacgcttagtatacaaagaccttcttanaagtctagttaataaaactagggccatgtgttactacaacataggagttaactttgtctggaggctttttcaagcccaagaggttgtcatttctttatgtgtaagatactgcccacatactatactgaagtcaggaaccaagaacggtcaatttacctcagccaagttgcttggactgctttgcttaataatgggtttgccatatctactttaatgagatgtgtggcatggtgatggttacaaaagtgatttgttaattattscctggtargaaggaraacatgttttttttgaacctatgcaaataccacatgtctgttaaaaaataaagggatactt

SEQ ID NO: 413 - DNA, 475 bp, Homo sapiens
  SITE (6): n equals a,t,g, or c
  SITE (27): n equals a,t,g, or c
  SITE (125): n equals a,t,g, or c
  SITE (138): n equals a,t,g, or c
ctaaangctcccctccctgcccccagnccaagccccctccctccccaaccaatttccccccagaaaaattttgttgtggaaaaataacacattcaacaaaatgtgtttcctttccctcaacaccnaagcatattcccnacacaagaagacagattctggaatgaacctcatggatgactcatgcccattatctggctgtttataggagctgcctttagacaaagatttggtcataagctacgttaagaccccttcattgtctgccagttgcccttgcaggggatggcttatggcttatcgatggagtcctgagtgggagtgggaagggacttctagactaaaasctgcttttgacttcacttttgtccatcaactgtggaccctgttccattgtctctgaactctggaggcaccttctgcttgatgtcagcaagcaggcctggtccaagatggcagctgcactgtatcggaaggg

SEQ ID NO: 414 - DNA, 614 bp, Homo sapiens
  SITE (71): n equals a,t,g, or c
  SITE (138): n equals a,t,g, or c
ggtttcctcctgacagctccattcttttgaagcctgacccttcctaagctctgcatcataaccactctganaattgccccattgggtgggcatgtgaagcccagctctgttccatccaggtgcctcgggcctgaggantctgaggatctgacttgggtcttggaagggttccaaccccaagtcagtcaggaagctgcccatttttttgcaaggcawtttaatgccctttcccaracctctctagtccctcctgccttctgttctctgtagctgtgagccctttgtgagaatatgactcttaattttgaatcttatgtaagaggcttgagatgtgctggagagggcaggaagaggaaagtatcaggccttgagagagggaatgtagctttgcttctatgatctggagtcaccttcacttgctagctgagtcctaacacaacttccaagtccatgattctcttggggcattggatgggctcagtgtgggtctcttargctgttcttgtgacttcatcatttcctggttcaaagttgtactgtcaaggggcagcatttctggtatttctataataaatttttctgtgatctcaaaaaaaaaaaaaaaaaaaaaaaaa

SEQ ID NO: 415 - DNA, 423 bp, Homo sapiens
  SITE (190): n equals a,t,g, or c
  SITE (393): n equals a,t,g, or c
gtccttctgcacattgacgtggcagccgccagacaggtgtgtctcggtttctccaagtcaacagcgcctggaggtaggatccacacacagcacggccctcccagaggccatgtgagggccccttgggggcgggggacagggcgatgtgggggccctgggcaggaccaccagctctcatcccacaggtacnacaagagggaggatgtgcagccggggacaggcatgctggcatacacacacatcctcatggaggcggcccctgggctcctggccctctacagggacacacaccgggtcctggccagcgtcgtggggaccacaggtgtgagtctgaacctgacccaactgccccccttcaacgtccacctgcagacaaagctggtgcttctgganaagctcccccggccgtcctgaaggggacca

SEQ ID NO: 416 - DNA, 456 bp, Homo sapiens
  SITE (381): n equals a,t,g, or c
  SITE (401): n equals a,t,g, or c
  SITE (444): n equals a,t,g, or c
cccactgtgcccatcaaaggacagccaacacttgtgcagatggagacttctgctacaactccttattgttaattaacccctttgcaggccataagcatgttcacttgaaagagtgtagcattagctcctgctgggcagagttgtgatggggttgagctgattgcacagcaggaacaggttataattctgataacctttttaaaaagcctttttattggggatcttaaataaaattgtaactcgctacacttgatctttcccatttttcttgtttttcgttttttttaaaacactgartgcttttctttgtaaaaaaaaaaaaaattcaagaatgacagctgggaaatagaactactgcaaatggaaatgaaaggttgggtntgttcaattttttgtctgtntgtttccccactggaaaccctgctaccattgtcccttccattntcccctccccag

SEQ ID NO: 417 - DNA, 531 bp, Homo sapiens
  SITE (30): n equals a,t,g, or c
ggacaggcatgagccactgtacctggatcnagatcctcctattttaagatgtgtggtggtactcttctggmagaaaatcctaaatataataatagagatttatacmttagtgaactcttattaagtaatttgtagcattacaaaagaattagtggttttataaaaggtttcaaattttctgtaaacattgaagtctcaatacatattaagttatttgatttggctgcgtattttccagaccatttctaaggcatactttgactctaaaattctcttttgtaagtgattagtcactgcatgttctcctcatattatttcctcatcctactttcctttaaaaaaaaaaaaaagctttctctcttaaaatccatgttacgggattcaaagcttctgaaatccaccatgcccaactataatatacaatttaaaattcacattaaatttcattgggaatattctttataggctgtgatgaaattaaaatcttacatactcctccatttatcatctggaacaatatctctggtgaac

SEQ ID NO: 418 - DNA, 519 bp, Homo sapiens
aaatatggaacaacaaatcttcacttagatgtatctgatgcagctaatgtcatggtctatgtgggaattcccaaaggacagtgtgagcaagaagaaggtagggtgctgagcataaaaggagggcttactctttgagccagggcttgtggtctgatatctgctttctcttcttgctctagaagtccttaagaccatccaagatggagattctgacgaactcacaataaagcgatttattgaaggaaaagagaagccaggagcactgtggcacatatatgctgcaaaggacacggaraagataagggaatttcttaaaaaggtatcagaagagcaaggtcaagaaaacccagcagaccacgatcctattcatgatcaaagctggtatttagaccgatcattaagaaaatgtcttcatcaagagtatgggagttcaaggctgggctattgtacagtttcttggggatgtggtgtttatcccggcmggagcttccacattcaggttycataacttattttagc

SEQ ID NO: 419 - DNA, 352 bp, Homo sapiens
  SITE (309): n equals a,t,g, or c
  SITE (310): n equals a,t,g, or c
  SITE (350): n equals a,t,g, or c
ctcggcctcccaaagtgccgggatgacagctgtgagccaccgcgccccgcccagaagcagaggtgttttaacgggaagacttcaggcttcatcggacggccgggaaggaatcagagcaggggtttcttccgagatggccagtggtcacctgagatggagcagagagcacctgtggcgggcatcttctctagaagccgcctgtgagccctacggaggccctgggcttcgtgccgtaagacagacggtgtcctgcagcctgcagcactggggcacactcaacttgcttttccaggttttgtagcccggganncctgggggccctgccgcaaagccccaggtgaagttagcangg

SEQ ID NO: 420 - DNA, 456 bp, Homo sapiens
  SITE (313): n equals a,t,g, or c
  SITE (388): n equals a,t,g, or c
  SITE (428): n equals a,t,g, or c
  SITE (452): n equals a,t,g, or c
tttaaacttgaagtgagatatccctttcagataaatttgaatttaaaagataaatttcgaggcttctttttactccctttcaattttataattgaatattaaggaggaaattgtctgtagttgtcagccatttttctgtggtcataaactcttcagrkactatcctctatacaatttttgccatctgctctgctagtgaccattacccaccccattactaaaaatcacacacataacattccattacataccctaaaacaagtgcaaggactaggcagaccccagacttactcttggcttcttgttttagggnttgattttctttattttgttatgggggtttttttttgtttttgttttttgttttttttttgtgccgggagggtgnaggtgggggtccggaaattgggcggggttgccttttccgnttacggcccaggtggtcaagggcngggc

SEQ ID NO: 421 - DNA, 550 bp, Homo sapiens
cttgagtctccccgaggcctgtgcgtctcccaaacacgcagctcaaggtccacatccacaaaagccgcctcgccttcagcctcctcagcattcagtttgtcaatgaagtgatgaaagcttagagccagtatttatactttgtggttaaaatacttgattcccccttgtttgttttacaaaaacagatgtttcctagaaaaatgacaaatagtaaaatgaacaaaaccctacgaaagaatggcaacagccagggtggccgggccctgccagtgggcggcgtgtgctagcaaggcctgccgggtgtgccgcagtcaccacagggttctgagaacatttcacagaagtgcctgagacgcggagacatggctggtgttaaatggagctattcaatagcagtgacgcgctctcctcagccaccaaatgtccctgacaccctccccagcccccacagataacatcagctgaggtttttttcagtatgaacctgtcctaaatcaattcctcaaagtgtgcacaaaactaaagaatataaataaacaaaagaaaggtg

SEQ ID NO: 422 - DNA, 880 bp, Homo sapiens
gctgtgtgtcttaaactgcattggagtttgtcactgctaataccctagtccaagccaccatcatccctcaatctcatatttcctctctgctatcactctcccctctctacacccacgatccagtctattcatggaagctactatgaaaaagatatactgcatcatttcctaggccttctcccttgytccckggctctagcaacactggggaccctcattgctgtctgaggctctctgctcttgccattgcccctgtctggaaagctctttatccagatgttacttaagcagttcctttttgtcattcgcttctctgctcaaatgtcacttcaaagagcctgcttctgaacagcctgctctgagaataaggggaagaagcagatggagatttctgggtttttttgtaataaatgctattaataaatacttatggtactatctgactaaactgcagatatttatcactttggtaaatgtttacatttaaaccaaatttaagaagagaaatgtttaaaaaactacacccacatccattgtcactttttgtctatcacctggggcytcaaggctttatcattaycygaaattayctcatttatttatttgkttattcatttattgtctatgtccactcctgtagaatgtaatcctcccatggcagcagggactttgtataacaatctagttcattgccatatgcctagggactataacatagaagctgttcaattaattgttaatcaatgaataactgtaataagatacttgagaatggttgtctttttgttaggaaaagactaagtactataatcgcaatgtctacataattttaaaaatattcactcctgagtaataaattatttgtggttaaaaaaaaaaa

SEQ ID NO: 423 - DNA, 383 bp, Homo sapiens
  SITE (334): n equals a,t,g, or c
  SITE (344): n equals a,t,g, or c
  SITE (360): n equals a,t,g, or c
aagtaacccccggcctatagttgagagactctttggagtcaggtgtggactaaatgttgtattstcttaygatgtttaatgtggttttttgtaagactaaagactccagaattctgttacagagttgtttgctgatttgtttcttttgtgtaagtgcccttttcatttctagatcatggttactctaacatcgttcctcaaatatatgcatttcatggagttaaatgaaatacagactttaggacaattaaacagactaatggaaaaacttggcaaagtttttttaagtgggtcctaaattattagctagaattcagaaatttgggttcggcgnctttaatttnaaaattaagaagagancatgggctggcctctttaacata

SEQ ID NO: 424 - DNA, 554 bp, Homo sapiens
gattcaaacactactttatatatttaatgaatacacgtccaaataaagatctctcttcaaaaattttggaaaatgttaatgcattttgaatataatggaacaaagaagaagaatactagagaaaattcacaattatgatgtttatttaggaaaataaacttgaagaaggttttctattaaaaaaacataagaatcatatccaaattttagactctccatcttctttggtatgaaaatcaacattcataatagaaaatattttcttttgaaaggtttagttgttattgggtctataacggttttccatataaggaaaatacagtattaagttatctgtaatcatctcacttattgaacaaccaatgaatgcatgcmagtaaccaagcatatgtgtgcagagaccagcatcaaggaaatattcattcatagataaatgttttctaataaaatatattttaagtttttaatgatcttctgctatcattttttgccatgttatctgaatagccatccagatctgtagtaaaacatcctgttagttacataactcaaga

SEQ ID NO: 425 - DNA, 522 bp, Homo sapiens
  SITE (27): n equals a,t,g, or c
  SITE (56): n equals a,t,g, or c
  SITE (69): n equals a,t,g, or c
  SITE (384): n equals a,t,g, or c
  SITE (447): n equals a,t,g, or c
  SITE (490): n equals a,t,g, or c
  SITE (507): n equals a,t,g, or c
gccacctaccccttaggggcctaaganagtgtgtcccaaagaatgaagtccccccnatttcccctaccnaccacccccagggctgagattcataccctggttagaaagggctcagttgtggctcactgaatggcagagtaattgctgatgtgcttctctggggaagcgtgctgaaaggcttttcatgagaggtgtcactctgctacaaaactactcagatgaggtgctgagggaagctgctggtctctgagctcacttatatgtcagaacctggctttgaggaactgggtgctgtgggagcctgctgaaaaacacacaggaacaggaagtaaaaatctctccattgttctccgctggcagaagttaccatgccagctgtcaaangaaaagttttaaatgtcccaggcacattttgctccaacaggcagaagggatgactttgtgacntaagaaccggaacccagcaccaggggtccaaccgttgtccagntaactggccaataatancccttccagaacaaa

SEQ ID NO: 426 - DNA, 405 bp, Homo sapiens
aaaaaaaaaaaaagatacagtagtccatggtgagatgttgcaaaattattcaaaatattgccatgggatacccttaattgggaacctatagaagcacagattctgacataacaagtatttgctacttccaagcactgcagtcaactaatggatataatgggatgggctggttgctcctaactgtgctggagaaggtgggaaagaaaaagatkagctcagctccacaccgaaggacctgcaagcttctatcttggcccagaagaagcccttattccctgtagctgcagragtaaaattgctgaacaccatgcctagagtttaatcctgtggagcagctgaattacaacagaaattaaattcacaactgatgttattaaactttgtccacttggccagtccctatcc

SEQ ID NO: 427 - DNA, 676 bp, Homo sapiens
  SITE (22): n equals a,t,g, or c
  SITE (30): n equals a,t,g, or c
  SITE (594): n equals a,t,g, or c
  SITE (595): n equals a,t,g, or c
  SITE (596): n equals a,t,g, or c
  SITE (598): n equals a,t,g, or c
aaaaatctctgtcagggtaccnggggaaantccttaaatgtgaaccatttccatgaacccctcactactgtccagtggtggcgatgctatttattaaccacatttttcaaaatggagagaatggggagtttatagggcctaaagatcagatgccatcccccagacggcctgccttgatgccagtttcctgttgccacccccaccccctcctgttccagtctaggccaggtgcccttcatccgtgtttctgtggccccttgtgtttattgcagtcacaatactgaatctcgtttcttgtctgtgtcccgtaccatgctggacataaacttcttgagaggaaggactgtcttatttatctttgagttccctgtgtcagactcaatgcctggcacatggttgtttgagaagagttcatggaacgcatttaagaaatacattaggatctatattaagattctaattaagaccgagttgagtgtttatcgagttaaaaaaaaaacccttgaggaagaaaagttttatattttataaatttctaaggcaaattatatggtttacgcaggccttttactagattatttagttcttttgtgnnntnttttttttgagatggagttttgctcttgttgcccaggctggagtgcaatggcatgatcttggctcaggcaacctccaa

SEQ ID NO: 428 - DNA, 679 bp, Homo sapiens
  SITE (551): n equals a,t,g, or c
  SITE (601): n equals a,t,g, or c
ccagatggaagagcatgtgatttcgcatgctgcagtgggactgcgcaggataaagtcttcaacataagagctaaggtggaggctctagagggcgtaatgacaatggccataaaataagaggtttgggctaaatccctgaggtcccaagtcctaaccctgcatgagccaggtgccacttctagccctcctgttcctcctccctgtcatttttgctgtaattcttttgttggccacctgcaagtaggtgtccttggcactcctgctgtctgccctgctgtggtgagtgtgagccgggttgctcgtgcccctctctgagcctcagcttctgctcctccttgggctaaatcctgccccctcatgcccaaactatattgttaaggtcttatacactcttcaaagtccagattcaaaggcaccaacttatcctcattcagaaggactctctgccctcctgagtctccaagatgctttgtgtacacctgatggcaccaaaacatccactctacagcacgctcatctgcctccttcacgggatggcatattccagggangctgcttctctttataatttgaatccctagtctggaacaaaggtgcttangagatattggtgcataagatggaaatcaatacaatgataccaaaagcaatgatggaacaaagcaatcagtgtaagtag

SEQ ID NO: 429 - DNA, 465 bp, Homo sapiens
ggcaagtggatcacttgaggtcaggcgtttgagaccagcctggccaacatggtgaaatctcaactctactaaaaatacaaaaagtagctgggcatggtggtgcacacctgtattcccagctactcgggaggctgaggcaagaaaattgcttgaacctgggaagtgggttcaagagacaagattgcaccactgcactccagcctgggcaactgagcgaggctccatctcaaaaaaagcagtttgaggccactaagtatggtactctccagggctttaacatattagtatccaaaggcagattataggagtgttcattaattctcctgtgtacctttggacaacttaaactccctgttcctccattgcctcatcttyaaaattagaaactatactaaattgtttataaagggaatattctgagatcctatgttcctagtaaaaccctgagtattaagaaaagttcag

SEQ ID NO: 430 - DNA, 438 bp, Homo sapiens
  SITE (431): n equals a,t,g, or c
gcggacgcgtgggtgccacctttatttactctctctttctacccccaaccccagttgctatgtttcagtccaatgcagttattgttttctgtgatgttcaaattgtctcatatttgggcagcaaggagccctttcagattggctcataagtcctttccacatgcctcagtagtgcttggtaactttcttgcttgtaggattaactttgtaaaattttgttcaggagttctgccctctgtgttcattaattaaattccacacactgccccccaccctcacctgggttttttgtttttgtttttgtttttgttttgagatgaggtcttcctgtgttgcccgggctggccttaagkgatcctgctyarcctctcaagtacgtgggactataggtgtgtgtgcacaactggtgttcagctaaacgtttttttctnaaagcgg

SEQ ID NO: 431 - DNA, 350 bp, Homo sapiens
  SITE (6): n equals a,t,g, or c
  SITE (22): n equals a,t,g, or c
agccgnagattgtcccccaccngcacctcccagccctaggtgaccagaggcccagaccccgtccttaaaaaaaaaagttctgtgtgaaatggtttttcaagtagcgctttgtcctactttccccatcttaaaagaaattggcttatgtatagtgattagagatggattttcatcatagatacaaactacctgaggaagtaaaactgtcacacacagacatcaaaactgtgagtgagaggagttcactgcagtgtgcagtagacagggaatgcttccccagaattacaaagttgtcagttatcccttgctaataaatccagtgtgtatttttcattcatcttgttaaaaat

SEQ ID NO: 432 - DNA, 537 bp, Homo sapiens
  SITE (210): n equals a,t,g, or c
  SITE (211): n equals a,t,g, or c
  SITE (511): n equals a,t,g, or c
  SITE (516): n equals a,t,g, or c
  SITE (533): n equals a,t,g, or c
tcaatttaatttaattttaatccaatttaaacttaaatagacacatagagcaagtggctgctgtcttggataactcagatgaggcttcaaactgcaaactcttttgtggtttgagactagcatgttcttaagcattctcatgtgcagaagaaaatgggtaatggttctgtctgaaatcttgaatggtattttaaagtgtgtaagtgaatnnccaagtacagaattgattcatggataccttttaataataaattattttaagcaacataaatgcttatcattagtcagactatctttctctaaacattctccttattcagttgtattacagtgttctatttatctgtgaatggcagtcccactcaactataaactatctgtatcttaacacccagaacaaatctaggcactcagttggcttctcagtggttttttgtttggaatcccgtgtcctctgatgtatttgcactattttgctttattatttaacttcttacttatgttttttgtncccgncagtagtaatcacggcnggag

SEQ ID NO: 433 - DNA, 455 bp, Homo sapiens
  SITE (1): n equals a,t,g, or c
  SITE (263): n equals a,t,g, or c
  SITE (419): n equals a,t,g, or c
  SITE (438): n equals a,t,g, or c
nttcggcacrgagctgagatagaataaagttgcaagacagaaccatccatttttggataaggtggtcagaatgagagagaaaacaataacaaagtcagatgtcttcttaactgtgaaaaatatatgtaaaaaatgagcattcataaacttagatttaaggtatggttagatcaggcttattctccttcaggaaaagcaaagtacagatatgcctattagtttaagaattaagatttttaaaaagcaatgggaggctggtcacntggctcgtgtctataatcccagcactttggggagaccaaggccaggtagactacttgtgccccggagttgagaccagcctggggcaacatgggcaaaatcccatctcttacaaaaaaaatacaaatattagctgggtgtgctggcacggcttttanttccgggctactgggaggngaggcaggagatcactg

SEQ ID NO: 434 - DNA, 471 bp, Homo sapiens
aatacattgtccagtaaagtaaaagaacttaaacattcaaacaaactggaaataacagacatcaaactggagacagcaagagctaagagtgagctagaaagagaaaggaataagattcaaagtgaactggatggattacagtcagacaatgaaattctcaaagcagctgttgaacatcacaaagtgctcttagtagaaaaggatcgtgaattaatacgtaaagtacaagctgccaaagaagaaggttatcaaaaacttgtggtattacaagatgaaaagttagaactcgagaacagattagcagatttggagaaaatgaaagtggaacatgatgtctggaggccatctgaaaaggatcagtatgaagaggaattgcgggcttcacagatggccagaagagatcaccaggaaggagcttcagagtggttaggttaaaacttcagccaccaaattgtgaccaattgaaaatgc

SEQ ID NO: 435 - DNA, 401 bp, Homo sapiens
  SITE (138): n equals a,t,g, or c
  SITE (141): n equals a,t,g, or c
  SITE (374): n equals a,t,g, or c
  SITE (379): n equals a,t,g, or c
tgccaaattccaaaattgtgtatagttctatagttgtctggtggagtcaatggaactttagttaccagtctaagaatgtgtctttgagattgtccagttaattctctatttccagtagctgtaataaatggtgaaaanggntttctgactcctggagaaagtttctaactccttatgactaatattcataacagacttgtgagttccttgaacatggatacacctatatgcaagagtgtattccaaagctaactcagtgatctttccatttatctattcttggattagtggtgcctttgctctttccttctgtaaatgtgaatagttaagagttgactgcagaagtgkttacactttgggcttccatggcctcngggantgttttgtggctttggggggtg

SEQ ID NO: 436 - DNA, 451 bp, Homo sapiens
  SITE (26): n equals a,t,g, or c
  SITE (351): n equals a,t,g, or c
ctgcatttttgtttttcacctattgnggtataatttgcatatgataaaataagcccatttctgtgtgtaatttaatgactgttagtaaatttgccaagttgtacacccatagtgcctcctcttcttcctaataccatctcatttctctgtttttggcaccccagtgttcgattgcatcgaggtctatgcccctggttcaaggactctgtggttggcagagacatcctcacaccaccagatttggagagaatcttcgggcttcctggagggaacatattccactgcgccatgtccctggaccagctctacttcacccgccccgtgcccctgcattctggctaccgctgcccnctccagggcctgtatctctgtggaagtggggctcatcctggaaggaggtgtgatgggagctgctgggcgaaatgcagcacatgtggcctttagggacccc

SEQ ID NO: 437 - DNA, 518 bp, Homo sapiens
  SITE (399): n equals a,t,g, or c
  SITE (510): n equals a,t,g, or c
  SITE (518): n equals a,t,g, or c
gaaataatattgtttgtattaaggtaactgtgttactcctactgcatccaaagctcactaatctctgaggttttaggagatttatctactctcctctaattggtagggttgactttcccaggacattgctaaggttagcccctgaaggcaataatatttaaaaaaataaaaaataaaggattccacatagctccaaaagtcaggtaaaagctggagggaattagagatagcaaggaaagatcaaggattaacttgcaagctctattttctctaatatctggatctaggaaaattgtctaccgccttgtctgctggatcactcatcacctacgcattttataaaaggctacccaaaaagraattgttaacaaggaatgttaacaagcctttaaaagctantaaacaacagactgtggtgtttgctttcagttactcctgggcaagcagaagtaagagcgtaggtgcattcaacttcctaggtggctgttaggggaacacctccttacagtnaagccttn

SEQ ID NO: 438 - DNA, 362 bp, Homo sapiens
  SITE (317): n equals a,t,g, or c
  SITE (338): n equals a,t,g, or c
  SITE (361): n equals a,t,g, or c
tgacaattctgggctccagagcatggttccaatggatggcacatagagaactcaaagtcatccatggcaaccacctcatgagatttgaaaagtatgtatgaaaaggaaactgagwttttaagactacataattcctagaatttaaactgaatccttggaagagtattttgctttgtttgatttttgtgccaaaggaaaagatttcaaagatgcaggtgcctccaaactgaggttctatcattggatcaccatcaagagtattaaattgatggggaaacaaactgggaaatagtcatctcttttaaaaagccaacttntttttgacaagggaatatccnatgagtttaattaaaacatccgnt

SEQ ID NO: 439 - DNA, 280 bp, Homo sapiens
  SITE (261): n equals a,t,g, or c
  SITE (276): n equals a,t,g, or c
gaaggccagaatttgaagctgtaggaagagtttcttcaactccagattttttttaaaagakcactcctctaaatcacctgaaatgttacaaggtagtggaacagaactgtgaatgtttttaaaaactgacaaacaggtatttttaaatcaaagaataatttagaaatgtatggatattaaataccaacattattatgcaaatgctcttagttataaccttaaaataggcagcttattaccttttttaacaaacaaattcanatatactacttattntgtg

SEQ ID NO: 440 - DNA, 607 bp, Homo sapiens
gggcaaacgaaataaagaaactgaggaagaactatgagtgaaggaataaaatacataaacatgaatatatcttcataggtatatacaccttatcaaacactatatttttgtagcttctaagtcacctttcccaactttttaattcacatatatgattgagaaaggcactttgtgaatatattttctttaaagatataaaataataccttaaaatgatacagcagagtcaatacgttatacggtagattctaatctggtatggttaggagagctgttatttcaccaaatcaggcatggaaaatcagtaaatagacaagaatgtgatactagtatcaaagcgttgtctgtatatgaagccttaaaagcaaaaaaaccccataccctgaaaaaaacaaaagtattaataagcttgttttaaaacaactgatttcccagacccacctaacatgcaaagacaagaggaacattcctcactcagtcagaatctacactgaaacttatgtgaatgaacttgacccgggctggcagcaatccagcaatcttcgtcactgaatgacttaacagaacactgtgttcttgggcaaaagcacaaaaaatgtgttgagat

SEQ ID NO: 441 - DNA, 517 bp, Homo sapiens
gccagaactctcggatactgtgttctgtccttgaaacggtggaagattttatgtgaccagaatggaatgtttgaacaaatattttgagaatagaattttaaaacatttactcatcagcatccaagggtggggagcagtgtcatctaggagactggttctattatttacgtagatgttcttgaattaaaggatgggaatattttttccttccaaaactttttttcaattttatattctgtttttcaagtttttattatgaaaatattcaaactcacagggaagttgaaagactaatacaaagaagaaccatactctttccactgacatgatccaacgaggaatattttgccacacggcaaatatataccgtataattttctgtaccacttgatagaaaggtaaagaatgaatattgttttttaaataacttttttcgtatataagtaatatgtgcttatcgtgtaactacctaaaaacattgaaaaataaaaggaaaataaaattcatacataaccgc

SEQ ID NO: 442 - DNA, 769 bp, Homo sapiens
  SITE (631): n equals a,t,g, or c
gtattgtgccacgcatagtctctcatatatcatctatcagctcatcaaaaagtgctcactgattaacagaggatcccctcctcagtttcagaattctctagctttaagttaggggagggttaccccaaagtcagagagggtacatgggagagggttgtgaaggccagtagcccagagaaaatcaagggcagctgggtgcatttaggtggataagaaaacaatgaattactccatcaaaagcaaaagcacaagcacataggaaagttgatcacctactgttaatgtcaattcagtttaaagcactttattaaccacacatacatattttccagtgtctaattctcatcgtgttcttttccattccagacttscctgtcyctttcccagagctctgttcctcttctcactgtttctacaaaagggacaataaacaattttctagccactcatcatcataaaccctgacatgctaaattatcccctgctcagtttatggaccacagtgggcccataaaactcctccctcactagcaacccaccccacacaaaattctcacttccctttttccttgcgcttcctaaaaaaagcaattgagccacacccactacctcctgtgctaggggtttgtcncctaatcctgggacactagggagctccttacctggaaggcagttgcactcaaaagtgaagtcaccagtctgccgacaggtgcctccattgacacaaggcgagggtgcacagggcacatacaggctgtcacagtactgg

SEQ ID NO: 443 - DNA, 463 bp, Homo sapiens
  SITE (438): n equals a,t,g, or c
  SITE (441): n equals a,t,g, or c
  SITE (445): n equals a,t,g, or c
  SITE (454): n equals a,t,g, or c
ctagttctagatcgcgagcggcccgccctttttttttttttttttgggttaaaagatggttgtagcatttaaaatggaaaattttctccttggtttgctagtatcttgggtgtattctctgtaagtgtagctcaaataggtcatcatgaaaggttaaaaaagcgaggtggccatgttatgctggtggttaaggccagggcctctccaaccactgtgccactgacttgctgtgtgaccctgggcaagtcacttaactataaggtgcctcagttttccttctgttaaaatggggataataatactgacctacctcaaagggcagttttgaggcatgactaatgcttattagaaagcattttggggatccttcagcacaggaattctcaagacctgagtatttgttataataggaatgtccaccatgaacttgatacgtcngtntgtnccagatgcngtcattagt

SEQ ID NO: 444 - DNA, 228 bp, Homo sapiens
ctagttctagatcgcgagcggccgctctagaggatccaagcttacgtacgcgtgcatgcgacgtcatagctcttctatagtgtcacctaaattcaattcactggccgtcgttttacaacgtcgtgactgggaaaaccctggcgttacccaacttaatcgccttgcagcacatccccctttcgccagctggcgtaatagcgaagaggcccgcaccgatcgcccttccca

SEQ ID NO: 445 - DNA, 305 bp, Homo sapiens
  SITE (211): n equals a,t,g, or c
  SITE (240): n equals a,t,g, or c
agggtcgacccagagtcgaagrccaagcatggtggmtcamtcctgtaatcccagcactttgagaggccgaggcaggtggattgcctgagtccaggagttccagaccagcctggacaacatggtgaaatcccgtctctatttaaaatgcaagaaattagctgggtgtggtggtgtgcacctatagtcctagctactcgggaggctgaggtgngagaatcacccaagccttgggaggtcgangctgtagtgagccaaaatcacatcactgcactccagtctgggcagccagagtgagaccctgtctc

SEQ ID NO: 446 - DNA, 460 bp, Homo sapiens
  SITE (360): n equals a,t,g, or c
  SITE (413): n equals a,t,g, or c
gggcagagatggacgccaccctgggacacaacctcccagccccatttctgttctgtgcacagacgcagtttgctgttttggtttttacaaaaatggggtcacgccatacatgcattttgaactccatttagaaaaacaaaagtaacaatagattgtgaacattctcccatcggtaaatacaattctactagaatacaaccagcaatcttgatgacatgttttctgcatttttttcctttcagggagaacactttcagtcgaaggagcctgggacccttgacacagaagtgacatgtgcattcggaacctctctgtggaaaacacagacccttcatgacacgcaaactcgaagccggtgangccgagtctcagggctgcgccaaccaggaagcctggctgtccaatgttccaantctggatgtgaatggaccatgcagacaggacccaagggcatggggga

SEQ ID NO: 447 - DNA, 487 bp, Homo sapiens
  SITE (110): n equals a,t,g, or c
gatgctttccttttcattctattattgaattttggttttccatgtgttacttttgtgtactctccccttatttcaacaaagcattaattaaatatttgagtacctattcngtatagtgacttgaaactagatctttagagatacaaggttgaataaaatacagaccctatcatcaaggataattctagtgacaattatatttcacattatttctgtcaggtcttgataatattttaatcacaggaaccaccatagcagtccagactcattttattatttatcatctctcagtaactgctccgacagtggcaacaaagggtattgaatacttatatttcaaattttaaaatttatgataatttggagggaggtgaaaaaaccttactaggaaagacaaacattcattattctacgtgtgtgtgagctcatgtctcttactcttrgcatcckgggaattaagtacagccctctgtgtaggtgttccctt

SEQ ID NO: 448 - DNA, 452 bp, Homo sapiens
gtcccacagaacacaatatctctaggaatggatttgatatctggcctcccttcatctcaacctatttctgggaggacttggatttgggaatataaatactattaaaagcaaaaatctgaactttatattgaaactaaggatatctgtttttaagtaagtaaaagggatcactttcaaataaaacaatcctctgccttctgcacactgtaaggcgctataattaactggaattagaaagcatgcattatgaacagaatttccttggaattgagtcctgcgaagataggcatgggcctaaacataaaattagattttaggtataaagctgtcctcttctaagaaaataacctttaaagcagggtttcccaactgacactgttgacttctggaatggacatttctcttcttggggaggggcatcttgtgcattgcaggatattagcagcatcacc

SEQ ID NO: 449 - DNA, 440 bp, Homo sapiens
  SITE (351): n equals a,t,g, or c
  SITE (440): n equals a,t,g, or c
cccacgcgtccgtagagacaaggttttaccatgttggccagggtggtctcgaactcgtgacctcaaagtgatccaccgcacctggcctctttatttatttattgtttaattaaaaaaatatttattttatttttgtagagatgcgggtctcacaatgttgccaaggctaggttggtttttggcctcaagttatcctcctgccttggccttccaaagtgctgagattacaggtgtgagccactgtgcttctttgtctagtaagttttgatttgctactggatattgtaaatgtgatgatgttgggctctgggctttgtggtcttttgtaaagaatattgggtttggccaggnaccttggctcatgcctgtaactccggcactttgggaagccgaggcggacaggtcgcttgagccacgaatttgagcctaacctggggaan

SEQ ID NO: 450 - DNA, 460 bp, Homo sapiens
acatggtatggcttgttacttctgggctacaaacctgtacagcatatgcctgtactgaatactctaggcaattgtaacacagtggtaaatgtttgtgtatttaaacatatctaaatatagaaaaggtgcagtgaaaatatggccacataatcttacgggaccaccgttgtacatgccgtttgttgttgacactgttaatctataggtggcctcttagacctcagcattccctgtggaattcaacttagggccccaggagagctgcctgtctcccaaacaggacctggaaatgagttacaatgtattctctgagctatgcggttacctctaggagtgtcttgttgaaaatacggttttgctcaacacaggtaatgtgttgaaccacttataactaatttggtgccaatgtcgaatagtaaaaagaacctggaatgtgtaatggaaagtctggtttgagcgg

SEQ ID NO: 451 - DNA, 117 bp, Homo sapiens
  SITE (108): n equals a,t,g, or c
gataggcggccccttttttttttttttttttttttttttgagacagggtttmactctgtmacccaggctggagtgcagtggtgcaatcatagctcattgcagcattgnacctcctgg

SEQ ID NO: 452 - DNA, 386 bp, Homo sapiens
gttggaaaaagattaaccctttaaaaattaycttaattaacctagggtgtatttctaattaycttaatcaacctagggtgcgtactaaacagctactaattgtacatctagcctcaggtatcttttgcagcttagacattttccattggcaaattcagacaagggcgatcttaatcaggaatatgagggtaaaagaaaagccaactgtttatctttgaaaacatattatttcttgtttcagttttccatcctcaagtaggcgctagattgtaataagtaagcagaagaagttgtgttaatcckggaactctatgcagatckggaaggcaaatagagtgackgcaaagtaggacgttctttttattcaataaaatttagaaacagca

SEQ ID NO: 453 - DNA, 790 bp, Homo sapiens
gaatgatgatggaaaggaggaaccaccaaccacattactttgggtcmagtactacttggcacamcattatgacaaaattggtcagccatctattgctttggagtacataaatactgctattgaaagtacacctacattaatagaactctttctcgtgaaagctaaaatctataagcatgctggaaatattaaagaagctgcaaggtggatggatgaggcccaggccttggacacagcagacagatttatcaactccaaatgtgcaaaatacatgctaaaagccaacctgattaaagaagctgaagaaatgtgctcaaagtttacaagggaaggaacatcagcggtagagaatttgaatgaaatgcagtgcatgtggttccaaacagaatgtgcccaggcttataaagcaatgaataaatttggtgaagcacttaagaaatgtcatgagattgagagacattttatagaaatcactgatgaccagtttgactttcatacatactgtatgaggaagattacccttagatcatatgtggacttattaaaactagaagatgtacttcgacagcatccattttacttcaaggcagcaagaattgctatagagatctatttgaagcttcatgacaacccccttacagatgagaataaagaacacgaagctgatacagcaaacatgtctgacaaagagctaaagaagctacgtaataaacaaagaagagctcaaaagaaagcccagatagaagaagagaaaaaaaatgcagaaaaagaaaagcagcagagaaatcag

SEQ ID NO: 454 - DNA, 572 bp, Homo sapiens
  SITE (497): n equals a,t,g, or c
  SITE (518): n equals a,t,g, or c
  SITE (530): n equals a,t,g, or c
  SITE (549): n equals a,t,g, or c
ccaatgtcaaaaacaatgtaaattatactcctactgtaaaaggtcaactgatatggcacgtatgtaaaaaacctggcatacaggaaaaaattaatgcatgacagtctaatatattatsctgatacatggattaaattttctttccactaagtattaactatagttttaagcattgattctgcttaataactaaaatgtaaagaccttaccttgtagggttgtaatttctcattaacagaaatctgaacttatacaagtttaactgaaatttatctttatttcaagatatcagaagacatttacatatttgcattttctgtcttgctactatctgcgtatatgtaacagcttttctcaaggcttcaagataggaattgttttatgccttkgtatcacaggacctaagrggaccaaaattatttgraggatgggagtgggggrcaaaactargggtctctgcagtcctactccatgttaccatccattaggctcacctngtagggtattactaaagtccnggagagttaaanccaacgtggcaacttaatnttggcatttccaaaaattaaagg

SEQ ID NO: 455 - DNA, 482 bp, Homo sapiens
  SITE (468): n equals a,t,g, or c
tcttaatatcataaaaattatatctttgggcagatttgtaaacaataggaacaagtaagaagacaggtatgtaagaagtagcaaagtgtaagacggtggagctttaatgtgtggttttactcagggggtcacaagaaaataacccaatggtccttttgaaagtagtacatacacctttaaatggaacttggtctgaagggtgtggaaatgctggtccagggcagatgcacttcagctaccgttccttgcctggtgtgtgcttgtcttgagggttgagaagcacccttcttatgtgcctttctggaatgggaatgtgttttgccctattggtgaagtccgttagagaacttctctctgcagctagagaaactgaactgattaataaaaagtatgatatctaagatatactgccactctacaggtagtaaatgatyctcacatttgtgcgccagtacatcatgacccttnggaaataccggcca

SEQ ID NO: 456 - DNA, 466 bp, Homo sapiens
gttatctgtttatttttttctcttttacttatttctctttcttttatatgtctgcctctttaccatgcactttttatacatctatcctgaaatacactatgttgcatatatttttgttttaataaaattcttctgtgtttttcatgaatatttccaattcacattttacgtattaaattagcagaaatctaattattagagataggtagcacttgatgagagaaagcaagaaccctactcactcatggagatcttccatttataaatgtttacattataaacagatttggaatgttggatgtaaatatttaaatatgggagaaaaaatgttttttgaatgtagtccaatctaaatttataaactaaacagtcagtattcatttggcatattattttgttatctcctgtcttttaaaaaaatggcaaatgtgggatggtgcctgcacaaaaagaaaaaatgataaat

SEQ ID NO: 457 - DNA, 472 bp, Homo sapiens
  SITE (454): n equals a,t,g, or c
atctgaggtgtcctttacctgcctggctggactgaaggctctcagagggaaaggccatctcgtgttactcatctctgtctcccagtggcacccagcatggtgcccaagtccctgtggaggaaccctggcttttgtgattctcaaagtcttctgcgtcggccctccctgagcaggtttgtatggcaatcacaggggccaggcaggtctcagagcaggctctctttgatggattagggggaggtggtgacagtgggacagtagccctgcctggggactctcaggccagtgaaccgaggggacagctacaagccctacaggaggactcagctcttcagcagtggacttgactgatgattgacagatgaggcacacagggtcctctgaggaaggtcggccctctctcttttcaamcargctccttggtaaagaacgggggcgtgcgctggggggagancttgtgtctagcttagga

SEQ ID NO: 458 - DNA, 496 bp, Homo sapiens
  SITE (480): n equals a,t,g, or c
tgcaaatcatgtaaaggaaaagacaaaagtgttatttgttgatgaaatgattctcttggagtttccagataggctatcagctgaaaaatgactagcacttacaagacttcagtaagggagccagacacaagataaaatattcagaaattaatagttttgcgatcaggttaccaatctttctgatttgcctggaactgggaggtgttccccaggacactagactttgagtgctaaaactgccagggtcccaggcaaactggaacagatgaatcacattaaaagcaataatcactggggaacacatcctattcacaactgtaataaaagctataaatacctggggacaaaatttactactaactagaggcaagagggaattaaaacaaaatattctcccaccagattggccagtatttcagaagctgctaagacctagtgttggtgaaggtgtttgggaaatamcagctgttcagagactanttgtagattgagcaat

SEQ ID NO: 459 - DNA, 532 bp, Homo sapiens
  SITE (12): n equals a,t,g, or c
agccaactctanagatcatgtaggcaaacggtagctgacagtaccggtccggaattcccgggtcgacccacgcgtccggagaatctctaccccaggttttactcgccttagcgtccaaccactgagaagcctgtgtgtggggagagacgtcagtcatttggacccttagctgagggctgagctctagctagagcccctcacaaaagtgaagtcaagcagtcgggctgagagtggtgaggtgggaggagaaacaagcaggtgggaaatggaggaagtggggtttagttttcagtgaggaagggcagagcgttcctttgtccttcatctggcactgggcccaatcttgctatttcacttctctgaggaaatctctctctctgccccttgtccctcccctgcaaccctagatcactgcatttctagggagcaggtttgtcccttgcgaccccaagcactttctcamtgcccacatccaccaatcatgatctcagatgcagctgtcactamcagttcaaaagcctgatgttcccgc

SEQ ID NO: 460 - DNA, 456 bp, Homo sapiens
  SITE (367): n equals a,t,g, or c
  SITE (422): n equals a,t,g, or c
  SITE (431): n equals a,t,g, or c
  SITE (456): n equals a,t,g, or c
ggaacggaaatcttaatttaagaagaagaataaatgataacaaggcacgtgaagttcaaatggcgtaaacctcataaaaaatgcttacgagagagatttttgcaagacagaggaggccgtgttctaaaatagactttactgagatttaacagttctgtctaatacattttattctaatatataccaactactgtacaaacttcctatgtgcctgacagtgtgcttttaatawagaattaaatcatctgaaagtacattttataatatcatggacattaattttctgtgttgtgtttccattagtccaagagccttttctgtgagaaactaatgggaagacctataattcattctaagaaagtttatncyckgtatctcttattcctagttaacttcttgaaaatataagcgtttatgaccanaaaataatnagttgaagttatggcaagatcagcn

SEQ ID NO: 461 - DNA, 347 bp, Homo sapiens
  SITE (87): n equals a,t,g, or c
  SITE (164): n equals a,t,g, or c
  SITE (216): n equals a,t,g, or c
ttcccggtcgacccacgacgtccgcccacgcgtccgggcaaggcaggctggggccagattacaaagccatttgtagtattagactgnaggatcagacatgacattgaagacatggggattattggtattggtgagcaggaaagtggcataaagagatgtgagtntaaaaatcaggcagtatggtagttcacacttgtaattccagtgctttgggangctgatgcaggaggaatgtttgaggccaggagtttgagaccagctgggcaacatggccagaccccatttctacgataactaagaagttatctgggtgtgatagcacacaactgtagtcctagctacttggg

SEQ ID NO: 462 - DNA, 435 bp, Homo sapiens
  SITE (430): n equals a,t,g, or c
  SITE (431): n equals a,t,g, or c
  SITE (434): n equals a,t,g, or c
  SITE (435): n equals a,t,g, or c
gctcaatatgggctagctcatttgtttgcatgttttcccacctattacaaccccaggtatcctttctaagatgtgtgcttaaatatacattgtcattctaccaccacaaattataattttaatcatacttttttaataaacaaagaaatgagtctatcatgcagttctttgcatttacaatatcatgcctgatattaaactatgaataatggatagagaaggaaagtagtagctatttaaagagttatcttggctaggtgcagtggcttatgcctgtagtcccagcactttgggaggccgaagcaggcagatcacttgaggtcaggagtttaagaccagcctagccaacatggcaaaaccccatctctactaaaaatacaaaaaaacaaaaaacaaaaaaaactaaaaatacaaaaaaacaaaaaaacannaann

SEQ ID NO: 463 - DNA, 506 bp, Homo sapiens
  SITE (5): n equals a,t,g, or c
  SITE (14): n equals a,t,g, or c
  SITE (30): n equals a,t,g, or c
  SITE (37): n equals a,t,g, or c
  SITE (68): n equals a,t,g, or c
gagcnttaatcccngccctaattccctttnttttaangtgttaaaaacctatttccaaattatacacngtatgtgttcttatcckgaatttattttttycttcmaggttttgtctctgatttttwyttttttcttgcttccagaaagagaccaagaatgataagtgttaaaggggaaaagtttaaaggggggaaaagttactgtagttttctaccacattttaagacctatgggaataaagtttattgctatgctaatagtttactaggaaacttagaaagaattatgtatagttcagtttgcaaataaaatatattgaaagaaacatctgaaatattcttccctaaactgcaaaaaatgacgaataarcaagtctctaaaaaagggaaaagacctcatagttaccctccttattactaatttgaagttttaatggcatttatttgacacataatattaaaaaaaattggaacacttattagatgaatcatttgagctaggagaga

SEQ ID NO: 464 - DNA, 518 bp, Homo sapiens
ggaagaaactgtggctcttttgcacacattctgtcaatcattgtgattgcgactcatgtacttagacccaacatacaggaggtgttgactttcatacctttagaacctggacatgtttggaatttctaatctaatccctggactttcctgcaggtgtgattgtgtgcattgcaaagcaccttagtgatttgactctcctgccttggccaagcacrcaaatgagattgtgacatatggcttgactctgaacctccaagatgtgactcttttttccagccttggagctgcccacatgttgcattgtgacatattcctaagccctgcactcaggttatgtgactctccttttttrcttaggccctgaatatttttcatgttaagacatattactaggtccaacacctataaaatgggagactaccacctgggctctttctacagagggccttgtgacatacctctgcatcaataacctaggagatgtgatgctccatttttgcctgtacgtgccccacaga

SEQ ID NO: 465 - DNA, 462 bp, Homo sapiens
gaaaaatgtccatgtcataaagtgagtaaaggttggaaggagggaactgtcctatattacaagagataaagaaacatgaaaaataaattcgtccgtaaccctgggtttgatcttgggttgaaatagcaagaaaagaatattactgggtcaattaagggaatttgagtatagactgtatattaggtaatgttacagtgtcagttttaactttattggatataacaataacatgaataaatacagtaatcaatttttcagatatatgctgaagtacttagggktgaaatgttacatttgtaaatgacttagcmaacaaatacttcttaaagttttgtaattgtaggktttacmtttaggkgtataatccmaattgagttattttttatagtatgttgtgagttatgggttgaagtcactttttttgcctatgaatatacaattgttccagaaccatttattggg

SEQ ID NO: 466 - DNA, 460 bp, Homo sapiens
tttattcagcttgcaaatgaggggagggtgtgaaacaaacatttatttttgttacgctacggaatgtttggaagttgtttgtttcactggctagcctatcctgcctgaaacaccccgaaaatccctggaagccctgatgcaggacaggttttcctgtggcaggaagtgaactgctcaggtgatccagagatgcagaagaaacttctgaccctatggacagctccccccatgaaaaagagagtaaggctgagctaagcatgctcagtagaatctttccacattcaatccaagcagcttaagcccctctttcttccctggtargagtgarggagcttctttccagaggctaaaataatcacaccgccacatggaaggraacagytcccatcgaaatgkgktttctttttggcagstcyttcytgawgtcyagaaaycttccctttgttccccatccagatct

SEQ ID NO: 467 - DNA, 328 bp, Homo sapiens
  SITE (313): n equals a,t,g, or c
  SITE (314): n equals a,t,g, or c
  SITE (324): n equals a,t,g, or c
ggtcagttgctggtctgttgctcttcggggagggagagatggcctggatacagagctaagcaaatgcttctttaagggccctgttttcatggcttttatttcctttcatcccacacatttgtctgcagtactagacatgttttacaaatcaacaagtttacacaagtatatgcagcttgttttggggggaaaggrgmcaaaatatgcatattttctgtgtggatttgtgcctcttaattgtgtttctagtctctaaggtggaccctttaacctactcaagagggggcccagagaatggccgcgttacagattnntttgggcagngtac

SEQ ID NO: 468 - DNA, 508 bp, Homo sapiens
  SITE (448): n equals a,t,g, or c
  SITE (483): n equals a,t,g, or c
  SITE (492): n equals a,t,g, or c
  SITE (499): n equals a,t,g, or c
gagtaggcagaggtttgcctattgtggcctggtggcaggcaagctgaagacttaaaagaggaagttgggagaagattggttttcaaccaatatcttattaaggaagttgagtcattctacttctgctatttatcccctctgggcattcagagaaggacaagtttttacttccagatgaaatagtcatgagagggatttgccttggccccttgtagacattttcaagctggccctgtaagacagagttttatttccctttcgtgtatggagaatcaaggctccaagcattgcatgaaactaggtaaggctcaagataccttggctatatggtgctgaaacagagargtcccatcttctcagtgatggcttttagtagccggtggacagacaagggaatgaacattccatttagcctctctgttgggccaggcaaccggattgggcattncagtactcgtccttcattcggtccttcaaaacagnccggaaggnccaaagnagaagaaac

SEQ ID NO: 469 - DNA, 566 bp, Homo sapiens
gatggggtggctctagagagcaaatggtcaaaacttctagcgctaaatagagctttaacatgtctcagatactagcaaaatagagaagcctcagatggctttaggtctggaagtgtgttgctaaaaatgctaaaaatttaacaaacttttataaatccttaagagatctttttcagttttctgaagtaccgttaattgcccatgtgtttcaacttgcagacaggcaagaatttggctttgtatgtttaaaaatatgtacatcttggttcataatgatgrtttatttccaaaatggtgactcatactaggattacatataaaacatcatatgtgggccttatakgtaataakgtgtaagtatagtatattaattactctgacataacatgggcagagatttgtattaatttatttctatttcatctaatcaatattttacttaagtctaaaaccttatatatatattgacatgtatcatcgtatatataaacattgtatctattgaactgagcaatctgtagtttattttaaattctgatacattaaagatgtggagaactacatga

SEQ ID NO: 470 - DNA, 671 bp, Homo sapiens
  SITE (251): n equals a,t,g, or c
  SITE (552): n equals a,t,g, or c
  SITE (623): n equals a,t,g, or c
  SITE (645): n equals a,t,g, or c
  SITE (660): n equals a,t,g, or c
tccgaacatttttaaagtggtctttgcctatcctttaagtgggataactaaaatcatgagatttggtaacaacaatatgtaggtatcaaatgagagtatagccctggacatttgaaaccaccatagcacagcttcactatttggatggtcatttgtactttgttcagtggaagctagatattagtagagcaaggccaagtcattaataatctagtgtggcaaatggaagatgtactggactctggtgttcngaggtagttggagatttatactttgtacacaaatatattgtggtcaaaakctttctgtaacattatttctctgtcttagcacaggctttacttaacatctctccttgattgtcatttcattcttttgcatgttatttactataggtatcgaggtagattttgagaccaaccaataaatcttcttgaaacttagcttcttagaaaggaaaatctaaataccagccttttaaaaaaagtagctgaattaaaggatgagtgaaccaaaggcaaaggtagcctttcctcagcctgtgttttagcnttctaaatgttaacaataggcttcattcttggacttattgggtaacatttcaaaatactacttattatttncatactttgggcacatgtatcnatttcagcctttaanggctatttaac

SEQ ID NO: 471 - DNA, 543 bp, Homo sapiens
  SITE (198): n equals a,t,g, or c
gtgaaagtaaataaattgtacctgcttttagtatgttagccataagtccttgctgtttccttgattctgtagaagtgagcttacctttggtgataaatatttgaaattgtatgcatttataacatagaccagagagtattttttttttactgtaactctcataaagaattccagaaacaaggcttctgacccattggnttattgagttcagttcataattattgggtcactgttgttaccctggacatctgaatgggtggaaatggtaatttagattaaataactacaggtaaggatcatcagttacatgtcacgatcacctgtaaaattctgtgatgaccaaagaggtgatgatagggttgggttaatggtaaagaagaaactgtcagtgggatttgaaagtgggacagcatgtcagtaagttaagtgctttcaagattgagatggtttctgtctgagtggatatatgttaatgtgttggagaacagctctgagccttttgaagatatcttagccataacagcaaattatggattcattagg

SEQ ID NO: 472 - DNA, 327 bp, Homo sapiens
  SITE (11): n equals a,t,g, or c
  SITE (28): n equals a,t,g, or c
ctgtttcaatnggactgaataaagccanggaaattggattttaaggctaattgctataatgagaagagacaagtatagaacgtgaactagaaatgaaattaagtgcaaaggtttctatatacaggtgcacctcaatttccagaaactcagaaggtaaaagtgatggtttaaaaacgaaaaagaatataatttctattcatttttaaaaatctggcaacaccatttcaagagaagatccattttagctaacgttttacaatcagctaaatgtctaaacatttgagatatcatttactattaaaagtgaaccaaaatgtaacataaatt

SEQ ID NO: 473 - DNA, 479 bp, Homo sapiens
ggccgccctttttttttttttttttgagatggagtctcactcggttgcccaggttggagtgcagtggtggctagtgccaaatctcccaggagatatattctaggaaactggaactttaatatgaggcggagaggggcagaaagttgggcaacatataccctattcccaaccttgatgaaactaatagcatctatacacatagtagtcatgacagtaactttttgataacaacttccactctcaggaaaagtagcaaaaacaaaacaaaaataccatcaccaccaccacaacaaacaaaacaaaaaacaaccctgttttgcattttcgagtataatacatggttatcttttgaacagttagatataacatggtgtaaagaaaatcagatatgcaattcttgcctttgttactagctattggcagcctagacaagtttcctaaattttctgaggcccgaatttccttgtcttcaaaacaag

SEQ ID NO: 474 - DNA, 922 bp, Homo sapiens
gctctgacaaaccatagttcccattagtgtttccaggcaaaagtagaattgtttgcttaaacagctgtgattaagacctaaatatcttggttgcagtttgtggccaactttccagaaatgtccctgtaagataagtgctgtgtggctggcagtgatttatgggaaaggagaggggaaatcctggttgtcttgtgcctcctgggcctgctgataggcctctgtctgtgacactgatgacacctggaattggctaccttccacatagggcatcagcgagccagaaaaatctagataaacaatgccaggggcaaagaaaacacattaaactatcaggattcagacatcctgaggagcagaagaggatgagagtgcatccaaaacacacacacagaagttgaggaactgtcctcatgcctcctggtccctggtagtctggagaaggacaaggaatgttactttacaggctctgaagtcctcaggttgagcgggacaggtgggtttggcatttctaagcctaaactctgggccttctgagggaatgaggtgagagagcctctgaccccaccgctatgtgggtcacgctgatcgctgagcatctaagctgctccttaggtgctgatcctgtcacctcggtgcattacaggggaaaaagtctcagccacagcctctatgttctgtttgcctataggaccatgatactgttccaggsttcagaggagaagaaatgacccaatttcaagtgcgtactgggggattgagggcatcttcttgctattcctcaagcaagccaagagggttgctatctcagggttttaacacctgtttactcttcctagagtgacattatccagagagcttcctggttcatcccttacttcatctgagtctctgctcaaagtttactgcttgagaaaggtctttt

SEQ ID NO: 475 - DNA, 395 bp, Homo sapiens
  SITE (356): n equals a,t,g, or c
  SITE (366): n equals a,t,g, or c
aggccttggttttttacccgtaatattggcaggtgacatgtatttgttttgagtaaaaatcaaatatttcagttacatttttaaaattacctgatatactgtactttttcatgtaaccagtcagccctgagtcctatttgtgttagataagtttttaccaatcccagaaggagatagaggacaagcttttatatgcttcggctgaagaaaacctttctccaaagaagtaattatctgatcctcctataaagggccagatagtaaatattttagattttgcaggctgaagtagratcargggtaatacgtacgktctgatatwacmagagagaaaacaaattttggaggaaatttcnttaattggantaaattccaaggtgaatgaaacacaattt

SEQ ID NO: 476 - DNA, 396 bp, Homo sapiens
caagtggcagccttccctgtggccacatcaggaaacccacggagacagggtgattttgcatctcctggaaaatgagtgggacactcctggccccctggctctccccaccacccctacatatgtgctcagaaggagcccaatgcattgaatggttccactgtcgagccctctaagacctggtttgcctcctaaacctccagtgtacttctctgataggtgtttaagctacaggtgagactttgaagtccagagaagacagacacamctgaaaaccggtccccatttgggccgaaccttaaaaagcccattgtcccagagtcctagtgcccacggagctgtctgtgtgtcattgtcctgcccaggtcatcaggtgtgcggctgaggacaggcccaggg

SEQ ID NO: 477 - DNA, 473 bp, Homo sapiens
  SITE (8): n equals a,t,g, or c
  SITE (339): n equals a,t,g, or c
  SITE (352): n equals a,t,g, or c
  SITE (378): n equals a,t,g, or c
acccacgnggtccggtttttatttaatcaggcttaaataacaggttagagtggtagcaaaaaaaaaaaaaaaagtctaatatttagtttgaatcttaaattggtcacccagagctgctctctctaggrgcgaacctctctatttgtcaataaacagrgagagatacaggctyccagataacaggcatttggtaaactggcgacagtcatacaagcgagaatgttaaaatgacttcagctctttctagcttcattatgtcagccgggcagatcacatatgggcattatgggaaatcaggcaaatggaaaaccatatttgatccagcatttgaggaacaantgttaaaaaaggntggtctcaggggagggagcagagganggaggaatgcttttccctgtttccaccctgataggggcccttgttttagggcccttttaatccatttatttttaccattacccctcccctttttt

SEQ ID NO: 478 - DNA, 454 bp, Homo sapiens
attttttttactgtttggtataggttttatttttaagtaaaaaaaatgaatcatagccaaaacaaaatgtcttgcctttgaatggtattttaagcttaaggggaaaaaagtctttaatgatgaacatattttcatttttcaatgtttttaatttttaataaagatttttaattaagcttcagtctctaagcagtttttaaacttaggtttcgtgatcctttgacctcatacttttagatggagtcagttatcttcaaaacatgacaaatttcagaatccattaaaaattattttattcaaattatgttttccaaaagagagggttctgtgctagtcgtctttgaaagttttcatacctagaaaagaaaacacatatatttacmttcacaagaaaattaaaataggatctttcattaactgccaaatgacttatccaaaacaattttacatgtca

SEQ ID NO: 479 - DNA, 349 bp, Homo sapiens
  SITE (332): n equals a,t,g, or c
  SITE (343): n equals a,t,g, or c
agagaaagaagcatgtgtaaaggctcagagatatcaggtgtgcacgtgcctgtagtcctagctactggggagggtgaggtgggaagatcatttgagcccaggagttctgggctttagtgcacaatgctaattgggtgtccacrytaratttggcatcaacatggtgacctcmcaggagtgaggaatcaccagtwtgcctaaggaggggtgaactggcccagatcagaaatgaagcacttccgtgctggttcagtagagggatcatgcctgtgaacagccattgcactgcagcctgggcgacaagagggaaactccgtcttaaaaaaagaaantagctgggccnggggca

SEQ ID NO: 480 - DNA, 516 bp, Homo sapiens
  SITE (459): n equals a,t,g, or c
  SITE (499): n equals a,t,g, or c
aaaatgtggctactaaaaaatttaaatgtggctgacaccagacaatgctgtacaagatctttcccaacatatttataaaagaacacagatatacagttggccctacatatccgtgggttccacatccatggattgaaccaactgtggatcaaaaatattgggaaaaaaaatgtctggactgcacatgtacactttttttttgtttttgtttttttttaaagagatagggtctcactctgtcacccaggctggagtacagtcgtgcaaccatggctcactgtagcctcaacctccttggcttaagtgaccttcctgcctcagcctcctgagtacctggggatgacaggtgcatgctaccatgcctgggctaaatttttaaaaatttttttgccagtggatgggggtctcatcatcttgtccaggtggtctcaaaattctgggcttcaatgatcttcccgncttgggctcccaaatgttggggattgcaggaatgagccangtgcccaggctgtattc

SEQ ID NO: 481 - DNA, 840 bp, Homo sapiens
  SITE (50): n equals a,t,g, or c
  SITE (55): n equals a,t,g, or c
  SITE (61): n equals a,t,g, or c
  SITE (66): n equals a,t,g, or c
tccccaatgtgtagatccccgggacataaaggtgggggaaccgccaatgnaaatnaaaatnaaatnattgtaaagtaggacctcagttcctgtaaaccacatcctaatgatatgcctgcctcagttcctgtaacacatcctaatggtatgttttgatacagatgccatcccaagaagtcagattcaaatccgcctgactgaaatacttaagtgtcctactaaagtggtcttactaaggaacatggttggtgcgggagaggtggatgaagacttggaagttgaaaccaaggaagaatgtgaaaaatatggcaaagttggaaaatgtgtgatatttgaaattcctggtgcccctgatgatgaagcagtacggatatttttagaatttgagagagttgaatcagcaattaaaggttagtggtacagctaaatattaaagaataaaaaagttgaatttacagccttaatctttacaagtaaagttactgtttaattaaagttaaacctttatcttataggatacctgtattaacygtcttttgtttgcctttcagcggttgttgacttgaatgggaggtattttggtggacsggtggtaaaagcatgtttcyacaatttggacaaattcagggtcttggatttggcagaacaagtttgattttaagaactagagcacgagtcatctccggtgatccttaaatgaactgcaggctgagaaaagaaggaaaaaggtcacagcctccatggctgttgcataccaagactcttggaaggacttctaagatatatgttgattgatcccttttttattttgtggttttttaatatagtataaaaatcctt

SEQ ID NO: 482 - DNA, 717 bp, Homo sapiens
agtgagctccgagggcctttctgctgcttcctgtacccctgtatttcgctcagctctctgacttgactcagctccagaaatattctttcattaatattacatgcttatggaactttacctattgattaaagacatctacccctggagaaagagcccaatgagaagtaatctctgaagcccagatttcctaaggatgaagcttcaggagaggccttatcaatcctgacaacaaacttttctcgtcaatttagtttcatttaatggaagttttaaatgtgkaaagttcagaaggctattaaaattggttccagctatctaagatacacacacaaccacacacgcgcacacacggtagagataaatatgttcgaaaatccagctcaatgttactagaaaatttgatcagaatctggtgaaataaatagtaaacttactaaaaatgccaaatatcccagaagctgcttaacatttgatcaaaagctctgtccagtcaattcctgcttctttcaaaaatactctgctgaaaagccaaaggagaaatggggctggtaccttcaatatagagaattccaagtaagattagatcccagaaggcttagtgtggctttctaggactctcactattaggcagtaacctaccattcacctctgtttcccagattcaccttgttataccttataacttaaaatataaattccaacaatgtactgcactca

SEQ ID NO: 483 - DNA, 471 bp, Homo sapiens
  SITE (23): n equals a,t,g, or c
  SITE (406): n equals a,t,g, or c
  SITE (432): n equals a,t,g, or c
  SITE (434): n equals a,t,g, or c
  SITE (458): n equals a,t,g, or c
tcgctgttaacccgggggcgtgngagtgaggtaccagattcagcccatttggccccgacgcctctgttctcggaayccgggkgctgcggaktgaggactgcaagatggaggaaggcgggaacctaggaggcctgattaagatggtccatctactggtcttgtcaggtgcctggggcatgcaaatgtgggtgaccttcgtctcaggcttcctgcttttccgaagccttccccgacataccttcggactagtgcagagcaaactcttccccttctacttccacatctccatgggctgtgcctttcatcaacctctggcatcttgggctttcacagcatggcttggggcttcagcttcacattctgggggagggccagcccagcttttacctgctgtttcctggagccnttacgctgggccattgttcaacgccngngggctgggaaccccgcaccacagnggccagtggggcc

SEQ ID NO: 484 - DNA, 474 bp, Homo sapiens
  SITE (428): n equals a,t,g, or c
  SITE (443): n equals a,t,g, or c
  SITE (457): n equals a,t,g, or c
ggcgcctccgaggcagtgtgtttccgcccagagctggagtctcccagctgccagccgaccccgaacccgcactcccgccaaccgcgctttttgtgggcggtcggaaaccacagcctccgttggatatgttcggtgcatgttataaacaaccacttaaaccctccggwtctgagcctcccgcagaggaatgcagaatgacgccacggcacgcaggatgtgatgtcaccgagatgcagaggatactcagtcaaccaacatttactgagcatctacttcgtgccgtcttgttcaacggaaaggggtccctatccagaccccaagagagcattcttggrtctcttgcaagaaagaatttgaggsgratccmtagrgtaagcttartgatgttgttgtcagacctcttgaggcccaagcaaagccatcatatncccttgttgaactgnatgttattaacacncaggttgggccttgaaa

SEQ ID NO: 485 - DNA, 495 bp, Homo sapiens
  SITE (352): n equals a,t,g, or c
  SITE (469): n equals a,t,g, or c
  SITE (478): n equals a,t,g, or c
tattaagtaacagcataccacctcagtcttcaacataccgctcagctcaagagtctgcaccccatcttttacaacctcaatttagtttgttgccttcagcacttgggggatcccagcagactcctcaagcctacagttcaactctctttactagttctactgcttccattgaaagagctcttcttcgagaatgtagtgttattaaacaccatcagcggccttcaggtacccagtcaattcaggcacaactgactggttcacagcactccttacatagttatctatcaaattcaagtgtagttaattttcaggaaacaaccagggcagtcatctttatcctgtagcccaattnggagattccactcaggtgagcaacggaggrttacaacagaagacctcccaggtctcagtggaacttgctcagtcttactcatctgggattccatcatcagggtatcctccttctaantacaaaatnaaaagctgttctaaagg

SEQ ID NO: 486 - DNA, 527 bp, Homo sapiens
  SITE (436): n equals a,t,g, or c
  SITE (446): n equals a,t,g, or c
  SITE (512): n equals a,t,g, or c
  SITE (527): n equals a,t,g, or c
gtgaagttctccaaggagaagtacatcctggactcatcgccagagaaactcccctgcctacagcactgtaacccgtgtccatgccgcccctgcagccccttctgccacagcattgcctgcctcccctgtcgcccgccgttccagtgagccccagctgtgtcccggaagtgccccaaagacccatggggagtcagacaagggcccccacaccagcccctcccacacccttggcaaggcctccccgtcaccatcactcagcagctacagtgacccggactctggccactactgccagctccagcctcccgtgcgtggcagccgagagtggggcagcgactgagacctccagccagcaggccaggagctatgggggagaagctaaaggaaatgttcagaaaatgggggccctgaaagggaattggggcaagactttcanattcccatcntggaattcattttttcttcaaccgggcaatttcatcattatgatcccaggttaacggcatggagtngggcttttggcaagn

SEQ ID NO: 487 - DNA, 432 bp, Homo sapiens
ttttttttttttttttttcttttttatgctagggacgtggagatgttaaaacgacaacaaaaaatatatatataaaaacaggaatgaaatctgtgagagaatatttttggttctaaagacgggtgcatccgtttgtttcgcccgaatcccttgctggagaccacacgagcagtgacattgcacggagagggcagctttgggttccgccgccgtcactgaaaccaccggaaggcggctcccgtcggaagcatcaccttctccctctaaggcgccgttacctccagagcagcggaaggcttctttttgagttcctcacattttctgaatttgcaaatctgatggccagtctttcgattcctacaactgctgcactgctcgcagttgaatgcgccgccggcaggggcggaaccatggccgcagcgttttcccgtt

SEQ ID NO: 488 - DNA, 510 bp, Homo sapiens
  SITE (506): n equals a,t,g, or c
ttgtaagaagacagagcacagttgtggagacaaatctcagcaatatatgttggctgcttgttttataagcttggttgtttttgttattagggaaaatttacacatttttaaaaatgtatttttagaatggaagagcaatctatttgcccctacttggaaaaaaattctttctaaaaatatggaactgatggaaaagaaacttatggattacattgatcagcggaatacatgaactccasgagcacattgatgataagattgctttgttactggatttgctgcaaaatcctaactccccgcccactgggatacctctaagacattatgactctggagaaagactttcaaatggagaaagataagctctcaacataaacagtgtactgcagatatttattacatatttattacaaagccaaaacccaaaaatatttataaaaagcaagtatttaatgtccctttgagggatcattgtcttacacaagtgacctcagtttccgttttanctac

SEQ ID NO: 489 - DNA, 512 bp, Homo sapiens
ggcacgaggccacttcattttctaacttttggtatgaaaaaatcagtttacttacmgtatgttaattgtattgtactactataaacrggaacataatttccaattcagttttaaataattttaccagtactactaacttttaagggaaattaattcagttggttactcagtgtttgttacagaaagagtccagaaaagtattcaccctkaagagaatgtcaatcatataatgataatttgtgaaagctttgagaatcaatcatcagtaagttactatcagtttataaaatattatcacatttgtttaaatgtgactttagatacttttatgccaaaaataaactcacatgagcacatgacagtctgagctctataatcagtgtgcttctgctgtgcagaaatgttagaaacgtattgtctaaatatctttgataattaaaatgtttaatatttaatgaaatttgttgttacttgttttaaatcttttttcttttaataaagatttaaataag

SEQ ID NO: 490 - DNA, 484 bp, Homo sapiens
tttctttaaataagggkggaatataatgctgacaacatcaggcccttgtaatgcctcctctattcctctgcacagactgtgtccccacattggcttcctgcctgccagcctctgtgcctttccttgtgctgtccccagcctgggggckgrgatgtccttatccatttcttttgtgcctgttgaagttctgcttgtcccaccaggctcagatcagatacctcgaaggagccttttataatttcctcttcttcstcctcccctctcctccagttagaatggatttamcttccacttgtttccaaggcactttactcctggtgcgtgtatttcatcctcttgcttgtatacctctctctcctggttactgtaaactctgaagggcagcacttaaggaattctctctgccttaccttgtctagtatgatgctttctgttacagatacctggaaaatgggcgttgaattaaattatttactgaattgca

SEQ ID NO: 491 - DNA, 201 bp, Homo sapiens
cttctctattttgggaagactactgtatttcatggctgttgcagcaaatccttctgagtttaaattacrgaaagaaagtgacaaccgaatggttgtgaaaaggatattctcaaaagctattgttgacaataaaaatttatccaaaggcaaaacagatcttctggtactctttttaaatggatcatcagaaagatgttttta

SEQ ID NO: 492 - DNA, 344 bp, Homo sapiens
ggcacgaggcggggcgcaggagccaagctgctgccgctgctgctgcttctgcgggcgactggtttcacatgtgcacagrcagatggccggaacggctacacggcggtcatcgaagtgaccagcgggggtccctggggcgactgggcctggcctgagatgtgtcccgatggattcttcgccagcgggttctcgctcaaggttggggctcaggcgtaggtcctggagagggcggagatgcgtgggaccatagagccaaggatgataattccgtgacttgcccttgcccctctcctcgatacccaggtggagcctccccaaggcattcctggcgacgacactgcact

SEQ ID NO: 493 - DNA, 566 bp, Homo sapiens
gactgaaatagccccaaatcacatggaccaatgcagtggtcagggccctggggaaactgcgtccctgtacctcattcatttctcttccatcattcaggtgcctgaagtgtgaggaatggtatgggcctcctgctctcaggttcttcctacacccagtataagtctgtcttacactgcaggttaaatttcctcctcctcagaagctcctcccttttgtttgcgtgcttcactgtgtcatgcagcacttgtcacaggttggctttccaacattattgagcactctttttttttttttgagatggagtctcgctctgtctcctgggctggagtgcagtggcgccatctctgctcactgcaacctccactttctgggttcaagcgattctctttgcagcctggtcaacatggtgaaacccatctctactaaaaatacaaaaattagccaggcatggtggtgcacacctgtaatcccagctactcagggggctgaggcaggaaaatctcttgaacccaggaggcagaggttgcattgagccgagattgtgccactgtacgccagcctgggc

SEQ ID NO: 494 - DNA, 578 bp, Homo sapiens
  SITE (549): n equals a,t,g, or c
gcggccgccctttttttttttttttttttttttttttgacacaaagcagtcttcatttcttccacacatcggaaacattttcaattacagttcagcttctctgaggtccacatcaagtagtaaaataccaagagcacagaaaagctgggttggaggaaatctctgctaatgaggcactaagtgagaggcttcacttaacaattccaatagacaagctggaggcccatgcaggtccctgagaaaaagagtcattttggcttatgccctgaaggaattctactctgcactttctccttagagtgtgcctatgaagtgccactgtaaagagaggtccttgctgaatggccactagtaaaatcctaacagagagctaatctgcttggggagcagcttttttaatagtggtgattttcttctcagccagagcttctcactggaattaaaaagaccccagccacactgacagttgcaggttccacattagtcagactgtttcctggggaggtacttcttagctggtaagctgtcatatcctctgatcagtcaggntatattcctagcgggattctgggccttca

SEQ ID NO: 495 - DNA, 1295 bp, Homo sapiens
aattcggcacgagaaaatttgtagcactttactaatattagatcattattttccctcttcccctctacctttctggcattttctgttatcttagagtcaggaatctaaaggtctaagtctagaaatctgttggaagctgggttggagctactggatatgagttactttttacatgtctccttaagaagactcttttataatgtaatacttagaagccaaatcctttcaaacgcaaacacccttgaaacttgatgctttctgaagttgtattcataaaaattatcccatcttacagttaatcagaagatgttcttacctttggtttgcctgcctcctgaaacacaaacctgcagattgcccctaacttcagcagtgcctccgtcactgcatgtacctaaaagacaggaaagccaagttctgggagctgtcaagtcggaggatcaggaaaatggtggggaagaggtgactggaaaggcaggcactaaagatggcaggctgcaaaagcattctgagttcccctgtaacagataggttttatgaactcagctgttttcttttttctttttttttcttttgagatggagtctcactctgagtctcactctgttgcccaggctggagtgcagtggcacaatctcagctcactgcagcctccacctcccggtttcaagtgattctcccacctcagcctcccgagtagttaggattacaggtgcccaccaccacgcccaactaatttttgtatttttagtaaagacagggtgtcgccatattggctaggctggttttgaactcctgacctcaggtaatccacccgcctcagcctcccaaagtgctgggattattataggcgtgagccaccatgcccagtgaacttggccattttcttacattcatatatagcaaagttttcaacttgtctaccgagagactttctttaggagccaggacttctacatttgtaacttgagtatattaatattcaaatcatagttcaaaaatactgaaatacttggttattatgttacataaatatggacacaattactgccaaagaatagagagatttgcttatgagaacattctgtcatttgttttgttctgtttgtagatgagagacatgcttttaaagtacaaaacgtttctcttctaccttaccccctggtctactgacgtgctttgcatgagaagctcatctagaagagagcaacgctggaatagagaagtctagaccctggcctttgagggaaaggactgctttttttctctcccaaattaaaaaaaaaaaaaaaaaa

SEQ ID NO: 496 - DNA, 362 bp, Homo sapiens
gtatgttgtgacttctaagggaagagtctgggcagattcraggttacaacgcctgtrgggtggggtggggtggggttcccagggcccaagaccgggagcagagccctcagagctcagctggcttgggttccaggtggctgtgagaggtgatgggaagtgagcagccctgtaggtaccagctggggaggaggtgtcaggggctgtatgccagggtggggcacaagcctggggccagagcgtgcccccagcccttgcacagggatcctgtgttgccccgtttcgtggagatgctccgctactgaggtgcccacgtccacgtgcaggtccctagctggggactctctggccccaccaggccgggt

SEQ ID NO: 497 - DNA, 551 bp, Homo sapiens
  SITE (398): n equals a,t,g, or c
  SITE (477): n equals a,t,g, or c
  SITE (478): n equals a,t,g, or c
  SITE (479): n equals a,t,g, or c
  SITE (532): n equals a,t,g, or c
cgggggggaggaattcggcacgagtgaggaaggaatggaggaaattgtagtcttctttttttattatgttatgtggtcctttttatttcttaggtataaatatgttaaatagtttaaagtctaagaaaacacacatgattgaagttattttataccatgtaaactactataaatacatcttaatgatatttttaatttctttactggcattgtaattggcaatgcattaggtgctaaaacacaaattttttaaaaaagtttccattctcatgttgatatcactgacatttttttttttttttaggatggagtctcactctgttgcccaggctggagtccaatggcccgatctcggstcactgcaacatctgcctcccagcttctagtgattctcccanctcagcttccagagaagctgggattatgggtgccacacctggctaatttttacatttttgggtagagactaattttttnnnttttaagtagagactggggtttcaccatgtttggacaggctgggtctggaacncctgaacccatggatccgg

SEQ ID NO: 498 - DNA, 556 bp, Homo sapiens
  SITE (529): n equals a,t,g, or c
gcggccgccctttttttttttttttttttttttgttttttaatggtgtttttatttaaagcagcagaattggtagctaacagaatagtccctatgagtaacatgaagggcaaacgtcacatcaccatgttaacagactcgggaagtgtatctgaagaagtccaacctccattcatgaataacaattttcagcagacttctctgggggccttcctccacctgtgggagtcgtacatccagaagccgagtgagctggaaggaccccagtggggatgggctatggttggagaccctggtatgaaccccagtttagcttgacatagacacagatggttccatgccggacgcgtgggtcgacccgggaattccggaccggtacctgcaggcgtaccttctatagtgtcacctaaatagctttttgcaaaagcctagtggtcatagctgtttcctgtgtgaaattgktaatccgtccgcgggctaaggsyaaagtccggaaggyggaaycggtcccggtgtcttccaatggaggncaaaacaacgtggaatgccgtctccca

SEQ ID NO: 499 - DNA, 1425 bp, Homo sapiens
  SITE (1205): n equals a,t,g, or c
  SITE (1357): n equals a,t,g, or c
ggtcgacccacgcgtccgcacacattgaactcttaagttctgtaggcctctaagcctttttaagttttagtattttcatcgttaaaatgagagtgattataacccttgctttgctgcctccaaatattattgagggatcaaatgcattgataaataagataaagcactagacaaatataagggatgcttgatgacttcacagagggaagattattctgttgctggctgctgaaatacagtagctttagaaaaacccctttgggttcccttattatcaggtttggtctcaaataaccagaataaatttggagatttcctaccacaaaagctaaaagtacctgggcagatttaccctttgagtggacctaagggaaatgcagattcccacgggagagatcacggakyagawwcaaaccataaggcmaaaataattgttgcaatagcggttctaactgtactagtaaatattgatttttctgttagcagatcaatcatgaaatgaattctaaatatagaagactggttaaaaaattaagacggagaatgtgaaaatgtccatgtgtaaaaattaacttaaagagaaatcttgctttggccaaaagaaatactactgtttctgtcaggaatgttctgtgatttaatcaagtttcctgcctggccagatgattttaggaattgtggacttttaaagtagtaagtcagtttagaaaactggttaagtggacagatgtaaagtcagactgcctaagccccaattccagcttcaatatttaactctgtggttgtgggcaaggcacataatctctttatgctgccttttcacaactgttatggasataatgataraacctacatcatagagttgttggggtgactacatgagataatacaattaaatacttaacacctggtccataaaaagcgctgaataaatattgactattatcatcaccccggggtctacaaatttttgtaggattaggattaggattgaaatttctaccgaaaaattccatcagtaaaatattgataaatataaatcttaaccaactgcctcagagacatagggacctctattttccactcattgactgtcatctttagagaacagtccaaagcatgtgcctttctgttctagttgttatgagctctttattttgaagttgaactatatacttcctatagtttaaaggagaaagaagtangtctcatgctggacaccttctagatgttacctcctccgaatttcatagccaagtatttaaggcagttatgatcatctccctcttagagaacctaagaaaggttactgcagtgcttgacagcaaatagaaactcaccaagtgcatttgttganggattgacagaatggctggataagtgactcaactaagaacacttatctagtgagtgcgtctactcact

SEQ ID NO: 500 - protein, 52 aa, Homo sapiens
  SITE (7): Xaa equals any of the naturally occurring L-amino acids
  SITE (47): Xaa equals any of the naturally occurring L-amino acids
GVCGSPXGSGPVPPGRPSRPWSVFLFSRCCWWGCRWSRCCCWGCRCXPRPPL

SEQ ID NO: 501 - protein, 113 aa, Homo sapiens
HSGAQVAKLLPLLLLLRATGFTCAQTDGRKYTAVIEVTSGGPWGDWAWPEMCPDGFFASGFSLKVEPPQGIPGDDTALNGIRLHCARGNVLGNTHVVESQSGRWGAGVEDPLG

SEQ ID NO: 502 - protein, 66 aa, Homo sapiens
  SITE (5): Xaa equals any of the naturally occurring L-amino acids
  SITE (42): Xaa equals any of the naturally occurring L-amino acids
  SITE (43): Xaa equals any of the naturally occurring L-amino acids
IINAXAYSLPTTMEAYGITAAGFFQQLRKAIATPSQQEHTEXXHFGIIQNISLMIQPVLHPTNDNC

SEQ ID NO: 503 - protein, 58 aa, Homo sapiens
  SITE (28): Xaa equals any of the naturally occurring L-amino acids
  SITE (41): Xaa equals any of the naturally occurring L-amino acids
NSEADICHHISEKDPGIFARQTYTGSGXFFNPFIHRAGAQXFPGFAGTNFGVREKTGK

SEQ ID NO: 504 - protein, 83 aa, Homo sapiens
KKLESVNPAMVSPSAGHGMGDMRPAPRHNDLVRLLSRCRRELEQRDGQGKVTRRRQGHGGIAWPCGGPAWAFRSLHMSHHWPF

SEQ ID NO: 505 - protein, 114 aa, Homo sapiens
  SITE (10): Xaa equals any of the naturally occurring L-amino acids
  SITE (99): Xaa equals any of the naturally occurring L-amino acids
  SITE (101): Xaa equals any of the naturally occurring L-amino acids
  SITE (114): Xaa equals any of the naturally occurring L-amino acids
GGECSFGHCXASGRGSDCSRTHGREEALTGLPACEVSGLEVQRIQLTRMEYAMKSLSLLYPKSLSRHVSVRTSVVTQQLLSEPSPKAPRPGPAALTRRXRXLRKGSWVYIFEDX

SEQ ID NO: 506 - protein, 53 aa, Homo sapiens
  SITE (35): Xaa equals any of the naturally occurring L-amino acids
FLFCKSRSPWSTREENFPFLPIALSYLLCEAHFPXILGMKSKAILCNSGSLCQ

SEQ ID NO: 507 - protein, 52 aa, Homo sapiens
IQENTGPTNTVICKLHSLITIKALPLEKLKEGTKMWSFLLAALFLQANIFFP

SEQ ID NO: 508 - protein, 52 aa, Homo sapiens
LSKSKAFKALRLVRPFFNIMIKCSVPSFQLNGQLETRERKETIQQIRLPLII

SEQ ID NO: 509 - protein, 123 aa, Homo sapiens
VCLTLQVKFPPPQKLLPFVCVLHCVMQHLSQVGFPTLLSTLFFFLRWSLALSPGLECSGAISAHCNLHFLGSSDSLCSLVNMVKPISTKNTKISQAWWCTPVIPATQGAEAGKSLEPRRQRLH

SEQ ID NO: 510 - protein, 51 aa, Homo sapiens
TAAFSSENEVPLHTTSLKGCEARSGSFKKLPISGRCLKKGGHTAGLLPFFT

SEQ ID NO: 511 - protein, 76 aa, Homo sapiens
KYLSTQRLAHTCLWQLNIGNVAINKQMDEQTGVHPSVGILLSQEREHLVTCSIWANLERIVPKCRRPHKEGCPLKI

SEQ ID NO: 512 - protein, 46 aa, Homo sapiens
KETASFNFTTLHIGIYSRRGDIEVCALLIFCISTLLIGEILLVTDT

SEQ ID NO: 513 - protein, 57 aa, Homo sapiens
KFLRYHTILKYLLNYQKKVTLYRFRFMYSVLWKLRFCIWQFVIRIFTSLHSVKKIVL

SEQ ID NO: 514 - protein, 57 aa, Homo sapiens
  SITE (28): Xaa equals any of the naturally occurring L-amino acids
  SITE (34): Xaa equals any of the naturally occurring L-amino acids
  SITE (50): Xaa equals any of the naturally occurring L-amino acids
TRTKLTMGGCGKGSVGTEQNRRRKRREXNYILTXVVHRKAHCGFAPGTYXLRVRRGN

SEQ ID NO: 515 - protein, 49 aa, Homo sapiens
VKINCSLLKTLYKLKSRLPLGELLILWVSYMSCIYKTYMFISFCLFFSC

SEQ ID NO: 516 - protein, 185 aa, Homo sapiens
  SITE (180): Xaa equals any of the naturally occurring L-amino acids
TAKTVLTGTKDTVTTGLMGAVNVAKGTVQTSVDTTKTVLTGTKDTVCSGVTGAANVAKGAVQGGLDTTKSVLTGTKDTVSTGLTGAVNLAKGTVQTGVDTSKTVLTGTKDTVCSGVTGAVNVAKGTVQTGVDTAKTVLSGAKDAVTTGVTGAVNVAKGTVQTGVDAPKAVLMGTRTLSSXGLPVP

SEQ ID NO: 517 - protein, 149 aa, Homo sapiens
  SITE (148): Xaa equals any of the naturally occurring L-amino acids
DTGLLATTHGPEEAPRLAMLQNELEGLGDIFHPMNAEEQAQLAASQPGPKVLSAEQGSYFVRLGDLGPSFRQRAFEHAVSHLQHGQFQARDTLAQLQDCFRLIEKAQQAPEGQPRLDQGSGASAEDAAVQEERDAGFCPGLRLLGTAXG

SEQ ID NO: 518 - protein, 54 aa, Homo sapiens
  SITE (14): Xaa equals any of the naturally occurring L-amino acids
  SITE (23): Xaa equals any of the naturally occurring L-amino acids
HVLLLLSLYPSLNXSLALCGSRXLVLGSFLLLFCGLLCCVTAMCFHPRREFPLV

SEQ ID NO: 519 - protein, 55 aa, Homo sapiens
MAFKHFSHSFNLRNQDSDFLSRQCISSCFFLRLIILQCDCCLYFWPTVGLKLFEN

SEQ ID NO: 520 - protein, 82 aa, Homo sapiens
AWVCRLFPALCPTLTQASILCSITDPPASVVSVLAPTLSLTLPWCPSAVSPCFACLGSPSSSPSVLLRNPEHWGTGQGPCGS

SEQ ID NO: 521 - protein, 61 aa, Homo sapiens
  SITE (40): Xaa equals any of the naturally occurring L-amino acids
QIFLAELLALSRLYNSGFSKLFAELLKKFYPNTRLKIMVXFLALGWWLPQSENFTSIKSYF

SEQ ID NO: 522 - protein, 63 aa, Homo sapiens
  SITE (45): Xaa equals any of the naturally occurring L-amino acids
  SITE (52): Xaa equals any of the naturally occurring L-amino acids
  SITE (62): Xaa equals any of the naturally occurring L-amino acids
ENVPKMVGLQLDFIHFTGIEVTGQTSINICKVYIPFGSRKRDSLXLGASRSXGGSKDFWMAXG

SEQ ID NO: 523 - protein, 55 aa, Homo sapiens
GQENGVNLGGGTCSEPRSRHCTPAWATERDSISKRKKRETLFFLTSAYQAFKWLC

SEQ ID NO: 524 - protein, 86 aa, Homo sapiens
  SITE (68): Xaa equals any of the naturally occurring L-amino acids
  SITE (80): Xaa equals any of the naturally occurring L-amino acids
  SITE (83): Xaa equals any of the naturally occurring L-amino acids
RRNLKSSCWSIYCVCRKQISFKQMVKNCRIRAGRSFVQYMFFFVVVVFEMGVSLCRPGWSAMVPSWAXAASASRALAIPXPQXFSR

SEQ ID NO: 525 - protein, 58 aa, Homo sapiens
PPVVITIYCKQLLSATSKTAALTSDLSAITDTKVKCSLIVQSNLWYPQKPKRSGNVIQ

SEQ ID NO: 526 - protein, 60 aa, Homo sapiens
RTECGQSTCLASAQLELVICGCSIPTHTPPEIPFSILASDLPGRDLVLFAARTQDRWKIT

SEQ ID NO: 527 - protein, 140 aa, Homo sapiens
  SITE (35): Xaa equals any of the naturally occurring L-amino acids
  SITE (43): Xaa equals any of the naturally occurring L-amino acids
  SITE (110): Xaa equals any of the naturally occurring L-amino acids
  SITE (134): Xaa equals any of the naturally occurring L-amino acids
RNQRRSGPLGSWGQGTLATGATHTGLSTFQNWLPXTPATSWGXLTSSRTTDNGGEQTALSPQEAPFSGISTPPDVLSVGPVACLGSRSHLPRALRLTWRRFTQGTAPGRXGHGGFWPPHTAPKKPHAWTMLAEXIGGAGG

SEQ ID NO: 528 - protein, 69 aa, Homo sapiens
  SITE (62): Xaa equals any of the naturally occurring L-amino acids
TVPCQVWLTPIIPALWEAEAGVSLEVWSLRSAWPTWQNPISTKNAEIGQVWSCTPVVPATQXAEAPEIT

SEQ ID NO: 529 - protein, 51 aa, Homo sapiens
  SITE (31): Xaa equals any of the naturally occurring L-amino acids
  SITE (45): Xaa equals any of the naturally occurring L-amino acids
VPFSTWEDRVPIPCPQLHSAAESLDRSRQGXVRGGYYWGGAQKHXKDGIIA

SEQ ID NO: 530 - protein, 61 aa, Homo sapiens
DRAMFPLKPLEEDPSLPLLASGSTRHSLACGSVILIFASIVTWYSSLVCVLSYKDTVILAN

SEQ ID NO: 531 - protein, 87 aa, Homo sapiens
  SITE (82): Xaa equals any of the naturally occurring L-amino acids
GERGAAAGCGCECEELLGHALPYALLCLLTHESQAVVIPSAATLIIVVCVGFLVLMVVLGLVRIHSLHRRVSGAGGPPGASXDPKDP

SEQ ID NO: 532 - protein, 86 aa, Homo sapiens
  SITE (35): Xaa equals any of the naturally occurring L-amino acids
  SITE (56): Xaa equals any of the naturally occurring L-amino acids
  SITE (57): Xaa equals any of the naturally occurring L-amino acids
KGRRACLTLHRHPTPHCSTWGLPLRVAGSWLTVVXVEAWGGGHGIRRTGQVGPYAXXPCQCSLSLQHSSSSPHIISLLDVCVQWLY

SEQ ID NO: 533 - protein, 33 aa, Homo sapiens
  SITE (33): Xaa equals any of the naturally occurring L-amino acids
KHYILIYKDFKYAEKFMDKMDSCSFLQKKKKGX

SEQ ID NO: 534 - protein, 58 aa, Homo sapiens
  SITE (11): Xaa equals any of the naturally occurring L-amino acids
VKTVTSLGDVXELQAQVRRAAACTVLHFSRQWTSRIFMGFRSRVLCNAILAHLIEKEK

SEQ ID NO: 535 - protein, 55 aa, Homo sapiens
  SITE (38): Xaa equals any of the naturally occurring L-amino acids
GIFKYLYEDVDDVDIYKVNNGGVLCKDNLRYSIHARMXRKIQVCKSLTQADKSVV

SEQ ID NO: 536 - protein, 83 aa, Homo sapiens
  SITE (11): Xaa equals any of the naturally occurring L-amino acids
TALSFPLWASXTVSKVPMGGKQKQLPYENKKKVFWEQYSSFSLLIFNWKIREAALYIRIGVTELSVLTDWVIHRYIVKHFLMV

SEQ ID NO: 537 - protein, 90 aa, Homo sapiens
  SITE (49): Xaa equals any of the naturally occurring L-amino acids
  SITE (68): Xaa equals any of the naturally occurring L-amino acids
  SITE (72): Xaa equals any of the naturally occurring L-amino acids
  SITE (75): Xaa equals any of the naturally occurring L-amino acids
  SITE (78): Xaa equals any of the naturally occurring L-amino acids
NGWETTYSKVLSWGMWEAEWEWKLTHTSRFLLQPQEKLIFPLISRPFPXRSQTWITSLPCCSTSIPPXHSTXRRXRPXPGKNPKNWGKKS

SEQ ID NO: 538 - protein, 54 aa, Homo sapiens
  SITE (5): Xaa equals any of the naturally occurring L-amino acids
  SITE (7): Xaa equals any of the naturally occurring L-amino acids
NMGRXSXWIYFLATDILEACNEKYNKDGYVLAAPNVLVVPRLMTVFSYCEITEF

SEQ ID NO: 539 - protein, 164 aa, Homo sapiens
  SITE (154): Xaa equals any of the naturally occurring L-amino acids
  SITE (157): Xaa equals any of the naturally occurring L-amino acids
  SITE (163): Xaa equals any of the naturally occurring L-amino acids
  SITE (164): Xaa equals any of the naturally occurring L-amino acids
SSPSPSSSQKLPAPWHLQYSSYTFLPPLANLPFPSSLPASVSTPCMRSETATAPPLKTPHFVLSNVSNSSSRFKLPFLSDIDTSWGLTCFFFYCSCPLPLPRWGREVGLWGSCESNLHPSDFCVSTSRPPFPFPFPYLSFPNSLALFPFLFSSXPFXPFFSVXX

SEQ ID NO: 540 - protein, 61 aa, Homo sapiens
  SITE (14): Xaa equals any of the naturally occurring L-amino acids
  SITE (17): Xaa equals any of the naturally occurring L-amino acids
GAPSLIQEETVHLXDSXSGQMAQSTTCCYRLEHLFFLGRKRSRLFSAKQERNKDYWEHFVC

SEQ ID NO: 541 - protein, 35 aa, Homo sapiens
  SITE (4): Xaa equals any of the naturally occurring L-amino acids
KFKXEGGTKSSVKLLLIPGKCMNILPLAFNVQSLH

SEQ ID NO: 542 - protein, 88 aa, Homo sapiens
ATSLPQGAGPLSHFLGSNSCHNSFRGASTCLSNLVISGLYPFGQAHTIQEETAEWGLGSELELWKGLPWASELLIHQQHCHSGTRFNL

SEQ ID NO: 543 - protein, 94 aa, Homo sapiens
  SITE (86): Xaa equals any of the naturally occurring L-amino acids
  SITE (94): Xaa equals any of the naturally occurring L-amino acids
KKNVLPTKDIKRLCKSSRLPLSDDLLESLLSRFEDSEKQIDYKSFFSALNWRKNPVPELQPASYLKERCEDVWLGMPSPIPAKYIXYWNLLEGX

SEQ ID NO: 544 - protein, 42 aa, Homo sapiens
AGFLLLATEMIPHYKKLISPSSPHSRKGVNWSLGMRNVFSLN

SEQ ID NO: 545 - protein, 207 aa, Homo sapiens
  SITE (142): Xaa equals any of the naturally occurring L-amino acids
  SITE (186): Xaa equals any of the naturally occurring L-amino acids
  SITE (199): Xaa equals any of the naturally occurring L-amino acids
  SITE (206): Xaa equals any of the naturally occurring L-amino acids
GVCREGCGSNSAMLFVQALLSGLFSTPLNPLLGSAVFIMSYARPLKFWERDYNTKRVDHSNTRLVTQLDRNPGADDNNLNSIFYEHLTRSLQHTLCGDLVLGRWGNYGPGDCFVLASDYLNALVHLIEVGNGLVTFQLRGLXFRGTYCQQREVELSPRVWKKTKAVAAVKPGHLPRVLSFNAAFGXRWAWALGSNSQQXTCWEGYXI

SEQ ID NO: 546 - protein, 65 aa, Homo sapiens
  SITE (17): Xaa equals any of the naturally occurring L-amino acids
  SITE (28): Xaa equals any of the naturally occurring L-amino acids
  SITE (30): Xaa equals any of the naturally occurring L-amino acids
  SITE (39): Xaa equals any of the naturally occurring L-amino acids
  SITE (43): Xaa equals any of the naturally occurring L-amino acids
  SITE (51): Xaa equals any of the naturally occurring L-amino acids
  SITE (57): Xaa equals any of the naturally occurring L-amino acids
  SITE (59): Xaa equals any of the naturally occurring L-amino acids
  SITE (64): Xaa equals any of the naturally occurring L-amino acids
IYHSEKPQCVCNKKQSXNYSAINFTKVXIXHMVPCPSEXELCXWKSLREPXGEKNRXPXYWGWXL

SEQ ID NO: 547 - protein, 44 aa, Homo sapiens
  SITE (4): Xaa equals any of the naturally occurring L-amino acids
  SITE (19): Xaa equals any of the naturally occurring L-amino acids
AFMXSRPVLLKNGPQQGKXLMPECETLNYYLHAESLAPKGKTIS

SEQ ID NO: 548 - protein, 58 aa, Homo sapiens
  SITE (25): Xaa equals any of the naturally occurring L-amino acids
  SITE (48): Xaa equals any of the naturally occurring L-amino acids
PDSCAFKYVRGWVNLYPQLERAGIXICESSVVSMMAPCIQLSDRQTFXKKKKKKKDSE

SEQ ID NO: 549 - protein, 63 aa, Homo sapiens
  SITE (27): Xaa equals any of the naturally occurring L-amino acids
TPTDFCWQKAARAGWVPQCKTATHCKXSPARQKPQLLGHTPSSLAHEAGAPGSCVHARSMLYA

SEQ ID NO: 550 - protein, 50 aa, Homo sapiens
FLFLIIVIFWGIKVFWHVGLSNLFATFRICAFKCHCICTGHSWDMKINLT

SEQ ID NO: 551 - protein, 172 aa, Homo sapiens
  SITE (4): Xaa equals any of the naturally occurring L-amino acids
  SITE (55): Xaa equals any of the naturally occurring L-amino acids
  SITE (77): Xaa equals any of the naturally occurring L-amino acids
  SITE (153): Xaa equals any of the naturally occurring L-amino acids
QPQXRQGAAARGHRGPARSSGRRQRNGWAAPRPPPEPLPAPSEAWGAAPAWPRTXWPRCLRESSPAARPSPEKVPPXLPAPLTPHGTSPVGPPTPPPAPTDPQLTKARKQEEDDSLSDAGTYTIETEAQDTEVEEARKMIDQVFGVLESPELXRASSANFRPVIRGDRDESD

SEQ ID NO: 552 - protein, 64 aa, Homo sapiens
  SITE (40): Xaa equals any of the naturally occurring L-amino acids
  SITE (53): Xaa equals any of the naturally occurring L-amino acids
  SITE (56): Xaa equals any of the naturally occurring L-amino acids
  SITE (58): Xaa equals any of the naturally occurring L-amino acids
  SITE (61): Xaa equals any of the naturally occurring L-amino acids
SRIWIPLHFAVCILKVPSLDDIFLIPTLGLVMLYSLQMLXVVSFCIPFSTHTXFPXVXFLXSVK

SEQ ID NO: 553 - protein, 87 aa, Homo sapiens
  SITE (84): Xaa equals any of the naturally occurring L-amino acids
GQKRGGRAWGYLLDGPLHLMAPHPPQAGAGPSPDWKMRLTSWPRSLPGRSLDTQLRPYPRTDSGSRSLVRPPLPLPHGPVPSPXLSF

SEQ ID NO: 554 - protein, 28 aa, Homo sapiens
  SITE (27): Xaa equals any of the naturally occurring L-amino acids
NWLLLCEVQTSASHWPGLSTSEVLGAXE

SEQ ID NO: 555 - protein, 145 aa, Homo sapiens
  SITE (121): Xaa equals any of the naturally occurring L-amino acids
  SITE (123): Xaa equals any of the naturally occurring L-amino acids
  SITE (125): Xaa equals any of the naturally occurring L-amino acids
  SITE (129): Xaa equals any of the naturally occurring L-amino acids
  SITE (136): Xaa equals any of the naturally occurring L-amino acids
  SITE (141): Xaa equals any of the naturally occurring L-amino acids
TDLIDTAFPLCLWLYVSFILLCLSPALDPFCRSWLVSGNGSHPMDSHSGEPALLPCGTCDMVFRSSALLATHTQRFCIGHPTQEMTFGAQASVATEPQRAAVVPQEHQGVPQEPQGLPDQXAXRXALKXLTEEYSXLPSPXAQNG

SEQ ID NO: 556 - protein, 87 aa, Homo sapiens
  SITE (86): Xaa equals any of the naturally occurring L-amino acids
  SITE (87): Xaa equals any of the naturally occurring L-amino acids
PMEHAATTGPRPGPPSRRVENVVLRAKDWLPGAPGGTAVWATSLEAEVPPDLALNKEQAAARSPRSWSTFRSQPTTYMSSMRLKSXX

SEQ ID NO: 557 - protein, 90 aa, Homo sapiens
  SITE (51): Xaa equals any of the naturally occurring L-amino acids
  SITE (80): Xaa equals any of the naturally occurring L-amino acids
  SITE (89): Xaa equals any of the naturally occurring L-amino acids
  SITE (90): Xaa equals any of the naturally occurring L-amino acids
PNAKAQSRQQRPLFQPHSPSAAVGARKQGARGVPSWIEAAGACETKRAQGXSILDRSLQVPVRPKRGPRVVPFLDRRLEXACETQAGPXX

SEQ ID NO: 558 - protein, 66 aa, Homo sapiens
CQAEADFNRQGNEDDDGFRRKRIKSLPGRARWLTPVIPALWEAEAGGSQGQQFETSLTNMVKPRLY

SEQ ID NO: 559 - protein, 64 aa, Homo sapiens
  SITE (11): Xaa equals any of the naturally occurring L-amino acids
  SITE (52): Xaa equals any of the naturally occurring L-amino acids
TQLVPLQPSLXHSGKFFWSPNLTDGMPNTFLGKHKLLNSDYIPWVFNYKSFXKFVMETVKREIF

SEQ ID NO: 560 - protein, 49 aa, Homo sapiens
HREKEERQNASLRRSTSGIWAPGMTAVNSGKRANKCPGIPYPLPHAFPS

SEQ ID NO: 561 - protein, 89 aa, Homo sapiens
AEPQRSSCCGNPRGQTQGEMLASPYSHPALSPMGHTQLQPVAWGGPCHAGVGKAGPGSGKGTGAPALQVAMLSSLLGGHCPLLTFLNEF

SEQ ID NO: 562 - protein, 49 aa, Homo sapiens
STYETKWVNTVLWAELYSSKSSCVEVLTPVPHNVTLFGDRIFTEVIKLK

SEQ ID NO: 563 - protein, 66 aa, Homo sapiens
  SITE (21): Xaa equals any of the naturally occurring L-amino acids
  SITE (49): Xaa equals any of the naturally occurring L-amino acids
  SITE (50): Xaa equals any of the naturally occurring L-amino acids
  SITE (59): Xaa equals any of the naturally occurring L-amino acids
  SITE (66): Xaa equals any of the naturally occurring L-amino acids
LRNSFLEYTLQRAEICSHQIXYINVQNSIIYNSQRVKITQGDEWINKMXXIYTMKYMIXQEKEMKX

SEQ ID NO: 564 - protein, 95 aa, Homo sapiens
  SITE (66): Xaa equals any of the naturally occurring L-amino acids
  SITE (81): Xaa equals any of the naturally occurring L-amino acids
  SITE (83): Xaa equals any of the naturally occurring L-amino acids
KENKEVKRDSVPRKYTCSPSSVGWAGYLVCPSIFKMIPGVPLLSHFCTVLRHREKVLEVGSTSPSXDETGLTPTRRTPQGXFXTPFCLFLFILLN

SEQ ID NO: 565 - protein, 60 aa, Homo sapiens
TLTVNTSGQDAGCRRGGVASSHPAGVHKPGTGPALINAPFTAKDPSSRAGITVPVERVLR

SEQ ID NO: 566 - protein, 61 aa, Homo sapiens
EHKNVILMSEGFLKLYFFCVIIYSLLSCISYKSNKIKNATFYFIYQYDYINANYLQYWITI

SEQ ID NO: 567 - protein, 29 aa, Homo sapiens
  SITE (28): Xaa equals any of the naturally occurring L-amino acids
FLECLLFNDVYTPTARMKEQPLLILGLXK

SEQ ID NO: 568 - protein, 51 aa, Homo sapiens
  SITE (32): Xaa equals any of the naturally occurring L-amino acids
  SITE (39): Xaa equals any of the naturally occurring L-amino acids
FISLSFTTHSVFLALTKTSAVLCPLLCDWSKXLILMCLXLSCLFLSCCSFS

SEQ ID NO: 569 - protein, 81 aa, Homo sapiens
  SITE (73): Xaa equals any of the naturally occurring L-amino acids
  SITE (75): Xaa equals any of the naturally occurring L-amino acids
RLRPPSPDQTRPGKMSCIPNRQKKEKAGGGAESPPWDSPSHSEGKSIKKRGKLRGRRLREGSILSISADVISXTXGFPQAW

SEQ ID NO: 570 - protein, 29 aa, Homo sapiens
ERMELRLSIIIETVDSPLILNYKLGSSMP

SEQ ID NO: 571 - protein, 35 aa, Homo sapiens
AKCRLSWRGNNVRLKVNITVEKAPGQEGQTTNTGG

SEQ ID NO: 572 - protein, 62 aa, Homo sapiens
  SITE (30): Xaa equals any of the naturally occurring L-amino acids
AWRRKVTCCKTSKVAEPGLEPSLTPGHVFXHCAYCLPLKNLPDVVKLMTKINLPSANLKTQR

SEQ ID NO: 573 - protein, 53 aa, Homo sapiens
  SITE (34): Xaa equals any of the naturally occurring L-amino acids
IYVIDPLSSRAEAVFQAVLTPELGKADSHLTNMXLSEKQPCCWSPFEGRGRDW

SEQ ID NO: 574 - protein, 54 aa, Homo sapiens
  SITE (13): Xaa equals any of the naturally occurring L-amino acids
RIEITIRIEIMVXIQVFKEKSDTGQVRWLTPVIPALWKAKVGGLRGQEIENHPG

SEQ ID NO: 575 - protein, 114 aa, Homo sapiens
  SITE (11): Xaa equals any of the naturally occurring L-amino acids
  SITE (20): Xaa equals any of the naturally occurring L-amino acids
  SITE (46): Xaa equals any of the naturally occurring L-amino acids
  SITE (81): Xaa equals any of the naturally occurring L-amino acids
  SITE (87): Xaa equals any of the naturally occurring L-amino acids
FGTSYTVVVYXFPQGCQIVXLADLTQLVDSCKSTVVWMLEALEGLXGQELTDHMGMTASYTSNLAYSFYSHKLYAEACAIXEPLCQXLGLVKPGTYPEVPPEKLHRCFRLQVES

SEQ ID NO: 576 - protein, 50 aa, Homo sapiens
  SITE (43): Xaa equals any of the naturally occurring L-amino acids
VTGFLHGTRRGKWSECHFPKDLICGPHVPQKPALVGHFSKTKXPCHPKVP

SEQ ID NO: 577 - protein, 86 aa, Homo sapiens
  SITE (27): Xaa equals any of the naturally occurring L-amino acids
  SITE (29): Xaa equals any of the naturally occurring L-amino acids
  SITE (53): Xaa equals any of the naturally occurring L-amino acids
ALGTTVLCHLPLRGAALDCHCCVKHSXWXLFLYRGSGTCLTSASCILISECFXSPNHYAAATLVLFWCLKYARPFPELKAVGTCCP

SEQ ID NO: 578 - protein, 91 aa, Homo sapiens
  SITE (42): Xaa equals any of the naturally occurring L-amino acids
  SITE (81): Xaa equals any of the naturally occurring L-amino acids
  SITE (83): Xaa equals any of the naturally occurring L-amino acids
  SITE (89): Xaa equals any of the naturally occurring L-amino acids
GREKAGEEEGVFREGCKFRQCGQGGPGITKQLTKPDDADGGXVWTLGERPASAKALKQEHGVLGGTIGGTRLGGQGVVGGXTXGSLEVXGL

SEQ ID NO: 579 - protein, 112 aa, Homo sapiens
  SITE (105): Xaa equals any of the naturally occurring L-amino acids
  SITE (111): Xaa equals any of the naturally occurring L-amino acids
GTRPPGGSHRVSLDPFMGSMSGQVGDLSPSQEKSLAQFRENIQDVLSALPNPDDYFLLRWLQARSFDLQKSEDMLRKHMDSGSNKTWPTSLAWQPPEVVRLYNAXRHMRPXR

SEQ ID NO: 580 - protein, 63 aa, Homo sapiens
  SITE (59): Xaa equals any of the naturally occurring L-amino acids
  SITE (61): Xaa equals any of the naturally occurring L-amino acids
  SITE (63): Xaa equals any of the naturally occurring L-amino acids
DTRWRRSLCSLVCKWTYSAEKGWDDSFWKMIGLEDFVADNYSKIGNQCYLLELLLEMGXHXRX

SEQ ID NO: 581 - protein, 120 aa, Homo sapiens
  SITE (119): Xaa equals any of the naturally occurring L-amino acids
GSPSGLPRHRREVGSQRLTHEGTRSIDKYSFWADNSRRCSVHVLGGHGGTAPRAPAATSIAQPAPPDLPLNPCALDNLPRNPPLLHGQVAAAFGGAQDKSRGGLEGWWGNESTCGKKRXS

SEQ ID NO: 582 - protein, 54 aa, Homo sapiens
  SITE (15): Xaa equals any of the naturally occurring L-amino acids
  SITE (18): Xaa equals any of the naturally occurring L-amino acids
  SITE (29): Xaa equals any of the naturally occurring L-amino acids
  SITE (32): Xaa equals any of the naturally occurring L-amino acids
  SITE (42): Xaa equals any of the naturally occurring L-amino acids
  SITE (46): Xaa equals any of the naturally occurring L-amino acids
TLLNLGKLNLGTAGXKSXEELHCWEPMTXFNXGKEFTEDDPXGRGXTETIFFFP

SEQ ID NO: 583 - protein, 116 aa, Homo sapiens
  SITE (53): Xaa equals any of the naturally occurring L-amino acids
  SITE (56): Xaa equals any of the naturally occurring L-amino acids
  SITE (72): Xaa equals any of the naturally occurring L-amino acids
  SITE (104): Xaa equals any of the naturally occurring L-amino acids
  SITE (109): Xaa equals any of the naturally occurring L-amino acids
VARGHLEEQVAFFAAIRGCSLVEKATLGTGEPVWSMSQTSLLPSHGPGLSVSXRLXPWPTPSPPRLGPSGQXEGVNEPSCSFSRSGLGMLGIDEWQVSRQAERXGAKGXGLRRSMV

SEQ ID NO: 584 - protein, 17 aa, Homo sapiens
EFDGNQGSTLWRRNIRI

SEQ ID NO: 585 - protein, 110 aa, Homo sapiens
  SITE (3): Xaa equals any of the naturally occurring L-amino acids
  SITE (10): Xaa equals any of the naturally occurring L-amino acids
  SITE (11): Xaa equals any of the naturally occurring L-amino acids
  SITE (31): Xaa equals any of the naturally occurring L-amino acids
  SITE (35): Xaa equals any of the naturally occurring L-amino acids
  SITE (52): Xaa equals any of the naturally occurring L-amino acids
  SITE (56): Xaa equals any of the naturally occurring L-amino acids
  SITE (102): Xaa equals any of the naturally occurring L-amino acids
  SITE (105): Xaa equals any of the naturally occurring L-amino acids
GSXRVLLLHXXAGDMGEGPGDGRRVAGDVGXGAGXSHQVAGDMGEGPGDGRXVAGXVGEGPADHSWPWPRSLGLCMVGTLPAGLWASAWLAPCQLVSGRLHXSRXTLLGI

SEQ ID NO: 586 - protein, 92 aa, Homo sapiens
SSELGSRKMSNELDFRSVRLLKNDPVNLQKFSYTSEDEAWKTYLENPLTAATKAMMRVNGDDDSVAALSFLYDYYMGPKEKLDIVLQHWGQE

SEQ ID NO: 587 - protein, 84 aa, Homo sapiens
  SITE (15): Xaa equals any of the naturally occurring L-amino acids
  SITE (24): Xaa equals any of the naturally occurring L-amino acids
  SITE (35): Xaa equals any of the naturally occurring L-amino acids
  SITE (43): Xaa equals any of the naturally occurring L-amino acids
  SITE (48): Xaa equals any of the naturally occurring L-amino acids
  SITE (54): Xaa equals any of the naturally occurring L-amino acids
  SITE (69): Xaa equals any of the naturally occurring L-amino acids
  SITE (79): Xaa equals any of the naturally occurring L-amino acids
AQEDPAPSTQPQPAXPCSYYTTEXWGAQALMAPVXCMGPPGRXQQAPXVEAKAXCFLPSPGEKALGTPXDLDSYIDFSXESSIR

SEQ ID NO: 588 - protein, 168 aa, Homo sapiens
  SITE (150): Xaa equals any of the naturally occurring L-amino acids
GEAAGRRSAPAAPVPRPRAPGQAPGPNMARRSQSSSQGDNPLAPGYLPPHYKEYYRLAVDALAEGGSEAYSRFLATEGAPDFLCPEELEHVSRHLRPPQYVTREPPEGSLLDVDMDGSSGTYWPVNSDQAVLSLIWAGSDLRLQGTEVTXWCSHRPPTAPVSRMRPAG

SEQ ID NO: 589 - protein, 60 aa, Homo sapiens
  SITE (35): Xaa equals any of the naturally occurring L-amino acids
  SITE (36): Xaa equals any of the naturally occurring L-amino acids
  SITE (38): Xaa equals any of the naturally occurring L-amino acids
  SITE (42): Xaa equals any of the naturally occurring L-amino acids
  SITE (46): Xaa equals any of the naturally occurring L-amino acids
RQIQKANRTQSQRTQEKKIYINNFRMCVSLGLFQXXRXSVGXMGCXTKRLFKAILKQFSR

SEQ ID NO: 590 - protein, 57 aa, Homo sapiens
PRVRRNSRIPGDNTSANSAQAEQAVGGERHRAEKHPHLESQEGLTSERLSKYSFEGY

SEQ ID NO: 591 - protein, 132 aa, Homo sapiens
  SITE (33): Xaa equals any of the naturally occurring L-amino acids
  SITE (87): Xaa equals any of the naturally occurring L-amino acids
  SITE (130): Xaa equals any of the naturally occurring L-amino acids
ARAPVWDPPSVVLPEAITFPGQAPKWAQGLYSXRSLHGGPRSSVSGTFLLLLNHWCLTPLLKHVSSWPTSSRGSGAHVWFVLSPSPXPGVLLPCLAPTGLMVNGRAREGRLQTPLGAVSGPGWGRLCEWXSV

SEQ ID NO: 592 - protein, 84 aa, Homo sapiens
  SITE (41): Xaa equals any of the naturally occurring L-amino acids
  SITE (81): Xaa equals any of the naturally occurring L-amino acids
GEAKFSAFCRQGLPWMGSSSEASFRSAQASCSGARRQGLGXGDQNLSVMPPNGRAQTHTPGWMGLGAPVISKKSFPVANNXMTH

SEQ ID NO: 593 - protein, 161 aa, Homo sapiens
  SITE (123): Xaa equals any of the naturally occurring L-amino acids
HLSQTPRSPEALLRGRRRGHLCGVPRIQEPQTAQLVPLEEVVQEYKAKLQGHVEPLRKHLEAVQKMKAKEERRVTELKSQMKSELAAVASEFGRLTRFLAEEQAGLERRLREMHEAQLGRAGXAASRLAEQAAQLSRLLAEAQERPAGGSPAAPGHQGDFQ

SEQ ID NO: 594 - protein, 78 aa, Homo sapiens
CKVPSNSLWTRSWSNITRLPRHDTQEFRTKLHKVFREITQHQFLHHCSCEVKQLTLEKKDSAQGTEGRTWINSSLGAP

SEQ ID NO: 595 - protein, 125 aa, Homo sapiens
  SITE (70): Xaa equals any of the naturally occurring L-amino acids
  SITE (75): Xaa equals any of the naturally occurring L-amino acids
  SITE (81): Xaa equals any of the naturally occurring L-amino acids
  SITE (83): Xaa equals any of the naturally occurring L-amino acids
EKLQPGRHSGGLISVTILYAGINFSCWSALQLRLADRDLVDKGQNWGHMGLHYSVKLVENVIMVLVFKFXGVKVXLNYCHXLXALQLIIAYLISIGFMLLFFQYLHPLRSLFTHNVVDYLHCVCC

SEQ ID NO: 596 - protein, 145 aa, Homo sapiens
  SITE (63): Xaa equals any of the naturally occurring L-amino acids
  SITE (129): Xaa equals any of the naturally occurring L-amino acids
  SITE (133): Xaa equals any of the naturally occurring L-amino acids
  SITE (134): Xaa equals any of the naturally occurring L-amino acids
  SITE (140): Xaa equals any of the naturally occurring L-amino acids
  SITE (142): Xaa equals any of the naturally occurring L-amino acids
  SITE (143): Xaa equals any of the naturally occurring L-amino acids
  SITE (144): Xaa equals any of the naturally occurring L-amino acids
TWRPRLGLRRDRPAFWLKMWRVKKLSLSLSPSPQTGKPSMRTPLRELTLQPGALTNSGKRSPXCSSLTPSLCKLGLQEGSNNSSPVDFVNNKRTDLSSEHFSHSSKWLETCQHESDEQALDPIPQISSXPKTXXGSSRPXGXXXG

SEQ ID NO: 597 - protein, 71 aa, Homo sapiens
  SITE (66): Xaa equals any of the naturally occurring L-amino acids
DSHDFIGKTDDEGLPMVCGPHQIPSTPPTCPLLLRRLPGLLEATPAECVVGRPCLIPGKSLNLSKXASPGS

SEQ ID NO: 598 - protein, 49 aa, Homo sapiens
AISHLGIAPQAMQSFSVRKGQNKNEAAPWLKEACGFGGSDSSRVCANVG

SEQ ID NO: 599 - protein, 83 aa, Homo sapiens
PCGAKKGRLRLRLGNIGQHERLRALPAHLVEGTFPCGSGGLAAQGSPRCPALMATAPYSFSINTVSPIWSLTLEAAGFSEPEE

SEQ ID NO: 600 - protein, 112 aa, Homo sapiens
  SITE (36): Xaa equals any of the naturally occurring L-amino acids
TKVPPGQPAWTSLPMWLQVPRNSWSPPSPQGKREPXWLHCLKGQRSASPRNTVPLSEETAVSLLPSVCFLATSSASHFVYGDTLLLLSSQFRWQCAPPHPPRELWHLVNGWA

SEQ ID NO: 601 - protein, 56 aa, Homo sapiens
ALHLLLCGPGQVCLTSASVLDSKGHTDLPHRGVVRINKCWYSALEKKKKKKKKKKK

SEQ ID NO: 602 - protein, 53 aa, Homo sapiens
TPGLKHFSYLGLPRARITGMSHCAWSRCITFYVWYYSAKPIMLLFLIIESLDL

SEQ ID NO: 603 - protein, 74 aa, Homo sapiens
GSEVESSQEIQLIILVCKFHLQVQLKCKCNGIMLLVLLEAKIPRIGKFVCACWVSEKWAGNAVFLGTLLGWKET

SEQ ID NO: 604 - protein, 110 aa, Homo sapiens
  SITE (26): Xaa equals any of the naturally occurring L-amino acids
  SITE (108): Xaa equals any of the naturally occurring L-amino acids
  SITE (110): Xaa equals any of the naturally occurring L-amino acids
RWILFIGALIGSSICGQEKFFGDQVXRINVRNGDEISKLSQLVNSNNLKLNFWKSPSSFNRPVDVLVPSVSLQAFKSFLRSQGLEYAVTIEDLQALLDNEDDEVQHNXGX

SEQ ID NO: 605 - protein, 73 aa, Homo sapiens
  SITE (18): Xaa equals any of the naturally occurring L-amino acids
SDCLLTRTPKWSPACFRXLTAKMTSETINHQSTTTLISLFYMYENHHHHGSYLQFSTFYRSSPAGHILLKEPK

SEQ ID NO: 606 - protein, 19 aa, Homo sapiens
ADAWVDLSAPFEQSSPETM

SEQ ID NO: 607 - protein, 61 aa, Homo sapiens
  SITE (31): Xaa equals any of the naturally occurring L-amino acids
GPSGCLDPFLEAPCLPQPWLLGLSRGGSFLXCFVLRRSLTVTKAGVQRHDLGSLEPPSPRV

SEQ ID NO: 608 - protein, 100 aa, Homo sapiens
  SITE (88): Xaa equals any of the naturally occurring L-amino acids
PTRPLQSSRTAAGSRPAPGALGQTPAASSPAWGAEHSLLVPPHLPPGRNHPSPSLGRGRGCRERCRRRGGHPGPGPDGAPGPAIAKVXTMGARRVQEVGS

SEQ ID NO: 609 - protein, 171 aa, Homo sapiens
  SITE (137): Xaa equals any of the naturally occurring L-amino acids
  SITE (145): Xaa equals any of the naturally occurring L-amino acids
  SITE (149): Xaa equals any of the naturally occurring L-amino acids
  SITE (150): Xaa equals any of the naturally occurring L-amino acids
  SITE (152): Xaa equals any of the naturally occurring L-amino acids
  SITE (158): Xaa equals any of the naturally occurring L-amino acids
EESEALDIKYIEVTSARSRCHDGPQHCSSPSVTPPFGSPRSGGLLLSRDVPRETRSSSESLIFSGNQGRGHQRPLPPSEGLSPRPPNSPSISIPCMGSKASSPHGLGSPLVASPRLEKRLGGWPHSGAEDLWLQQPXADVSYMLXPAFXXQXLSISHXQILKASNSSQLTA

SEQ ID NO: 610 - protein, 45 aa, Homo sapiens
MSSCFSFLFTSTFLLFSALFFTFQHSKYCIHSKYLIILFVSITRT

SEQ ID NO: 611 - protein, 62 aa, Homo sapiens
  SITE (1): Xaa equals any of the naturally occurring L-amino acids
  SITE (25): Xaa equals any of the naturally occurring L-amino acids
  SITE (43): Xaa equals any of the naturally occurring L-amino acids
  SITE (44): Xaa equals any of the naturally occurring L-amino acids
  SITE (46): Xaa equals any of the naturally occurring L-amino acids
XGRRFTRRDGRLLLGSCEELFCGVXMDNTTRLSLSNINLMLVXXLXLCELYDYYKLSRHDLC

SEQ ID NO: 612 - protein, 57 aa, Homo sapiens
ADAWAIRCPVMAGGLFSIDKSYFFELGTYDPGLDVWGGENMELSFKVWMCGGEIEII

SEQ ID NO: 613 - protein, 77 aa, Homo sapiens
  SITE (27): Xaa equals any of the naturally occurring L-amino acids
  SITE (62): Xaa equals any of the naturally occurring L-amino acids
  SITE (68): Xaa equals any of the naturally occurring L-amino acids
FITVTYGLLLPLRRGHECNYWTDVTGXSLRAQRSPCSCADVHKRRRGSSFVCFTWARVWGAXSLSDSXTPFPRLEHA

SEQ ID NO: 614 - protein, 31 aa, Homo sapiens
PRVRAQSGVTALQPGDSVSKKKKISIVKNGC

SEQ ID NO: 615 - protein, 48 aa, Homo sapiens
VISSLKFFLHGPLSLEAWLGNHARRVSITPQAHLVIGVPHSRAVADLI

SEQ ID NO: 616 - protein, 52 aa, Homo sapiens
IANVYLVPAMCKQVSVPLWTKSTLVFGIAQEWGSWGPGLAAIGSMWQELLGG

SEQ ID NO: 617 - protein, 101 aa, Homo sapiens
  SITE (77): Xaa equals any of the naturally occurring L-amino acids
SSSLMEPLSTVDIPPVFLMKTSISSFQKSPFVYMIQYIGLSFKNIREQQVKTKHSSSLWGINKRTDFKLPSFLFLLXHSVVRLSCSLELTKWLSLGSLIVL

SEQ ID NO: 618 - protein, 109 aa, Homo sapiens
  SITE (1): Xaa equals any of the naturally occurring L-amino acids
  SITE (102): Xaa equals any of the naturally occurring L-amino acids
XHSSGEMSSRGSPTAMHRDHLVHSQLQSQPLELGLRGLLQQEIREHVLRGQVVADLAGYHPLPRILGYHFCCKEGGWEQVDDISPMPSADEGVTIEIDRMDXYFIPHSK

SEQ ID NO: 619 - protein, 92 aa, Homo sapiens
PGAHRGGPLLRRRAAGAIPLRSHLFFNLLNIGGKTHRCGGGCISSWGSLGLASLLINSCSSLPFASLCRGLNLPLVGEASTEQAQVRESRLA

SEQ ID NO: 620 - protein, 84 aa, Homo sapiens
  SITE (37): Xaa equals any of the naturally occurring L-amino acids
  SITE (83): Xaa equals any of the naturally occurring L-amino acids
DRATALQPGNKSETPSQKRKKKSSVGTREKGLSFLKXLLIGGHLSLVGFERINLDRPTSGDLWKERTRKGCCLQQEVNPETTXS

SEQ ID NO: 621 - protein, 48 aa, Homo sapiens
  SITE (4): Xaa equals any of the naturally occurring L-amino acids
  SITE (17): Xaa equals any of the naturally occurring L-amino acids
  SITE (25): Xaa equals any of the naturally occurring L-amino acids
  SITE (36): Xaa equals any of the naturally occurring L-amino acids
MDRXREQFALLGSCCSXKFNPKGKXLKITRDSPKNXEVGVWGFSLVGF

SEQ ID NO: 622 - protein, 52 aa, Homo sapiens
  SITE (42): Xaa equals any of the naturally occurring L-amino acids
TPRDMALYFHIASLQIAVPAKFSGSRLLILALWEAEVGGSKXQPGPTWQNPT

SEQ ID NO: 623 - protein, 24 aa, Homo sapiens
TDKLAFLIKKLRKLIHIFTKLVTS

SEQ ID NO: 624 - protein, 105 aa, Homo sapiens
GTRKGQLTNIVSPTAATTPRITRSNSIPTHEAAFELYSGSQMGSTLSLAERPKGMIRSGSFRDPTDDVHGSVLSLASSASSTYSSQIRKLRRGTGIHSQGKSGPP

SEQ ID NO: 625 - protein, 56 aa, Homo sapiens
ENKKFVRWRHIIGKVKRQGTSGGNFFVLQRLLSLIYVEIRFAFYKDSLSCTLISKI

SEQ ID NO: 626 - protein, 80 aa, Homo sapiens
  SITE (9): Xaa equals any of the naturally occurring L-amino acids
  SITE (67): Xaa equals any of the naturally occurring L-amino acids
  SITE (70): Xaa equals any of the naturally occurring L-amino acids
  SITE (76): Xaa equals any of the naturally occurring L-amino acids
EQKQDCFSXECRSVIQEQAAALGLAMFSLLVRRCTCLLKESAKAQLSSPEDQDDQDGIKVSSLSRTXRSXFPVSKXCKIW

SEQ ID NO: 627 - protein, 60 aa, Homo sapiens
AARATLSGVMFLLQAFLVPHLDSMALTTDIFSICSPLFPESVVSNPNRVVLYICIYTFID

SEQ ID NO: 628 - protein, 58 aa, Homo sapiens
  SITE (3): Xaa equals any of the naturally occurring L-amino acids
  SITE (5): Xaa equals any of the naturally occurring L-amino acids
NKXTXNTFKKKQVADDVCVSAPELPMLLHYVPGIARAINIAQSIGCLVLEQKRVLLLN

SEQ ID NO: 629 - protein, 69 aa, Homo sapiens
  SITE (10): Xaa equals any of the naturally occurring L-amino acids
  SITE (13): Xaa equals any of the naturally occurring L-amino acids
  SITE (40): Xaa equals any of the naturally occurring L-amino acids
  SITE (62): Xaa equals any of the naturally occurring L-amino acids
QHFGKIVLGXRIXRQFQCIGILDVSLHFVIRFRRVIGFLXTAGLQEGYYLPLRFNGGIYGIXPPCEVQC

SEQ ID NO: 630 - protein, 24 aa, Homo sapiens
NLKMAKSVLSYILCKHYQWQLMDM

SEQ ID NO: 631 - protein, 53 aa, Homo sapiens
  SITE (44): Xaa equals any of the naturally occurring L-amino acids
EDPQNLADPAYRRRRIIMQNMREHRNNIQVAIDALYSQRRRKSXVDESGNTYP

SEQ ID NO: 632 - protein, 53 aa, Homo sapiens
GRVTTYSSRSSQYPQADSTEAVFQTCSVKGKFQLCELNTHITKQFLRMLLSSF

SEQ ID NO: 633 - protein, 84 aa, Homo sapiens
KLSHLTVNQKMFLPLVCLPPETQTCRLPLTSAVPPSLHVPKRQESQVLGAVKSEDQENGGEEVTGKAGTKDGRLQKHSEFPCNR

SEQ ID NO: 634 - protein, 72 aa, Homo sapiens
STCCQRNSLVQHWDQVGLKVLAKMVPGPRPALSGSGLQQGLHIGATHRLPTPITPLGLYSLSESVHGPCNDV

SEQ ID NO: 635 - protein, 75 aa, Homo sapiens
  SITE (70): Xaa equals any of the naturally occurring L-amino acids
CSSRARCHTSKGSKCAYVDAAGIPAVFLLKSRVIHLLLAIWRGLRQELVLKHKQAPRMVLDMEERVLLGXNDLSF

SEQ ID NO: 636 - protein, 40 aa, Homo sapiens
IKSVTRAAPEGASDFDMEIALRELIIVDFFSFPSIEELLH

SEQ ID NO: 637 - protein, 119 aa, Homo sapiens
  SITE (72): Xaa equals any of the naturally occurring L-amino acids
  SITE (81): Xaa equals any of the naturally occurring L-amino acids
  SITE (109): Xaa equals any of the naturally occurring L-amino acids
  SITE (115): Xaa equals any of the naturally occurring L-amino acids
KNEAPSPSFSPLGQSHLSQLSHQTSNFLIQISMAVYMQSFAKNRCSPSLTSCRLYGILPSRISFKPQTILMXSCLNYRARXEKIFVRILTALSSNFYFKYLCFNKINMXHFHLYXFGIK

SEQ ID NO: 638 - protein, 61 aa, Homo sapiens
  SITE (57): Xaa equals any of the naturally occurring L-amino acids
  SITE (60): Xaa equals any of the naturally occurring L-amino acids
SHSSHPRSPQLSKQLQLWPKTSCIRDKSLLMAALILELQNHEICGYGHDLDFGDGSXVFXM

SEQ ID NO: 639 - protein, 61 aa, Homo sapiens
FIYFFCSYEGRFRSVCPSWFQQKHGVSGWVMLLAIENIHNFSPPSQLMHLEFVSKVYIQEC

SEQ ID NO: 640 - protein, 53 aa, Homo sapiens
CQGPMQMRLIPTLVSIMQAPADKIPAGLCAVSGRVCVCVCERDLQVPPTDASS

SEQ ID NO: 641 - protein, 24 aa, Homo sapiens
WLCFRSFHCYWGFFLEKLLYFHNI

SEQ ID NO: 642 - protein, 75 aa, Homo sapiens
  SITE (16): Xaa equals any of the naturally occurring L-amino acids
VGAQYIKPKEWFWKVXNQRELKYIWAKTQVWMSTIYSRQLHSSIKIPILRRDYEYHLIIINTIISSPKYTIYSQT

SEQ ID NO: 643 - protein, 45 aa, Homo sapiens
  SITE (41): Xaa equals any of the naturally occurring L-amino acids
RLSIPYPRCLGPEVFWISDFFVAGINRSESPRPANFFIFSXSRVS

SEQ ID NO: 644 - protein, 93 aa, Homo sapiens
  SITE (89): Xaa equals any of the naturally occurring L-amino acids
  SITE (91): Xaa equals any of the naturally occurring L-amino acids
LLFLLPAVPHPPGLSHSIPGCPCPSGGWLVIQRRMRNMVSELLTSHLGYALELFCKPGFPTPNSTQVTFPESLHKRAESVYFSRFQKTXLXPL

SEQ ID NO: 645 - protein, 47 aa, Homo sapiens
KHSAISYFSNLSHLKWGDSLSLYDEFARFAVYVASTVLKEFIFYIVK

SEQ ID NO: 646 - protein, 51 aa, Homo sapiens
  SITE (14): Xaa equals any of the naturally occurring L-amino acids
WTIPGDQKRPTVIXALWPLIFPVSHFFSPCLTCSFSLVPLISPLPWNLISL

SEQ ID NO: 647 - protein, 65 aa, Homo sapiens [sequence omitted]

SEQ ID NO: 648 - protein, 91 aa, Homo sapiens
  SITE (51): Xaa equals any of the naturally occurring L-amino acids
EKWPEEQVIRLLQNCKVFQGQLDCLAISTIQALTAVMNKSPAAKEVFKERXGYTHMLEVLKSLGQPPLELLKELMNMAVEGDHTSVGDFGH

SEQ ID NO: 649 - protein, 28 aa, Homo sapiens
KCIWLNNCLSQYLNARLSIPLPAHPTPI

SEQ ID NO: 650 - protein, 32 aa, Homo sapiens
  SITE (17): Xaa equals any of the naturally occurring L-amino acids
VCLILKLVLHEEVTGFXYSLSLSCSWSLTISI

SEQ ID NO: 651 - protein, 54 aa, Homo sapiens
ILHLLKTWYFAGRTSGFVLNITLNTKNLYKSVFTGLKLLLLSEYVGFLRALGGI

SEQ ID NO: 652 - protein, 62 aa, Homo sapiens
NQKESVLRIISTKRHSSFHCLSFFFCPSLSLGKLYELNVSDRTNSLKRGRARWLTAIIPALW

SEQ ID NO: 653 - protein, 40 aa, Homo sapiens
NKMANREKIATDEDTDGKFEASYVSPRALYVLNDCWISKD

SEQ ID NO: 654 - protein, 45 aa, Homo sapiens
  SITE (29): Xaa equals any of the naturally occurring L-amino acids
ENGLMHLYYPFGVYFSFFPHFHWMTKVSXAGLKITSFVVPLVQFC

SEQ ID NO: 655 - protein, 53 aa, Homo sapiens
  SITE (20): Xaa equals any of the naturally occurring L-amino acids
  SITE (38): Xaa equals any of the naturally occurring L-amino acids
FKTNYNLFNGIVDEINGMHXQIRTFREITTLRRSQMEXLEMKNTISEISNFIN

SEQ ID NO: 656 - protein, 42 aa, Homo sapiens
YSHDFDNDGLLSNSHSLTLLLLSGTHSSRLRFFKYLKVRISH

SEQ ID NO: 657 - protein, 94 aa, Homo sapiens
CPTPVLKLQGPSRHGGTAGVKLAVPSPRNSERAWESAPGDGWAHSSTSYRSGNGHPLFPVFQQILKLKRVDSYNNYISHVKKYDSEGIKPALLI

SEQ ID NO: 658 - protein, 34 aa, Homo sapiens
RARHLNFVLFIFFETESHSCLGDRVTLLLKKKKI

SEQ ID NO: 659 - protein, 45 aa, Homo sapiens
  SITE (2): Xaa equals any of the naturally occurring L-amino acids
PXSKKKKRKPFHHSLIYKIFLGLLLCRALSFQSTPSLLAFNTTDL

SEQ ID NO: 660 - protein, 112 aa, Homo sapiens
  SITE (60): Xaa equals any of the naturally occurring L-amino acids
DRWALQTPTELQGNITQIQWGSRKNLLAVNSVISVAILSERAMSSHFHQQVAAMQVSPSXLNVCFLSTGVAHSLRTDMHISGVFATKDAVAVWNGRQVAIFELSGAAIRIQG

SEQ ID NO: 661 - protein, 96 aa, Homo sapiens
  SITE (38): Xaa equals any of the naturally occurring L-amino acids
ENAAAESGSESSSQEATPEKESLAESAAAYTKATARKXLLEKVERGRGLLRLNDMASTDDGTLQSRLVMRTQGSLRLILNTKLWAQMQIDKASEKS

SEQ ID NO: 662 - protein, 33 aa, Homo sapiens
  SITE (27): Xaa equals any of the naturally occurring L-amino acids
DITCLSTDLPFRRRNWGYRLRLGGCSXPRSRHC

SEQ ID NO: 663 - protein, 76 aa, Homo sapiens
  SITE (59): Xaa equals any of the naturally occurring L-amino acids
  SITE (62): Xaa equals any of the naturally occurring L-amino acids
  SITE (75): Xaa equals any of the naturally occurring L-amino acids
WRQPACPGHTAHRYWVRYYPGCFFKVFLEETDISVGRVKQIAFPNVDRWPVHRARPCPXQPXLRGSSSVCSTFGXA

SEQ ID NO: 664 - protein, 37 aa, Homo sapiens
  SITE (5): Xaa equals any of the naturally occurring L-amino acids
  SITE (26): Xaa equals any of the naturally occurring L-amino acids
LMRVXFYVIGNVLDEIFSEFPISCLXGRRRIFKFLPA

SEQ ID NO: 665 - protein, 52 aa, Homo sapiens
  SITE (18): Xaa equals any of the naturally occurring L-amino acids
  SITE (19): Xaa equals any of the naturally occurring L-amino acids
  SITE (29): Xaa equals any of the naturally occurring L-amino acids
  SITE (45): Xaa equals any of the naturally occurring L-amino acids
KLLGVELKSEKIVSTPCXXTLLYDNCNQXNLFLKCTPPQWLHKKXHWRLQSK

SEQ ID NO: 666 - protein, 106 aa, Homo sapiens
  SITE (49): Xaa equals any of the naturally occurring L-amino acids
  SITE (62): Xaa equals any of the naturally occurring L-amino acids
  SITE (79): Xaa equals any of the naturally occurring L-amino acids
  SITE (84): Xaa equals any of the naturally occurring L-amino acids
APVSGLLVCFVLGWESRWKKSEHLVVCWVLCSQGWHNQKGLSLCSKKKXLSGLAWVGHAVSXHFKKVKVGRTLEGQLFXTSLLXIRKTHPHFKKKRGAAPKRSPRA

SEQ ID NO: 667 - protein, 41 aa, Homo sapiens
KINLLHVKYINFLIGSVCEFFQILSHYLCLVYEDTYLERFK

SEQ ID NO: 668 - protein, 149 aa, Homo sapiens
  SITE (84): Xaa equals any of the naturally occurring L-amino acids
  SITE (138): Xaa equals any of the naturally occurring L-amino acids
LQQATCSPLSDIMSFNCSTRNCSSRPIGGRCIVPVAQVTTTSTTDADCLGGICLPSSFQTGSWLLDHCQETCCEPTACQPTCYXRTSCVSNPCQVTCSRQTTCISNPCSTTYSRPLTFVSNGCQPLGSISSVCNQWAXSLLSANQWEES

SEQ ID NO: 669 - protein, 63 aa, Homo sapiens
  SITE (45): Xaa equals any of the naturally occurring L-amino acids
  SITE (46): Xaa equals any of the naturally occurring L-amino acids
  SITE (55): Xaa equals any of the naturally occurring L-amino acids
REGRASDDWQWSGEHRHLSSSTCPSCGTGQASGLFVVHGLFRWGXXHFEPVPLNXLLLHGKNR

SEQ ID NO: 670 - protein, 134 aa, Homo sapiens
  SITE (124): Xaa equals any of the naturally occurring L-amino acids
GLTAGTPGRGSKQAGGASPGGLLGRMYPGCPAAALLGRVPATSRQDTGGMALPTEPWAHGTFCRVSREQRASFPHSVRPGIFLSPALTPTIPVMGPGARRALSLPRKPMQAGSQASHAVSFYPXWGQLPLCLIV

SEQ ID NO: 671 - protein, 102 aa, Homo sapiens
  SITE (49): Xaa equals any of the naturally occurring L-amino acids
  SITE (55): Xaa equals any of the naturally occurring L-amino acids
  SITE (68): Xaa equals any of the naturally occurring L-amino acids
  SITE (69): Xaa equals any of the naturally occurring L-amino acids
  SITE (73): Xaa equals any of the naturally occurring L-amino acids
  SITE (77): Xaa equals any of the naturally occurring L-amino acids
  SITE (80): Xaa equals any of the naturally occurring L-amino acids
GSSRGKLRPPEENGRSQPVRHASQELSQVQTHISDTNVILSMDNNRSLXLDSIIXAVRTQYELDLHRXXRTKXKPCXQTXYQEFPDHWQGDIGDDLEEQPDW

SEQ ID NO: 672 - protein, 41 aa, Homo sapiens
TCTILSIRILYKTTQILALPSQKLHFKGAQQMQCIKMLLND

SEQ ID NO: 673 - protein, 103 aa, Homo sapiens
  SITE (13): Xaa equals any of the naturally occurring L-amino acids
  SITE (63): Xaa equals any of the naturally occurring L-amino acids
  SITE (68): Xaa equals any of the naturally occurring L-amino acids
  SITE (78): Xaa equals any of the naturally occurring L-amino acids
AGRARPVRAARKXRWGPGGRGWRRRRSPWLPSPKPRSRWCLRSWIDTSLAGTNRMSKENFVRXTVYYXTLTGKQIGNXKLSKIFFSWYCNLVWSCGLGLNNVH

SEQ ID NO: 674 - protein, 79 aa, Homo sapiens
DSWPRAHAACWPQQDTVRAGKCSTAFRNLTTAYTQLTSQCKQKLMTSSKKIPYSYDNGKPVIHCNHTSLAMFNTSYYKH

SEQ ID NO: 675 - protein, 65 aa, Homo sapiens
  SITE (14): Xaa equals any of the naturally occurring L-amino acids
DLVPAEKLSKPSQXLTPSGWGRRGSSMPLAVRFSQAEPQCPHLDLGGRGKVGLKGLEGSSGSNIL

SEQ ID NO: 676 - protein, 132 aa, Homo sapiens
  SITE (97): Xaa equals any of the naturally occurring L-amino acids
  SITE (104): Xaa equals any of the naturally occurring L-amino acids
  SITE (111): Xaa equals any of the naturally occurring L-amino acids
  SITE (112): Xaa equals any of the naturally occurring L-amino acids
  SITE (116): Xaa equals any of the naturally occurring L-amino acids
GWYFKSIHFTCFFLAHPLSPRYTVLLHNCGRILQGGNVDQTFLLSFLTSLNYKYLFCRYYSCKCPCILFMESTFSAADNDQIFHIESSLNKYVCFVXASLPSNXEHSGVKXXSRAXYLSSRCYFQFWSSYLG

SEQ ID NO: 677 - protein, 74 aa, Homo sapiens
  SITE (33): Xaa equals any of the naturally occurring L-amino acids
  SITE (53): Xaa equals any of the naturally occurring L-amino acids
  SITE (55): Xaa equals any of the naturally occurring L-amino acids
IVADHFTSAFRSEVSLISLPDTPLPSLFPPSFXHFQAPFEGATSKAWSSPFQXTXITFPLFFPQSKKPIPPQSQ

SEQ ID NO: 678 - protein, 113 aa, Homo sapiens
PHCPSVTRIPTGPDPEPRGVRPSPGAAGSPAAAAARRPRKLCPQLMTVINQFLTKDKDTYMDTVNRYHLTEPERNTSSKLKDCVTDTMTPEETEAVVQQLEEINNQCADTILK

SEQ ID NO: 679 - protein, 145 aa, Homo sapiens
  SITE (80): Xaa equals any of the naturally occurring L-amino acids
  SITE (114): Xaa equals any of the naturally occurring L-amino acids
  SITE (131): Xaa equals any of the naturally occurring L-amino acids
  SITE (138): Xaa equals any of the naturally occurring L-amino acids
  SITE (142): Xaa equals any of the naturally occurring L-amino acids
PSGPSAAMRSSVSRQTYSTKGGFSSNSASGGSGSQARTSFSSVTVSRSSGSGGGARCGPGTGGFGSRSLYNLGGHKSISXSVAGGALLGRALGGFGFGSRAFMGQGAGRQTFGXACPPGGIQEVTVNQNLXNPLHVEXEPEXSAN

SEQ ID NO: 680 - protein, 58 aa, Homo sapiens
  SITE (44): Xaa equals any of the naturally occurring L-amino acids
  SITE (55): Xaa equals any of the naturally occurring L-amino acids
HGDCEKILSIAPALRVPISSSPRPPSSQGLSGQVAPKYRLPRAXPGHSQHELGFXQGC

SEQ ID NO: 681 - protein, 82 aa, Homo sapiens
QKQPVESIDKAHNGELVSQPQAPFAVPGLLCEQESTPPCPAGDHIMIPLGKLLIAGQASLVRKTSAPAAYSCLLVHSLIHSC

SEQ ID NO: 682 - protein, 93 aa, Homo sapiens
GMLENPSKELRRRSCRTRPECSHYEGGPGCPNAGFTRVFTELRPHTRLPRWQATTPLNWHFHIFTNAAAASQKNKQTNKKPSNSVFINIKHEY

SEQ ID NO: 683 - protein, 43 aa, Homo sapiens
NHPILRAYLELSDLGVEVDINLNRKRKQKKKEISHPMTMQEQT

SEQ ID NO: 684 - protein, 124 aa, Homo sapiens
  SITE (62): Xaa equals any of the naturally occurring L-amino acids
  SITE (90): Xaa equals any of the naturally occurring L-amino acids
  SITE (108): Xaa equals any of the naturally occurring L-amino acids
  SITE (113): Xaa equals any of the naturally occurring L-amino acids
CPCRAGQSGPAKAPSSVSTDPHVSSPGPSVLLRGRALQVHMGSMSPPSAWPCVLDGPETRQXLCQPPKPCVTFTCTHGRMFIGWAAVPPXSPSPGAFLFHPCFWTWGXLPIAXSYLVLFPSPMW

SEQ ID NO: 685 - protein, 43 aa, Homo sapiens
IDKEEREGHNTKEQEVLKCACYGLAYKLSALILPSIFHNTIRN

SEQ ID NO: 686 - protein, 61 aa, Homo sapiens
  SITE (55): Xaa equals any of the naturally occurring L-amino acids
PVLGSGSVGTGTESARLKTAASLPGEGIHPLRGSCRWPISCSENSEGLMSSSEAXGQLRVG

SEQ ID NO: 687 - protein, 50 aa, Homo sapiens
  SITE (10): Xaa equals any of the naturally occurring L-amino acids
  SITE (14): Xaa equals any of the naturally occurring L-amino acids
  SITE (35): Xaa equals any of the naturally occurring L-amino acids
  SITE (48): Xaa equals any of the naturally occurring L-amino acids
KSIFTFLGKXHRSXPVGSGSSKSGGNLVPPIPFPXVNFRNYKEAIKYXGN

SEQ ID NO: 688 - protein, 72 aa, Homo sapiens
  SITE (58): Xaa equals any of the naturally occurring L-amino acids
  SITE (66): Xaa equals any of the naturally occurring L-amino acids
PGLAAPSLPKKLKPEQIRVEIKREMLPGALHGELHPSEGPWGAPREDMTPLNLSSRAXRCATSAVXSAASSS

SEQ ID NO: 689 - protein, 69 aa, Homo sapiens
  SITE (12): Xaa equals any of the naturally occurring L-amino acids
  SITE (29): Xaa equals any of the naturally occurring L-amino acids
  SITE (30): Xaa equals any of the naturally occurring L-amino acids
TICSLPESIKMXTQLGVVAHTCNPQHFGXXRQNCLSPGVQDQPGQHNGTLSLKKKKKIERLPSNTCHIS

SEQ ID NO: 690 - protein, 102 aa, Homo sapiens
  SITE (91): Xaa equals any of the naturally occurring L-amino acids
  SITE (96): Xaa equals any of the naturally occurring L-amino acids
IPQTPIAMDCCASRGCSVPTGPATTICSSDKSCRCGVCLPSTCPHTVWLLEPTCCDNCPPPCHIPQPCVPTCFLLNSCQPTPGLETLNLTXFTQPXCEPGSQ

SEQ ID NO: 691 - protein, 72 aa, Homo sapiens
SVATLLVVMFPFLSNRSMTTFQLECTHCPRNPAFQGGSAFDSARRFVGPDGVGLWLRTWRRCAFASIVGHSF

SEQ ID NO: 692 - protein, 88 aa, Homo sapiens
RALDPHSGLADPCRGTPTGWHRGVQLSPGLVGDHGWLPAELCGAHRRASGLMTLSRKPLCLSPRGPLLKTFWASQIPAKPQLGHLDSW

SEQ ID NO: 693 - protein, 80 aa, Homo sapiens
SYSYVVNTHDQILSKAPSAGTSNWRIRTLNMAFGQYEHSDQGACIIFFMFLLCNLFYKMFSLIPVYKFFPVYSLCFIFHA

SEQ ID NO: 694 - protein, 172 aa, Homo sapiens
  SITE (122): Xaa equals any of the naturally occurring L-amino acids
  SITE (128): Xaa equals any of the naturally occurring L-amino acids
  SITE (130): Xaa equals any of the naturally occurring L-amino acids
  SITE (137): Xaa equals any of the naturally occurring L-amino acids
  SITE (141): Xaa equals any of the naturally occurring L-amino acids
  SITE (146): Xaa equals any of the naturally occurring L-amino acids
  SITE (147): Xaa equals any of the naturally occurring L-amino acids
LRKGPPHQKGSKRPSKANTTALQDPMVSPRLDVAPTGLQGPQGGLKPQGARWVCRSFRRHLDQCEHQIGPREIEFQLLNSAQEPLFHCNCTRRLARFLRLHSPPEVTNMLWELLGTTCFKLXPPLDCXEXKNCSRDXRAIXVSARXXGGFSRGDTSSRIKAQMRGSHGLQSP

SEQ ID NO: 695 - protein, 61 aa, Homo sapiens
  SITE (59): Xaa equals any of the naturally occurring L-amino acids
TFSSLRSRANFLKQEDKNISASHLGPLERGTEVAFQIGIFKNMIHFPIIPCLVILAFSXTS

SEQ ID NO: 696 - protein, 119 aa, Homo sapiens
  SITE (59): Xaa equals any of the naturally occurring L-amino acids
  SITE (108): Xaa equals any of the naturally occurring L-amino acids
VSAHCILHLPGSSDSPTSASQVAGVTGMHHHTQLIFCVFSRDEVLPCWPGWSRTPDLRXSTHLSLPKCWDYRHEPPCSAVCVCVYYLYVYAYYIKIYIHYIYNVVCVXVCVCVYIYILR

SEQ ID NO: 697 - protein, 72 aa, Homo sapiens
  SITE (57): Xaa equals any of the naturally occurring L-amino acids
RSHPPLGDTVRHCLKKKKKNSPRGNIPTTGHGWKTAHTYHMAMGSGKFRALLAGKTXHTKELYATGSPNCLT

SEQ ID NO: 698 - protein, 156 aa, Homo sapiens
  SITE (39): Xaa equals any of the naturally occurring L-amino acids
  SITE (132): Xaa equals any of the naturally occurring L-amino acids
  SITE (134): Xaa equals any of the naturally occurring L-amino acids
  SITE (136): Xaa equals any of the naturally occurring L-amino acids
KPATASALLLLLLGLAWTQGSHGWGADASSLQKRAGRAXSGESLSSSYPAGPLVPLGLAPGSGQSEILFHSSIQWLSQPGAGWQEVAAVTSKNYNYNQHAYPTAYGGKYSVKTPAKVRPATTLSSRWGLCMXDXEXGFHCRGPLGWFSGGGIPALF

SEQ ID NO: 699 - protein, 62 aa, Homo sapiens
TTKGSVHCFVLKDHPLRSSSDLEFLHNFLSLYALWQVQQALFPVSKLVENHPYILQLSVLTR

SEQ ID NO: 700 - protein, 69 aa, Homo sapiens
  SITE (57): Xaa equals any of the naturally occurring L-amino acids
FSNNKSAANTLCNISFFFLLQTGFHHVAQAGLKLLGSSSPPTLASQSAGITGMSHCXQPHYLYLKAKLC

SEQ ID NO: 701 - protein, 60 aa, Homo sapiens
  SITE (43): Xaa equals any of the naturally occurring L-amino acids
  SITE (50): Xaa equals any of the naturally occurring L-amino acids
SFPCLAVKNRFCPSRGILWRVLFFMLLNIMSIIDPCMQPFLLXGLHGALXPSFPREPVFF

SEQ ID NO: 702 - protein, 26 aa, Homo sapiens
  SITE (26): Xaa equals any of the naturally occurring L-amino acids
INDMAPPKKKKKKKKKKKKKKKKKKX

SEQ ID NO: 703 - protein, 60 aa, Homo sapiens
  SITE (48): Xaa equals any of the naturally occurring L-amino acids
ICMSVPLKGTSLPNQNNQGRMAEYRELLTRHSETQIQIPALSPTSSMXQEAPQAFRDLDY

SEQ ID NO: 704 - protein, 54 aa, Homo sapiens
  SITE (45): Xaa equals any of the naturally occurring L-amino acids
FTDVLLELMDEYSKVQLTLEYRLELCKSAYIHYFLSPLPPEDRQXQPSSPQPTQ

SEQ ID NO: 705 - protein, 109 aa, Homo sapiens
ATWGEADNGILQRREEMEGEFLFLGWLRGMVTFAIITFYPSPTPSPGQLSGNRRISAAIIFHGLSRSHDLQVGSRERRVSLHANSKLFRIKCRSSCPEWQPVEAPARTK

SEQ ID NO: 706 - protein, 78 aa, Homo sapiens
  SITE (68): Xaa equals any of the naturally occurring L-amino acids
RVPKHKLSIEVRISMSFGGGKAFGWYFTGTSFYQVFIIWYVPRVSSCLHHCVIAENTLKVSFDPENLXTIAADVPAAT

SEQ ID NO: 707 - protein, 75 aa, Homo sapiens
  SITE (74): Xaa equals any of the naturally occurring L-amino acids
KEKCSRTDRVESMGGVGKPSQATSCLATPLQGGHRLRSLMLLGLESEADLKVSHLVCSRPQDYGRVLGHCSQHXK

SEQ ID NO: 708 - protein, 54 aa, Homo sapiens
  SITE (27): Xaa equals any of the naturally occurring L-amino acids
  SITE (45): Xaa equals any of the naturally occurring L-amino acids
TVICTLNNIYYIYTFCLVTQMILTVHXVLPLAFLIKPYYLEDLSXRKKKKKKKK

SEQ ID NO: 709 - protein, 75 aa, Homo sapiens
LNDNGHELKLNSDRAGYGCIINWILNLYLGFSFNNWKCILSKSLIGTFYRNECDLNSFMLRGCQIENQVDPHHLQ

SEQ ID NO: 710 - protein, 115 aa, Homo sapiens
AEALFRFHSALDIRVYIFCRARWLTPVISASQSAGIAGLSSCAQPMLSLLPSGQNWHNTGFILESNLTNVMKVVRLFIKCPCLWGHEKIHTESIKNVLNMERPLSNSDVMKVVVF

SEQ ID NO: 711 - protein, 55 aa, Homo sapiens
  SITE (49): Xaa equals any of the naturally occurring L-amino acids
AFHCFYFFVYKYTIILHLKPLGFRIQNFPLFRENIYNVDYITPSMGPGXHPIIKH

SEQ ID NO: 712 - protein, 60 aa, Homo sapiens
YVGKGSLGRGIQSHFACHPLRSQLLPISCDQCVASLELRAACLDCLGFYRCHLVNSPWSL

SEQ ID NO: 713 - protein, 77 aa, Homo sapiens
QWLSGSPDNWPGTLKTRNKVERTPCWWRKTAGLYHQNVPHRSSKAASDVLKQGPVASSRSGGIIYDSLLSERARQCL

SEQ ID NO: 714 - protein, 120 aa, Homo sapiens
  SITE (10): Xaa equals any of the naturally occurring L-amino acids
  SITE (15): Xaa equals any of the naturally occurring L-amino acids
  SITE (16): Xaa equals any of the naturally occurring L-amino acids
  SITE (112): Xaa equals any of the naturally occurring L-amino acids
SGLRGPACFXSARIXXFLQFLVFWITIQDNQSLKKGSSTYPSCGTYRTLLQKPNMSKQEKGNILWLTMVWLSLACLQRKNYNDCMLNTVITDCYHWKNFGEASSTWNLFHGXWNSGGQWL

SEQ ID NO: 715 - protein, 89 aa, Homo sapiens
  SITE (83): Xaa equals any of the naturally occurring L-amino acids
  SITE (86): Xaa equals any of the naturally occurring L-amino acids
  SITE (89): Xaa equals any of the naturally occurring L-amino acids
ELETRLTDLGNSGFLSLWTSELGGRRDREPEGRTRKNSKKGMGRNGNVTGHVASVSHQGLWEFLGPKCGSVGGLRDKLSGTEXALXRCX

SEQ ID NO: 716 - protein, 84 aa, Homo sapiens
  SITE (1): Xaa equals any of the naturally occurring L-amino acids
XSARRRIPRATRMAVLVLRLTVVLGLLVLFLTCYADDKPDKPDDKPDDSGKDPKPDFPKFLSLLGTEIIENAVEFILRSMSRST

SEQ ID NO: 717 - protein, 127 aa, Homo sapiens
QCYLVNTSKRNPQQAGIREIFTFSPQISTNGPEHQPNGETHESHRIYVAIRAMDRNSLQSAVSNIAQAPLFIPPNSDPVPARDYLILKGVLTAMGLIGIICLIIVVTHHTLSRKKRADKKENGTKLL

SEQ ID NO: 718 - protein, 52 aa, Homo sapiens
ISRQITIYHVGNITTGGTHYPCNPLRYMVKIKITAKKSQTLLHLLFELYYIC

SEQ ID NO: 719 - protein, 69 aa, Homo sapiens
  SITE (65): Xaa equals any of the naturally occurring L-amino acids
VMVSALTLKSRASFPASKEFRFLQLIDDLCNLFFVFNILLIVLVSFFLLFMINLCCVPGSRNPYXYVSE

SEQ ID NO: 720 - protein, 33 aa, Homo sapiens
PHSFSLDQILFYMRQKGRLDDFWSSSQVCFHES

SEQ ID NO: 721 - protein, 64 aa, Homo sapiens
  SITE (36): Xaa equals any of the naturally occurring L-amino acids
LKNNFQVSHMKDEKEALINQLTLVESLWTEELKILXDLPRPCTVCKQLLPDFTEAHLVTSSGGC

SEQ ID NO: 722 - protein, 70 aa, Homo sapiens
MRDFDRCLGLWALRYWRRYTKGPRRRVWDSFEGTTTADTWRELGEILRLKRHGMAGRSDSRLQSQHFGKP

SEQ ID NO: 723 - protein, 67 aa, Homo sapiens
  SITE (23): Xaa equals any of the naturally occurring L-amino acids
  SITE (26): Xaa equals any of the naturally occurring L-amino acids
NQAQFPYSGLYSPHPSATVGDYXRRXSWLFSFLPYPKFIEHLKEQRCSQCLGSPSGEMIWKLDASNR

SEQ ID NO: 724 - protein, 234 aa, Homo sapiens
  SITE (40): Xaa equals any of the naturally occurring L-amino acids
  SITE (43): Xaa equals any of the naturally occurring L-amino acids
  SITE (70): Xaa equals any of the naturally occurring L-amino acids
  SITE (81): Xaa equals any of the naturally occurring L-amino acids
  SITE (109): Xaa equals any of the naturally occurring L-amino acids
  SITE (197): Xaa equals any of the naturally occurring L-amino acids
QEQERRQEGRSERLWGKWPSCRRSQRGWPGTLWLVQPRQXGGXRLLMKSQASSHSPRQAGLGAVVALVMXWEQGMGHEELXPWPVVWAMNEGGLGAEQSSVWGPTSRVXLRAWTPNLVAAKIDDTVEVTAAHRFWLEPSEGLGCTQPAGEPSHRAAAGDGARKPSRPLSLGSHPRPSGSGGGWSHHTLCTSQGLGCXPKSENMALIFLQRVDSGSWGGACLSPGKAYRLGRQDL

SEQ ID NO: 725 - protein, 92 aa, Homo sapiens
DPSDCCQGLKTRCGGKLGFLAVSTLRFPSVNLPLSTYLAQELRCRSSYEPPSPSRCCPPGGVGRHSFSRSFHQDSQQPIKQTKIPPLVALIP

SEQ ID NO: 726 - protein, 50 aa, Homo sapiens
NLHGELVSEFTLPLFKGICGSSCCRNQGRGATSLLVRNAKSGLSIFRVSK

SEQ ID NO: 727 - protein, 51 aa, Homo sapiens
KRQWHEGKMKLVTLFKKLKRLPATTHTHTHTHTCSHTLTFLSLDVEVHVDS

SEQ ID NO: 728 - protein, 293 aa, Homo sapiens
  SITE (109): Xaa equals any of the naturally occurring L-amino acids
  SITE (237): Xaa equals any of the naturally occurring L-amino acids
  SITE (253): Xaa equals any of the naturally occurring L-amino acids
GPGLGAAASSARRGGGLARQLPGGCAMDSPEVTFTLAYLVFAVCFVFTPNEFHAAGLTVQNLLSGWLGSEDAAFVPFHLRRTAATLLCHSLLPLGYYVGMCLAASEKRXHALSQAPEAWRLFLLLAVTLPSIACILIYYWSRDRWACHPLARTLALYALPQSGWQAVASSVNTEFRRIDKFATGAPGARVIVTDTWVMKVTTYRVHVAQQQDVHLTVTESRQHELSPDSNLPVQLLXIRVASTNPAVQAFDIXLNSTEYGELCEKLRAPIRRQPMWSSTRAWATCSWRHLPPW

SEQ ID NO: 729 - protein, 74 aa, Homo sapiens
SQVVPALSSQVWGLQVSLPQPHFLYLYNLTVNLQPIHCVNLNSTEAETMAVLTFILVTSLAYGSSDSSNCDHHH

SEQ ID NO: 730 - protein, 68 aa, Homo sapiens
LKQSSYLSLSSSWDYSWYNIDTISHLKKLFYKHIVFPVILFMISASRVRSTEIFQTEAQNEKKNKNRA

SEQ ID NO: 731 - protein, 56 aa, Homo sapiens
RGWVAVETAAVLGWVGEDPRLSELLRAVLLGTRDWQPAAPGAGPRSPAVRAASGWE

SEQ ID NO: 732 - protein, 62 aa, Homo sapiens
  SITE (16): Xaa equals any of the naturally occurring L-amino acids
  SITE (47): Xaa equals any of the naturally occurring L-amino acids
  SITE (61): Xaa equals any of the naturally occurring L-amino acids
QKTHTHTHKHTHTHNXYFLSLVNSEFVHMLQIPDHWHCLRSFPGDPXCISMLKNYSLSDPXG

SEQ ID NO: 733 - protein, 80 aa, Homo sapiens
SVIVRDFNIPLSIIGRTSRQNWQGMEDLKNIINSLSLTSVEYLVNAEYILPIVGERSLLIIHWTIKQGSSIAVKNKKKRK

SEQ ID NO: 734 - protein, 86 aa, Homo sapiens
  SITE (2): Xaa equals any of the naturally occurring L-amino acids
AXFVKSGWGRSGDVYLLSVLNLLTHFLNLYITLSHKLSLYHQLLPPQVTGLFENIPQVFMRACLSPKIRDSYSTKAVFSDSFNSIS

SEQ ID NO: 735 - protein, 65 aa, Homo sapiens
TELRARAMKFSKNQKYFVLELPSEDVKLVNIKTTVQFITNHFPLPVATKSSLSFQKMFSRAQGNC

SEQ ID NO: 736 - protein, 86 aa, Homo sapiens
NRVSDKEKHPGSGVMEEILADREIRRARGEVGTEKSGDESGELRSRRRRRQSVGRFTDRRDQEIWGLGGRQKDKGQTAAAQTLKTG

SEQ ID NO: 737 - protein, 63 aa, Homo sapiens
  SITE (32): Xaa equals any of the naturally occurring L-amino acids
  SITE (44): Xaa equals any of the naturally occurring L-amino acids
SASNLLPLGLSTTLHCCHLTVPSTGAMLKLVXRHLTLFCKSSTXVGVLAICSPGNLFNQFCNN

SEQ ID NO: 738 - protein, 126 aa, Homo sapiens
  SITE (8): Xaa equals any of the naturally occurring L-amino acids
  SITE (84): Xaa equals any of the naturally occurring L-amino acids
  SITE (121): Xaa equals any of the naturally occurring L-amino acids
WRCAGGGXLRGGGAASDVNRRTSVLFCKSKSVSPPKSAKNTETQPTSPQLGTKTFLSVVLPRLETLLQPRKRSRRHAETPRWRXSPQESAWTQSHQRLWGCEERAGAGRGLREEGHTPTTXCLPSP

SEQ ID NO: 739 - protein, 280 aa, Homo sapiens
  SITE (5): Xaa equals any of the naturally occurring L-amino acids
  SITE (240): Xaa equals any of the naturally occurring L-amino acids
  SITE (244): Xaa equals any of the naturally occurring L-amino acids
  SITE (245): Xaa equals any of the naturally occurring L-amino acids
  SITE (250): Xaa equals any of the naturally occurring L-amino acids
  SITE (256): Xaa equals any of the naturally occurring L-amino acids
  SITE (258): Xaa equals any of the naturally occurring L-amino acids
  SITE (270): Xaa equals any of the naturally occurring L-amino acids
PLGFXKKLLGDTIEGTPAGTGPEFPGRPTVRYPAGATARRLARGCWSALWDYETPKVIVVRNRRLGVLYRAVQLLILLYFVWYVFIVQKSYQESETGPESSIITKVKGITTSEHKVWDVEEYVKPPEGGSVFSIITRVEATHSQTQGTCPESIRVHNATCLSDADCVAGELDMLGNGLRTGRCVPYYQGPSKTCEVFGWCPVEDGASVSQFLGTMAPNFTILIKNSIHYPKFHFSKGNIXDRTXXYLKRXTFTRPXTXTAPSSSGFIVEXAGESFTELAH

SEQ ID NO: 740 - protein, 55 aa, Homo sapiens
RLMNSKCHLIAVSGVERSLPLGRKTSREMTPVVCEPSKHAATLLSVLVCFVNVEK

SEQ ID NO: 741 - protein, 112 aa, Homo sapiens
  SITE (8): Xaa equals any of the naturally occurring L-amino acids
  SITE (32): Xaa equals any of the naturally occurring L-amino acids
  SITE (54): Xaa equals any of the naturally occurring L-amino acids
EAERPAWXDQLHFQLSSFLCGHWQLGLNCGPXLPLRLELRGSLALERFVSLRRXSLAKAVQINPAHTALSLGLEKSPQPQGSSSARCMPSGCTLPLFLNSPCSFWAMIKARK

SEQ ID NO: 742 - protein, 247 aa, Homo sapiens
  SITE (145): Xaa equals any of the naturally occurring L-amino acids
  SITE (147): Xaa equals any of the naturally occurring L-amino acids
  SITE (148): Xaa equals any of the naturally occurring L-amino acids
  SITE (185): Xaa equals any of the naturally occurring L-amino acids
  SITE (201): Xaa equals any of the naturally occurring L-amino acids
GLLCALLSLLAGHGWADTRAIGAEECRPNSQPWQAGLFHLTRLFCGATLISDRWLLTAAHCRKPYLWVRLGEHHLWKWEGPEQLFRVTDFFPHPGFNKDLSANDHNDDIMLIRLPRQARLSPAVQPLNLSQTCVSPGMQCLISGXGXXSSPKALFPVTLQCANISILENKLCHWAYPGHISDSMXCAGLWEGGRGSCQGDXGGPLVCNGTLAGVVSGGAEPCSRPRRPAVYTSVCHYLDWIQEIMEN

SEQ ID NO: 743 - protein, 94 aa, Homo sapiens
HCSWNLTCLHKRRLQSSGLPVQQSFQTAAYCLNLKYENPSKDNWTFEESFQIETEIRAKRTKSWRKQTMKGAEENFSRIKISLYKRTFYGISET

SEQ ID NO: 744 - protein, 73 aa, Homo sapiens
  SITE (28): Xaa equals any of the naturally occurring L-amino acids
  SITE (53): Xaa equals any of the naturally occurring L-amino acids
  SITE (59): Xaa equals any of the naturally occurring L-amino acids
  SITE (64): Xaa equals any of the naturally occurring L-amino acids
EYSVLDISQMCDSGMPKAFGQVMQCLQXEVDMHPHPLRKRSSDNPCASLVLHXTGVCLXPNQIXWSEVQEAWS

SEQ ID NO: 745 - protein, 166 aa, Homo sapiens
  SITE (23): Xaa equals any of the naturally occurring L-amino acids
FKVPLPVPVRNSRVDPRVRPFDXFSVDPNNGTLFTIVGTVALGHDGSGAVDVVLEARDHGAPGRAARATVHVQLQDQNDHAPSFTLSHYRVAVTEDLPPGSTLLTLEATDADGSRSHAAVDYSIISGNWGRVFQLEPRLAEAGESAGPGPRALGCLVLLEPLDLKA

SEQ ID NO: 746 - protein, 143 aa, Homo sapiens
  SITE (24): Xaa equals any of the naturally occurring L-amino acids
  SITE (117): Xaa equals any of the naturally occurring L-amino acids
PEAGPSLGQEEMMGEGWAAALQPXVLGPWCAMATLPTFPGSSVCGRLCQALYVSCISSASSQLCEAEVEETLKRLQSQKGVQGIIVVNTEGIPIKSTMDNPTTTQYASLMHSFILKXRSTVRDIDPQNDLTFLRIRSKKNEIM

SEQ ID NO: 747 - protein, 65 aa, Homo sapiens
  SITE (3): Xaa equals any of the naturally occurring L-amino acids
  SITE (10): Xaa equals any of the naturally occurring L-amino acids
  SITE (36): Xaa equals any of the naturally occurring L-amino acids
  SITE (52): Xaa equals any of the naturally occurring L-amino acids
  SITE (58): Xaa equals any of the naturally occurring L-amino acids
LTXSQVKSHXRPNASLKEPGSQFKSPNLKCKGSWTXQPCLLAKRPKEPPGQXKWVLKXQEVPRAE

SEQ ID NO: 748 - protein, 66 aa, Homo sapiens
YLIQTGVANWIGNCFGSFGKNCIFGVVGGGEACLKALFLLYSEYLPVDSLEIITKSRRNIGEAAAT

SEQ ID NO: 749 - protein, 92 aa, Homo sapiens
  SITE (63): Xaa equals any of the naturally occurring L-amino acids
  SITE (64): Xaa equals any of the naturally occurring L-amino acids
  SITE (69): Xaa equals any of the naturally occurring L-amino acids
  SITE (72): Xaa equals any of the naturally occurring L-amino acids
  SITE (73): Xaa equals any of the naturally occurring L-amino acids
TDVIQDHSLSIVGQRENCPKLACRRLRRRFPNAGMGGALSSITPYDSQSLIAPLRFILGQGIXXSQKGXTQXXGVQQPSIQVVLVQDKRALT

SEQ ID NO: 750 - protein, 75 aa, Homo sapiens
  SITE (66): Xaa equals any of the naturally occurring L-amino acids
LFSNIYCFGTRAHMWIKVGSITLDDAGMSDVLSIPQSSSPLKCYLRNAIKTPVLFERMVQKFKKTXFGGNGCSRL

SEQ ID NO: 751 - protein, 53 aa, Homo sapiens
  SITE (45): Xaa equals any of the naturally occurring L-amino acids
KKIFFGQVQWLTPVILALWEAEGGGLPELQEFETNLGNTVKPPSXTKAARSGK

SEQ ID NO: 752 - protein, 50 aa, Homo sapiens
HHLVLFQTNFIYCPPDQPYSPFFSHWFSYSISPTRLLNKSLLSPFYITGH

SEQ ID NO: 753 - protein, 83 aa, Homo sapiens
  SITE (59): Xaa equals any of the naturally occurring L-amino acids
QASALQLIHDHVSYHQDLSLEPSSADLTSSTGLCFCVIFPIFQSSFILSTLKNYLSDIXCGPGTVKRCCGYSNEQNRQNPFFY

SEQ ID NO: 754 - protein, 48 aa, Homo sapiens
  SITE (26): Xaa equals any of the naturally occurring L-amino acids
  SITE (48): Xaa equals any of the naturally occurring L-amino acids
FQLFNTLRSPKWMMCTCVRCMRPSIXGVTLSLFVPLKEVKLGVQVNEX

SEQ ID NO: 755 - protein, 120 aa, Homo sapiens
  SITE (20): Xaa equals any of the naturally occurring L-amino acids
  SITE (58): Xaa equals any of the naturally occurring L-amino acids
  SITE (85): Xaa equals any of the naturally occurring L-amino acids
  SITE (104): Xaa equals any of the naturally occurring L-amino acids
PHKSLPKLLGVVTPPPVTGXSRSTHLPGLPQRLNRSVRCSAEDSTGPAAAWVLLVSLXHSTSAVPGMLVKNTASAGVQMPGQSPXCARPLQLLPLCLMLESVLXLGHILRGKGLPGCVQN

SEQ ID NO: 756 - protein, 51 aa, Homo sapiens
  SITE (28): Xaa equals any of the naturally occurring L-amino acids
  SITE (29): Xaa equals any of the naturally occurring L-amino acids
TFRELELFNLNPGLFKALFIYSFFLKKXXEEIFWLFIQKNELMMEKQVIII

SEQ ID NO: 757 - protein, 250 aa, Homo sapiens
SVRLLKCNSRYPKFNYVVKLLQLIAKSQLTSLSGVAQKNYFNILDKIVQKVLDDHHNPRLIKDLLQDLSSTLCILIRGVGKSVLVGNINIWICRLETILAWQQQLQDLQMTKQVNNGLTLSDLPLHMLNNILYRFSDGWDIITLGQVTPTLYMLSEDRQLWKKLCQYHFAEKQFCRHLILSEKGHIEWKLMYFALQKHYPAKEQYGDTLHFCRHCSILFWKDSGHPCTAADPDSCFTPVSPQHFIDLFKF

SEQ ID NO: 758 - protein, 61 aa, Homo sapiens
RTLPTMELHLVKAFSSWYEIFWMAIPKVWNCGLEDLATICYICKASLQYEFYDDWLEKTCT

SEQ ID NO: 759 - protein, 69 aa, Homo sapiens
  SITE (13): Xaa equals any of the naturally occurring L-amino acids
VTEEQTHQVVETXQNKEVEKWKRLAQLKNRELEKFRTELDSILDVLRELHRQGVVVPVAFADEMNAPEY

SEQ ID NO: 760 - protein, 82 aa, Homo sapiens
  SITE (11): Xaa equals any of the naturally occurring L-amino acids
  SITE (44): Xaa equals any of the naturally occurring L-amino acids
LPLYSFILLSXLCCLCLCSQLHRHMQFLRICLPLHRHRVFAHAXSLACGTACSTCSSPSCLPTPGHSPISLLYSVENLHIPA

SEQ ID NO: 761 - protein, 111 aa, Homo sapiens
  SITE (5): Xaa equals any of the naturally occurring L-amino acids
  SITE (63): Xaa equals any of the naturally occurring L-amino acids
GPQEXESLKHRVNLPWPSGWPPGAFGSSKRPQGGSPAKLLPLCSYASCPGGKRASGSIQDSDXTPPRGLPLPGPRTLPPSPGDRNTPFLVWNVSSRDMMIGLLLGPPPINL

SEQ ID NO: 762 - protein, 64 aa, Homo sapiens
  SITE (22): Xaa equals any of the naturally occurring L-amino acids
IALINYHKGSTSPHLGSPQGFXFPHVIHPVLNQPPRLSFHPFCRGNFCQTLQQTPSSIQSVLCC

SEQ ID NO: 763 - protein, 45 aa, Homo sapiens
KNPQKATRELNTPKFMTSYEAGLLPSYTCLKKIHNLHCSETDTGK

SEQ ID NO: 764 - protein, 46 aa, Homo sapiens
GTFNVTPFLAVSGSALPGPGCRWLLGAGHPHLNGPGRHHFQGICND

SEQ ID NO: 765 - protein, 50 aa, Homo sapiens
  SITE (12): Xaa equals any of the naturally occurring L-amino acids
ELRKNICGKMNXFVSKYCLKYQLGLHINPDVPYYLKDFRKDTAIELTFFK

SEQ ID NO: 766 - protein, 85 aa, Homo sapiens
  SITE (41): Xaa equals any of the naturally occurring L-amino acids
  SITE (45): Xaa equals any of the naturally occurring L-amino acids
  SITE (47): Xaa equals any of the naturally occurring L-amino acids
VRASPTLRAAFQPKKKSRPSRFGLFSRPSGQSINRLDSDQXSRGXPXPPPPGSGSSSETISTGPDGCHAHPGPRYGGTWQAGSRW

SEQ ID NO: 767 - protein, 49 aa, Homo sapiens
  SITE (6): Xaa equals any of the naturally occurring L-amino acids
  SITE (42): Xaa equals any of the naturally occurring L-amino acids
  SITE (44): Xaa equals any of the naturally occurring L-amino acids
  SITE (46): Xaa equals any of the naturally occurring L-amino acids
  SITE (49): Xaa equals any of the naturally occurring L-amino acids
FQAASXTPLQVVLGRRALSPMVQYLSPKPHTDTVGVNNSRAXVXVXTVX

SEQ ID NO: 768 - protein, 119 aa, Homo sapiens
ERTFNCCYPGCHFKTVHGMKDLDRHLRIHTGDKPHKCEFCDKCFSRKDNLTMHMRCHTSVKPHKCHLCDYAAVDSSSLKKHLRIHSDERPYKCQLCPYASRNSSQLTVHLRSHTGPGPG

SEQ ID NO: 769 - protein, 102 aa, Homo sapiens
ARVNKVFMMAVMKVMHGLSNMDFCSPKPNWLQLLLSAQSAGSQDQHWLPNMAPFPGGRLIHWIASIMEGVVFFSYWNTHFRYKFAFLTQNASAKTTIQTLNE

SEQ ID NO: 770 - protein, 79 aa, Homo sapiens
  SITE (73): Xaa equals any of the naturally occurring L-amino acids
QADLSPEQEAPGPCRARQCSLTQLGLGFQVVINNSMTSPAVIAAAAAAAISSSACSERSRRAYYSILHGGKRXHPGKAA

SEQ ID NO: 771 - protein, 84 aa, Homo sapiens
  SITE (23): Xaa equals any of the naturally occurring L-amino acids
  SITE (47): Xaa equals any of the naturally occurring L-amino acids
  SITE (61): Xaa equals any of the naturally occurring L-amino acids
YADKLTLFLGISRPQGGRKGSRXITSVSYQESEEYSKHNLTKTCFSXPRWGKSGFQSPHSXFTKDYNFTVLGIHHLPSENILAS

SEQ ID NO: 772 - protein, 57 aa, Homo sapiens
ITIIIVIVYTYPMTLSEISVLLRYSWEFCFLDALMLKNLLIVPHPGLNSDVSIPPFP

SEQ ID NO: 773 - protein, 65 aa, Homo sapiens
  SITE (19): Xaa equals any of the naturally occurring L-amino acids
  SITE (22): Xaa equals any of the naturally occurring L-amino acids
  SITE (23): Xaa equals any of the naturally occurring L-amino acids
  SITE (31): Xaa equals any of the naturally occurring L-amino acids
  SITE (33): Xaa equals any of the naturally occurring L-amino acids
  SITE (36): Xaa equals any of the naturally occurring L-amino acids
NSSKILEVRKQLDEAITTXASXXKPDPQLKXEXAKXQPDLYYRTPQSLKNWEHQKEMKMDMQTGL

SEQ ID NO: 774 - protein, 30 aa, Homo sapiens
DLGSNSGDADDHCVILAKSVNFPELQFSHL

SEQ ID NO: 775 - protein, 48 aa, Homo sapiens
SSFERHVMLSNYEWYPDFHWKIQYVSSYESNFKAKFYLHCKYISHKTN

SEQ ID NO: 776 - protein, 47 aa, Homo sapiens
  SITE (4): Xaa equals any of the naturally occurring L-amino acids
  SITE (11): Xaa equals any of the naturally occurring L-amino acids
SSSXPLFINIXCLETNQAPYLAPDLSVICGRPTRRISAEFALSRPKR

SEQ ID NO: 777 - protein, 47 aa, Homo sapiens
  SITE (29): Xaa equals any of the naturally occurring L-amino acids
MLQKNRSCSFRKSQTLNLYAFLILGCIHXEDSQQCPVIVGKYESENI

SEQ ID NO: 778 - protein, 101 aa, Homo sapiens
  SITE (29): Xaa equals any of the naturally occurring L-amino acids
ISSPAAFQQCLLGCPPTPCFGPRGEGPVXVPGRPQDPVVPWLCLPTLGWGLPATCLAPMESHKPTPEPLHLRPQPLPLHYLFALLSGSDVTPAPAGTWQRP

SEQ ID NO: 779 - protein, 36 aa, Homo sapiens
QSTRNILKMQDLTFCKANIDLVIRPSDSVIFHVFGR

SEQ ID NO: 780 - protein, 83 aa, Homo sapiens
  SITE (82): Xaa equals any of the naturally occurring L-amino acids
GTSASDTLLALVISGLMPFDKLANSETLISDALTWIPALGSTAGIFVAITAMIVILGLIFTQEMVLYNSVGTFFSAQLRIIXK

SEQ ID NO: 781 - protein, 68 aa, Homo sapiens
  SITE (46): Xaa equals any of the naturally occurring L-amino acids
  SITE (49): Xaa equals any of the naturally occurring L-amino acids
LQVAVKRVCWVRSSCWVIPWAPTCPGSSPGGERAVLPIPEVPAVTXLCXPGSLYSQRNHLNAVSLVVC

SEQ ID NO: 782 - protein, 57 aa, Homo sapiens
TEGLIKMCFVCFRLDDSRFSLNCLKVINTMAFCLIHERFPLDIHCVKTEDSHIHICF

SEQ ID NO: 783 - protein, 55 aa, Homo sapiens
  SITE (1): Xaa equals any of the naturally occurring L-amino acids
  SITE (2): Xaa equals any of the naturally occurring L-amino acids
XXVITPVRPSRHTAPRLGRPPPVHQDPQGAVTSLKLGLKASFKAQQTGFSKIFDP

SEQ ID NO: 784 - protein, 73 aa, Homo sapiens
IKTMEPHNTPFKEAIFKIALGNTFQSIAAALKGEGVYLESFVCVCGHGMAAPVICSCIIRDWSAALSWPRIRE

SEQ ID NO: 785 - protein, 55 aa, Homo sapiens
  SITE (5): Xaa equals any of the naturally occurring L-amino acids
NIKRXDFFDFTLEACPFGSRCIKFAFERCFSLDRTIRHYFDNILSTEREYRAFLL

SEQ ID NO: 786 - protein, 129 aa, Homo sapiens
  SITE (109): Xaa equals any of the naturally occurring L-amino acids
ARALLGKHELVPVLGSRWLMVNVAHDVLAAALYGAATGIMSDQMQRHSYCNLKDYPLPCAYHAFLAAAVCGGVLPRPLPAFGALWLRASLPGQAGGGVRRPRPPRPDRXGESPETSLLNPFPRRRPARC

SEQ ID NO: 787 - protein, 43 aa, Homo sapiens
HSETLSLLKIQKISRAWWRAPVVPATQEAEAGEWREPQGAELQ

SEQ ID NO: 788 - protein, 43 aa, Homo sapiens
RKRWSDLSGGWGTKGWMSHRPKKVRIHGRMSHSVSSIRGVKVI

SEQ ID NO: 789 - protein, 56 aa, Homo sapiens
  SITE (6): Xaa equals any of the naturally occurring L-amino acids
  SITE (36): Xaa equals any of the naturally occurring L-amino acids
FLWLRXSGKAWLVSSVSGSHAVVGRWWLELKQQRAXQLESELASPHLLSGLISLRL

SEQ ID NO: 790 - protein, 68 aa, Homo sapiens
  SITE (22): Xaa equals any of the naturally occurring L-amino acids
  SITE (33): Xaa equals any of the naturally occurring L-amino acids
  SITE (39): Xaa equals any of the naturally occurring L-amino acids
KQLKNWPGIVVHACSPSCSGDXGGKITGVQEFXAAVSYXHTTALQPGWQSEALSPTTTTTTNSKIRLK

SEQ ID NO: 791 - protein, 48 aa, Homo sapiens
NPGMQVSCVVLFCVSCRSVLFGTCRVLPNLVLLGIKKLKFTQNPEKIA

SEQ ID NO: 792 - protein, 96 aa, Homo sapiens
  SITE (6): Xaa equals any of the naturally occurring L-amino acids
  SITE (24): Xaa equals any of the naturally occurring L-amino acids
  SITE (34): Xaa equals any of the naturally occurring L-amino acids
  SITE (53): Xaa equals any of the naturally occurring L-amino acids
  SITE (89): Xaa equals any of the naturally occurring L-amino acids
GKIPGXWVMACSGVGERETLSCRXGGQNLVSVLXPRCCPYISCLFLTTLLCCXGSQPLCLYLSSFCPTVHAQHESPLLPGRKSFFPQFXLSPKPIF

SEQ ID NO: 793 - protein, 122 aa, Homo sapiens
EFVISPRPKEEPSNLSIHVMDGELDDFSLEEALLLEETVQKEQMETKELQPLTFNRNADRSIERFSHNPNTTNNFSLTCKNGNNNWSEKNVSEQMTNEDKSFGCPSVRDQNRSIFQFIVMYP

SEQ ID NO: 794 - protein, 38 aa, Homo sapiens
GNLITYNWNFLQEDTIGDSDRTFVSRRPVVSLSVMLDI

SEQ ID NO: 795 - protein, 49 aa, Homo sapiens
  SITE (38): Xaa equals any of the naturally occurring L-amino acids
GRILLKNIINLFIYFEMESRSVTQAGVQWSDLGSLQPXVPWVSSYYPES

SEQ ID NO: 796 - protein, 37 aa, Homo sapiens
  SITE (28): Xaa equals any of the naturally occurring L-amino acids
NCSFPFCQRGITISASQGAVKEANEKMXVSILLNYKT

SEQ ID NO: 797 - protein, 49 aa, Homo sapiens
  SITE (33): Xaa equals any of the naturally occurring L-amino acids
  SITE (42): Xaa equals any of the naturally occurring L-amino acids
KTPVLFLTADYCSLAKAPFISFLCLWDSIPCLXAYTTVAVFXFRPPYDS

SEQ ID NO: 798 - protein, 42 aa, Homo sapiens
  SITE (25): Xaa equals any of the naturally occurring L-amino acids
  SITE (29): Xaa equals any of the naturally occurring L-amino acids
  SITE (30): Xaa equals any of the naturally occurring L-amino acids
QSSLFYLRSHDLVPTLSRKETAPCXLLLXXTLSFQLVWSRCP

SEQ ID NO: 799 - protein, 64 aa, Homo sapiens
  SITE (46): Xaa equals any of the naturally occurring L-amino acids
  SITE (64): Xaa equals any of the naturally occurring L-amino acids
VLVLYDVISSEAVVLRYLSLIVGSCRCRQYGSGNLRHLRASPFADXQDRTMLGFLMCRNQMCLX

SEQ ID NO: 800 - protein, 141 aa, Homo sapiens
  SITE (6): Xaa equals any of the naturally occurring L-amino acids
  SITE (7): Xaa equals any of the naturally occurring L-amino acids
  SITE (9): Xaa equals any of the naturally occurring L-amino acids
  SITE (10): Xaa equals any of the naturally occurring L-amino acids
  SITE (18): Xaa equals any of the naturally occurring L-amino acids
  SITE (86): Xaa equals any of the naturally occurring L-amino acids
  SITE (108): Xaa equals any of the naturally occurring L-amino acids
EAEFPXXCXXYCIARTPXVDPRVRLRAGGADGGFRALRQPRPHLGRVVTLVTFAGTLLERGPLVTARWKKWGFQPRLKEQEGDVAXDCQRLVALLSSRLMGQHRPGCXLRAAGMAFVTSSGPPFHWLFGENSWSRLFCHAC

SEQ ID NO: 801 - protein, 81 aa, Homo sapiens
AQAAGPEPGEARERRRRGSDSLPGETYGPKPCKCVLRGLGSATATPPRGVAQVSRSPATPPSSGLALAPAKEDGVCVLHTF

SEQ ID NO: 802 - protein, 191 aa, Homo sapiens
  SITE (31): Xaa equals any of the naturally occurring L-amino acids
  SITE (178): Xaa equals any of the naturally occurring L-amino acids
LALQQHLADINVDGPENGYGHWIASTSGSRXSINSVDGESPNGSSDRGMKSLVNKMTVALKTKSVNVREKVISFIENTSTPVDRHVSSSDRVGKPYRGVKPVFSIGDEEEYDTDEIDSSSMSDDDRKEVVNIQTWINKPDVKHHFPCKEVKESGHMFPSHLLVTATHMYCLREIVSRXGLLIYSLDKRCIL

SEQ ID NO: 803 - protein, 78 aa, Homo sapiens
  SITE (6): Xaa equals any of the naturally occurring L-amino acids
  SITE (78): Xaa equals any of the naturally occurring L-amino acids
PGTRSXGRGASMRQCRALMSVAELSLTWPALEDSWGSSRQAVLRRHASCLVFCGPSNTWPSFIPGAGWPILDWLSDRX

SEQ ID NO: 804 - protein, 52 aa, Homo sapiens
  SITE (39): Xaa equals any of the naturally occurring L-amino acids
  SITE (48): Xaa equals any of the naturally occurring L-amino acids
VLKLSLYDHNFLIFLFCKKVNGSLSFVCLIFLKISYLLXYFTNEKLFXRKKK

SEQ ID NO: 805 - protein, 95 aa, Homo sapiens
  SITE (57): Xaa equals any of the naturally occurring L-amino acids
  SITE (74): Xaa equals any of the naturally occurring L-amino acids
CPRPLQRADCWSPQIPAVLSSSFKPRVSRGPRGGFYDRNPASSLTSDVLKVQSHLYXPSPPRTVEWALLQAWLXQGVRGQFLSERERMGGSVGEG

SEQ ID NO: 806 - protein, 74 aa, Homo sapiens
GSGVRLNPLTIFESLERIKNETNSRLIGSDFVKLHKARLLYNTKIQPTQLLSTYNVLDFFPFLFEENICIPNTL

SEQ ID NO: 807 - protein, 100 aa, Homo sapiens
VFAGTPAPGFLLFSLGLLHLGQLHHPAHHSPTQVRAVSQPTWGSEVLTKIQTQRLWVCCLSLAVEVLPRPQRLCSRKSLYMLVEPSVPVESFFVLNVSIS

SEQ ID NO: 808 - protein, 128 aa, Homo sapiens
  SITE (65): Xaa equals any of the naturally occurring L-amino acids
  SITE (89): Xaa equals any of the naturally occurring L-amino acids
  SITE (115): Xaa equals any of the naturally occurring L-amino acids
  SITE (117): Xaa equals any of the naturally occurring L-amino acids
  SITE (120): Xaa equals any of the naturally occurring L-amino acids
  SITE (128): Xaa equals any of the naturally occurring L-amino acids
NYRQTLMRPLQIVPSRLISQLYCGLKPPASTRNQICLKMARPSSSMADFRKFFAKAKHIVIISGXGVSAESGVPTFRGAGRLLEKMASXDLGPLAFATTRPGCGNSPYRREVWGXRXQRXAPGHSRVX

SEQ ID NO: 809 - protein, 75 aa, Homo sapiens
PVWDTGDWQTNTASLSLALPPPLSPLTIPCLFSLLTCGMFICSQLNHGGHFRKMCTKLKPCLVSYNLYIFIFSYQ

SEQ ID NO: 810 - protein, 97 aa, Homo sapiens
AHASELLKEFLHLDLTAPIPGASPEETRQLLLEGSLRMKEGKDSKMDVYCFLFTDLLLVTKAVKKQRGPGSSGHPCSWTRLCAGSYGTLGLPPYLPE

SEQ ID NO: 811 - protein, 66 aa, Homo sapiens
  SITE (52): Xaa equals any of the naturally occurring L-amino acids
  SITE (60): Xaa equals any of the naturally occurring L-amino acids
  SITE (64): Xaa equals any of the naturally occurring L-amino acids
IHDGILFSHKASGNPVIRNHVEKPVHPQMKGSGSSGIYTGREMLFGYQNNEXLLFGATQXNLSXHK

SEQ ID NO: 812 - protein, 47 aa, Homo sapiens
GQSFPLSILRQKYLSVELEFTNRGNLNWNLLPAALMQEFVMYTKKYK

SEQ ID NO: 813 - protein, 73 aa, Homo sapiens
  SITE (2): Xaa equals any of the naturally occurring L-amino acids
  SITE (11): Xaa equals any of the naturally occurring L-amino acids
  SITE (14): Xaa equals any of the naturally occurring L-amino acids
  SITE (15): Xaa equals any of the naturally occurring L-amino acids
  SITE (24): Xaa equals any of the naturally occurring L-amino acids
  SITE (28): Xaa equals any of the naturally occurring L-amino acids
  SITE (32): Xaa equals any of the naturally occurring L-amino acids
  SITE (34): Xaa equals any of the naturally occurring L-amino acids
  SITE (46): Xaa equals any of the naturally occurring L-amino acids
  SITE (69): Xaa equals any of the naturally occurring L-amino acids
  SITE (71): Xaa equals any of the naturally occurring L-amino acids
  SITE (72): Xaa equals any of the naturally occurring L-amino acids
TXVKLFSAVYXRQXXRKLKGEAPXFPSXLGRXSXQLHSGLESTPGXGQPTELRRQRSEFKTIEATAICXAXXQ

SEQ ID NO: 814 - protein, 84 aa, Homo sapiens
  SITE (82): Xaa equals any of the naturally occurring L-amino acids
  SITE (83): Xaa equals any of the naturally occurring L-amino acids
CEPWAASPLRVLVIFRASFSRPDTGAVQVRGLGELLGSSRGCLWALAYLVSGYLAQVTTGWVDLGKVGSDSGPCLSPRACLXXN

SEQ ID NO: 815 - protein, 66 aa, Homo sapiens
  SITE (53): Xaa equals any of the naturally occurring L-amino acids
  SITE (56): Xaa equals any of the naturally occurring L-amino acids
ANRLGAGETVMSLTRPCQPAHPESGEGSKKHKVELINNIIYPYPYFYFLFFGXESXLCHPGWSAVV

SEQ ID NO: 816 - protein, 57 aa, Homo sapiens
AHASGTGRVPLLLEPGAWNSTRVPGSSGEPGFSFGPQRVDRARFAQPFLGCGERAPP

SEQ ID NO: 817 - protein, 133 aa, Homo sapiens
  SITE (5): Xaa equals any of the naturally occurring L-amino acids
  SITE (12): Xaa equals any of the naturally occurring L-amino acids
  SITE (40): Xaa equals any of the naturally occurring L-amino acids
  SITE (61): Xaa equals any of the naturally occurring L-amino acids
  SITE (69): Xaa equals any of the naturally occurring L-amino acids
  SITE (89): Xaa equals any of the naturally occurring L-amino acids
  SITE (111): Xaa equals any of the naturally occurring L-amino acids
  SITE (119): Xaa equals any of the naturally occurring L-amino acids
ASRSXTSRVRTXSAPGWKPSLQPADRGEPGHPDRAAALLXQQGGAEESVRRGGRPRVQPAXHAEGLPGXAAKWVGAGRTHEQVSFHESXEGGGQLGPAALGWGLRRGSPPXMHGVLFLXKKKKKGGSSRSRTS

SEQ ID NO: 818 - protein, 92 aa, Homo sapiens
  SITE (78): Xaa equals any of the naturally occurring L-amino acids
LSWVAQAEASRCSTLLALTPTSDTSDNPWSPLCTFLPTTTRYPGAGNAGSATSQCQLTRCGAWLSSTARSVGTTSGEXAEPQHPLSPALPQP

SEQ ID NO: 819 - protein, 277 aa, Homo sapiens
  SITE (223): Xaa equals any of the naturally occurring L-amino acids
  SITE (224): Xaa equals any of the naturally occurring L-amino acids
  SITE (232): Xaa equals any of the naturally occurring L-amino acids
  SITE (256): Xaa equals any of the naturally occurring L-amino acids
  SITE (257): Xaa equals any of the naturally occurring L-amino acids
AKSYLGDTIEGTPAGTGPEFPGRPTRPARAASRELRREKAQEHPRESWAHPQPYPAPQPLALRPETQPCPACRSSPPGRLLLRPALPGHPFLLPIMAVYRLCVTTGPYLRAGTLDNISVTLVGTCGESPKQRLDRMGRDFAPGSVQKYKVRCTAELGELLLLRVHKERYAFFRKDSWYCSRICVTEPDGSVSHFPCYQWIEGYCTVELRPGTARTICQDSLPXXWITGHGSXGPDKNATAGRSMPWLPLHGRRQQXXGDGVRQEICLDKDDNLCRPG

SEQ ID NO: 820 - protein, 138 aa, Homo sapiens
  SITE (127): Xaa equals any of the naturally occurring L-amino acids
LMLLCALLFARLLRLPPPTPRRAAGISCAARISCTASRLFPQHKVLSGHIVWHARAPAGLLEARGHPDHVVQGAPVLWAPHGARRQRGQLAVPEPLQAVLGALGLLRPLGERRQLKLVLFPQQLPAXALQEPLHEADV

SEQ ID NO: 821 - protein, 87 aa, Homo sapiens
GTTHDVPGKVFFRRHYPLTTLRFCGMDPEQRKWQKYCKPSWIFGFVAKSQTEPQENVCHLFAEYDMVQPASQVIGLVTALLQDAERM

SEQ ID NO: 822 - protein, 59 aa, Homo sapiens
TGVHTRVSNHSPSPLGSFQLTRLLDVRLPQVEEGPQRSLLKIVIHEWRLDFFRYTSRVC

SEQ ID NO: 823 - protein, 59 aa, Homo sapiens
TTLMSRVHNKCSLKYQKKKKKKKKGGRSRSRTGRVGRPGNSGPDLQAYPLQRHQNSSNK

SEQ ID NO: 824 - protein, 136 aa, Homo sapiens
  SITE (28): Xaa equals any of the naturally occurring L-amino acids
  SITE (34): Xaa equals any of the naturally occurring L-amino acids
  SITE (106): Xaa equals any of the naturally occurring L-amino acids
  SITE (124): Xaa equals any of the naturally occurring L-amino acids
  SITE (135): Xaa equals any of the naturally occurring L-amino acids
ASGSGAGAGDGTGKGSPGRSPSPAAAAXAPFLPXGSGTPAPPGDSSLAAPPGLPPTCTPSLVSRGTQTETEVELKSSPGTPWPGAMDPQPLKGQAKSLTGTQSERXGSSSSGVGSLGPRGFFSXAAPKLLNTREXN

SEQ ID NO: 825 - protein, 72 aa, Homo sapiens
RLWSVHKGTSVKLVHDKDNCEKPPVGQIAFGNLLLIILSDFSWEYFERKVIIPLYFRIMLRGSLTAIQLQLN

SEQ ID NO: 826 - protein, 76 aa, Homo sapiens
DTVNAVPSGPTASCQVSGKTQLPPGSIFLFNSPFILENFGHTEKWKYYNEPPHIINQFQHYQVQCFLSLPLPPPLL

SEQ ID NO: 827 - protein, 52 aa, Homo sapiens
  SITE (15): Xaa equals any of the naturally occurring L-amino acids
MIFRDALSFQVLLIXVFTFGRAVELLCRTSLLFLTWSFGEYLLSRQCSTCSS

SEQ ID NO: 828 - protein, 147 aa, Homo sapiens
GHRSGAVRPPLHQLGPAVQPPWLPRPGHHLHDAGSGSQCYCRSPCHRGPPGGPGLAARASWAEPGGPGHPAVCPGCSGGQRGPGGRDCQHGGRGSEEDGPDEAGSRELLPRPAGGSGLGQQRNQAVGLAKFGGCSCMRVPASWPNTN

SEQ ID NO: 829 - protein, 105 aa, Homo sapiens
  SITE (92): Xaa equals any of the naturally occurring L-amino acids
PTRPPTRPRTCGQLRPDCRPPSPASAWSSSYPHAPYLGSARSLSPHKMADGGSPFLGRRDFVYPSSTRDPSASNGGGSPARREEKKRKAARXKFDFQGAVPPKGA

SEQ ID NO: 830 - protein, 46 aa, Homo sapiens
  SITE (28): Xaa equals any of the naturally occurring L-amino acids
NKGMKWKTRDSLHIVKPGEITPSFGGTXKASSKWIQNHWDSPGNLV

SEQ ID NO: 831 - protein, 191 aa, Homo sapiens
  SITE (61): Xaa equals any of the naturally occurring L-amino acids
  SITE (144): Xaa equals any of the naturally occurring L-amino acids
  SITE (155): Xaa equals any of the naturally occurring L-amino acids
GRLKCNTLYFHKDHMDLRTHVNAIALQGCEVAPGFGPRHPFAFRILRNRQEVAILEASCSXDMGRWLGLLLVEMGSRVTPEALHYDYVDVETLTSIVSAGRNSFLYARSCQNQWPEPRVYDDVPYEKMQDEEPERPTGAQVKRXASSCSEKSHRXDPQVKVKRHASSANQYKYGKNRAEEDARRYLVKKKK

SEQ ID NO: 832 - protein, 61 aa, Homo sapiens
  SITE (39): Xaa equals any of the naturally occurring L-amino acids
AWPHPHPPGGSKTNTQAHYEPMVLGLLPLPWAPFNPGFXAPIGLIKYVKQIWLGGPGRLEG

SEQ ID NO: 833 - protein, 130 aa, Homo sapiens
  SITE (42): Xaa equals any of the naturally occurring L-amino acids
  SITE (62): Xaa equals any of the naturally occurring L-amino acids
  SITE (68): Xaa equals any of the naturally occurring L-amino acids
  SITE (73): Xaa equals any of the naturally occurring L-amino acids
  SITE (105): Xaa equals any of the naturally occurring L-amino acids
  SITE (120): Xaa equals any of the naturally occurring L-amino acids
AEERSAWLGRRAAPASSPRPGTRGPRAPPPRAARRPPGPARXHPPRAAPAAEPPGDKVAAQXAPVAAXRSRAXVPALAAANEDPLRSGNATALVAPDLKTFSMPXESSPGGPREHSLPGXPHLVNADGQY

SEQ ID NO: 834 - protein, 75 aa, Homo sapiens
  SITE (60): Xaa equals any of the naturally occurring L-amino acids
  SITE (74): Xaa equals any of the naturally occurring L-amino acids
ILDLEKMVIQWQRISEWKKSIYQIILMKDKYKLELFIFLWDPYMRCRMNEDTGTDYITPXQLTQVVEGGGIGIXE

SEQ ID NO: 835 - protein, 24 aa, Homo sapiens
LVLYTRQNMMFSDFSTFASLANMS

SEQ ID NO: 836 - protein, 140 aa, Homo sapiens
  SITE (16): Xaa equals any of the naturally occurring L-amino acids
  SITE (34): Xaa equals any of the naturally occurring L-amino acids
ATATPPASSAPTRPSXAQQGLVRDVHVLLYPRPXNQRELEEDSFGLAMDEDGRKFVYFKSLGPYHKSRSSSWSKKRAESSDEENLPRMYETGTEFCPYASFVKYLSKRNPLCKAFFQRPRDHCSEGDVTWYENKAIARTC

SEQ ID NO: 837 - protein, 87 aa, Homo sapiens
  SITE (53): Xaa equals any of the naturally occurring L-amino acids
RGCFTVALKFSPCAKDINDTVRLLKEKCLFTVQQVTKILHSCPSVLREDLGQXEYKFQYAYFRMGIKHPDIVKSEYLQYSLTKIKQR

SEQ ID NO: 838 - protein, 116 aa, Homo sapiens
  SITE (60): Xaa equals any of the naturally occurring L-amino acids
  SITE (92): Xaa equals any of the naturally occurring L-amino acids
AGKGGSALGRNSRGLKFRAEATESQPVGVSQDEEFWNTYEGLQEQLSRNTHKETEPVYEXGKELHDNFLLLGAVIIVYSPKMSWAFFEYPAXWICKTSLDSNYDVLPGSSRNANCG

SEQ ID NO: 839 - protein, 85 aa, Homo sapiens
  SITE (6): Xaa equals any of the naturally occurring L-amino acids
LSPNPXNPPFSPHPFPLFLPASFWLCQAISNLHFSKSFLTNGKVNALPQFSLARQFFLLASFCTLHYPFSFMYRLRGNDEALIYQ

SEQ ID NO: 840 - protein, 106 aa, Homo sapiens
FFGAAILSLSIASVISGINEKLFFSLKNTTRPYHSLPSEAVFANSTGMLVVAFGLLVLYILLASSWKRPEPGILTDRQLLLQLRPGSRPFPVTYVSVTGRQPYKSW

SEQ ID NO: 841 - protein, 89 aa, Homo sapiens
CGTSLSRFRSRPPRLPAALNVRRPQDPVIGACGRTVTEETPGGTWAFLGLRACSSCSFRARISHYQSLTDTECLAFDKCLLNLKRHMGQ

SEQ ID NO: 842 - protein, 53 aa, Homo sapiens
ALTIFKSNNQGLDGTSLSWRCKRDPRCAFCLVYISDLMRSRKWGNLTSQNQFG

SEQ ID NO: 843 - protein, 98 aa, Homo sapiens
RVCAHLLPLSGFCRLGKSGRRGWAKLGMRGGAWAGGGAHVPPLGMERPARDAVVRLRACGLASFSLSCLLRKEQMIVLVICFQGLLGTYMPVCERPLP

SEQ ID NO: 844 - protein, 110 aa, Homo sapiens
  SITE (54): Xaa equals any of the naturally occurring L-amino acids
DPPPRALLRVCCHRGGPRSRTFHPPPCGCEDDQSLSKYEFVVTSGSPVAADRVXPTILNKIEAALTNQNLSVDVVDQCLVCLKEEWMNKVRCFLSSPRWTVDPKRTHRSC

SEQ ID NO: 845 - protein, 59 aa, Homo sapiens
  SITE (42): Xaa equals any of the naturally occurring L-amino acids
GTSTPLRSSLSDRLRSCLKTNTHTQYGIIYISSLQNEILKYXSNKICTRFIYFLKTMKL

SEQ ID NO: 846 - protein, 57 aa, Homo sapiens
THTELPAACNLEGKNKVPPLNCWPSNKYHLLAFTMKASMNQHESIPYIRFLLASLKS

SEQ ID NO: 847 - protein, 50 aa, Homo sapiens
VVMNLGKRYVSNNFLKKVPWPREFYRHVLSNCERATISYNRKTILGHRNL

SEQ ID NO: 848 - protein, 64 aa, Homo sapiens
  SITE (64): Xaa equals any of the naturally occurring L-amino acids
IPALPLFPKLQMVQANLSGSRTSVTMNKLLAGTSVAQPLPDVIWVTCVAAELGRKDPEKLAGSX

SEQ ID NO: 849 - protein, 105 aa, Homo sapiens
NGSSLLSGGRRDHLARTSRASEGSAGLKQLCKPQNHALEWDGRRPPQPQGEVPPVCRSEILTLCPGKAPCRPLPTAPPGAPHVYPPRTGHRAFPPEVFVRAVPFA

SEQ ID NO: 850 - protein, 49 aa, Homo sapiens
  SITE (22): Xaa equals any of the naturally occurring L-amino acids
CGPRGEAQSLWEPTYFAEAASXFHPTNSFSFLSILQAIGPSACIVFYAS

SEQ ID NO: 851 - protein, 58 aa, Homo sapiens
  SITE (1): Xaa equals any of the naturally occurring L-amino acids
  SITE (6): Xaa equals any of the naturally occurring L-amino acids
  SITE (20): Xaa equals any of the naturally occurring L-amino acids
  SITE (22): Xaa equals any of the naturally occurring L-amino acids
XPDLPXTKGTKAGAPTAVAXAXELVDPPGCRIRHEQKWPVNGASFPCTLEMTSSPKCI

SEQ ID NO: 852 - protein, 65 aa, Homo sapiens
  SITE (64): Xaa equals any of the naturally occurring L-amino acids
AAVTGRAVFTVRATPFTYTKELPVCCVELFTLAEAPEWEKAFLLDCDPLGTEFRPTGNPRPSLXF

SEQ ID NO: 853 - protein, 59 aa, Homo sapiens
WRVRTASSPATHAPPPMLVATPVDPVAPLKRVAVIEKLVSSLKTSTKPFRSTTGRILKS

SEQ ID NO: 854 - protein, 74 aa, Homo sapiens
RKFSWIWDSTYHPQPHYYPHCVQALSSSWLIHSVLIISGHHVLSDVDTMVGQGGSLTVEHASFHFSGGVETDKQ

SEQ ID NO: 855 - protein, 79 aa, Homo sapiens
HSSCLCQELALCLRKGGLKDKQPRVAQSPPPTSSSVSNLSGTKCNSGPFSPLTCTQKQRKAGTVHFSFILNGLPLLQPQ

SEQ ID NO: 856 - protein, 22 aa, Homo sapiens
VPGIPGFQGFPEVAGPPGNYGI

SEQ ID NO: 857 - protein, 53 aa, Homo sapiens
  SITE (23): Xaa equals any of the naturally occurring L-amino acids
  SITE (42): Xaa equals any of the naturally occurring L-amino acids
KEAFGSFSYIETVLVLSKFPLQXEISKTNSTYTFNIRFLILXKFLTITWAEYS

SEQ ID NO: 858 - protein, 45 aa, Homo sapiens
  SITE (6): Xaa equals any of the naturally occurring L-amino acids
  SITE (42): Xaa equals any of the naturally occurring L-amino acids
PPFYLXKVRIFPNLFRTISQNTMEQGLSLTKTNRPMLIPLSXFVK

SEQ ID NO: 859 - protein, 87 aa, Homo sapiens
  SITE (18): Xaa equals any of the naturally occurring L-amino acids
  SITE (72): Xaa equals any of the naturally occurring L-amino acids
IEIHACCYMQQELIPLYXHVVFHHMNVLVCLSICLLMHISCFQFEAITNKDAIKICVQAFVMDIHLHFSWSXRPRSEMAGSYGRWDG

SEQ ID NO: 860 - protein, 37 aa, Homo sapiens
  SITE (6): Xaa equals any of the naturally occurring L-amino acids
FCRGKXCPLNDQMERGSPKGSDPVFGNRALQWECLCL

SEQ ID NO: 861 - protein, 40 aa, Homo sapiens
PKGKAPTSAPNQKPLRKEFEWLILIILFLTLWPGQARYYD

SEQ ID NO: 862 - protein, 54 aa, Homo sapiens
PAQPLLCRKDRVTKTTTSLLSWGVSAGDGIVRSYEEDKTGTRAQRGIAFRLLER

SEQ ID NO: 863 - protein, 55 aa, Homo sapiens
PLPHRRGSGGTTIRGPLSPPAPCPCHPLAGKGQAPTQPGQSLLPPGVWLLKRGTK

SEQ ID NO: 864 - protein, 72 aa, Homo sapiens [sequence omitted]

SEQ ID NO: 865 - protein, 45 aa, Homo sapiens
IWAPSPYISHYVHANISKSKEHLKSKTLLVPNILDKGNLTCTSCA

SEQ ID NO: 866 - protein, 43 aa, Homo sapiens
ISLSWTLPFTGAFLISLITNLLNSFSGETGISSWFASIAGDLV

SEQ ID NO: 867 - protein, 84 aa, Homo sapiens
  SITE (29): Xaa equals any of the naturally occurring L-amino acids
  SITE (64): Xaa equals any of the naturally occurring L-amino acids
CSVHKCYNSLVKYILKYFTVLMLLYFYFXVCFCFICLFLRQSLTPAWATEQDSLSKQKEKKRKXVVTVCFRIYLIKHIVCKCTY

SEQ ID NO: 868 - protein, 45 aa, Homo sapiens
PLLRPKCTKQPINTCKLEIIADCRSPTKIQPCYLKQVKKPKCIRS

SEQ ID NO: 869 - protein, 122 aa, Homo sapiens
  SITE (7): Xaa equals any of the naturally occurring L-amino acids
  SITE (10): Xaa equals any of the naturally occurring L-amino acids
  SITE (18): Xaa equals any of the naturally occurring L-amino acids
GGGEWEXYLXLLGYKSWXSTAVAAALELVDPPGCRNSARVLFNFYGVFFVVVVAVETESCSVAQAGVQWRDLGSLQAPPLGFKQFSCLSLPSSWDYRHTPPRPANFCIFSRDGVSPCWPGWS

SEQ ID NO: 870 - protein, 102 aa, Homo sapiens
DLFYRIPAPRTASGITDFCKYCLVNYRIPKHLVQRSLSPGRILELTAQEKFPLLYAPIFLCLCLKLTFIKLHHINLFVYLSSDNTVSSLGRQGVYLSLLRNS

SEQ ID NO: 871 - protein, 49 aa, Homo sapiens
SSHQSLSADLWTSCCRSQFPGGPVAGDSDQVDCTALRNQSLYKEIPRRL

SEQ ID NO: 872 - protein, 58 aa, Homo sapiens
  SITE (50): Xaa equals any of the naturally occurring L-amino acids
MILTEEILQVFTAKPKEMRVNSKWPTQRSMDYVETWTIAAISQWCSFQAXYPRREKNK

SEQ ID NO: 873 - protein, 76 aa, Homo sapiens
  SITE (32): Xaa equals any of the naturally occurring L-amino acids
  SITE (45): Xaa equals any of the naturally occurring L-amino acids
  SITE (48): Xaa equals any of the naturally occurring L-amino acids
TPRSAKSESPGFSRKAPKIILLGSLEKKEGNXKRKSEKTRKVKPXHCXLWLGWSSKTVWPPRMGPMGAIRQTCPGS

SEQ ID NO: 874 - protein, 39 aa, Homo sapiens
RSLYFNSQFIYGQSVGHQITLPLKICVQNKETLTLSKKC

SEQ ID NO: 875 - protein, 61 aa, Homo sapiens
ENQGHSKEVKPNRISPHRKITPKARMKDDKIMTKHTKNTSVIINLKRKNINDGKASLGPHA

SEQ ID NO: 876 - protein, 95 aa, Homo sapiens
ISLCQPNAGNAVARILAYCNLCLASLPSLLTRAPPQESSCTLISISESASQEPHVGQGRRPYQRGVISSPPAGLSVGFDDFFSFASVFAVTILCT

SEQ ID NO: 877 - protein, 64 aa, Homo sapiens
AEGENHCLGFFMEWLFYPAFPLSFWIPILVIFFPPIIAKGAPFGDILEINLLDAVTHACNPSTL

SEQ ID NO: 878 - protein, 53 aa, Homo sapiens
  SITE (7): Xaa equals any of the naturally occurring L-amino acids
FDSATFXLFVRGLMDFSCPHLYTRHNEGLLNKAVFSVCVVPTAVSYSKDSGKQ

SEQ ID NO: 879 - protein, 78 aa, Homo sapiens
  SITE (30): Xaa equals any of the naturally occurring L-amino acids
QPRVVHFTSGHLRNHPFILFQVLENISCDXHRLHILESELILAEGKECFSKSGNCNGPLMNKPYMGPETPGMKSTSSL

SEQ ID NO: 880 - protein, 46 aa, Homo sapiens
EPVHPGPSSRITLAVSGTRPAPTALGPSHDLKYPASRPAPLPGQAP

SEQ ID NO: 881 - protein, 76 aa, Homo sapiens
RSEVSPGEAIYDVIGEMPLAGLYEEIMEAEAVLQDEEDGSVVKVDTEAAVSGEVSNLLEGQSIRAEGGHSRPVSQG

SEQ ID NO: 882 - protein, 167 aa, Homo sapiens
  SITE (134): Xaa equals any of the naturally occurring L-amino acids
  SITE (135): Xaa equals any of the naturally occurring L-amino acids
  SITE (136): Xaa equals any of the naturally occurring L-amino acids
  SITE (138): Xaa equals any of the naturally occurring L-amino acids
  SITE (162): Xaa equals any of the naturally occurring L-amino acids
  SITE (164): Xaa equals any of the naturally occurring L-amino acids
LHRDLKTQNILLDKHRMVVKIGDFGISKILSSKSKAYTVVGTPCYISPELCEGKPYNQKSDIWALGCVLYELASLKRAFEAANLPALVLKIMSGTFAPISDRYSPELRQLVLSLLSLEPASGTTQPHHGTSPLXXXLXNFTPTWAVSRMRRAEKSVGPSNTXSXTTN

SEQ ID NO: 883 - protein, 125 aa, Homo sapiens
  SITE (46): Xaa equals any of the naturally occurring L-amino acids
  SITE (98): Xaa equals any of the naturally occurring L-amino acids
  SITE (105): Xaa equals any of the naturally occurring L-amino acids
  SITE (113): Xaa equals any of the naturally occurring L-amino acids
ENLLQQTPPKFPSPARSPIPGAPGAWAGKEPSGNLEVSRGAGESCXLLVAAPRDPAQKVGWESRLLYPHLSAQKRPFALQRGGLRSLGKKHIVSEFLXAFFLLGXRELHKEKXRSLYFVTEILQS

SEQ ID NO: 884 - protein, 88 aa, Homo sapiens
  SITE (23): Xaa equals any of the naturally occurring L-amino acids
RWGNRRTRRMDMLMTPRLELRSXSFSGALDTHFLCPPNECIFFPLTLDFSSFMVKNITLQSSDPSQKTGSYSLLCFIENPHPSENMKG

SEQ ID NO: 885 - protein, 104 aa, Homo sapiens
  SITE (27): Xaa equals any of the naturally occurring L-amino acids
  SITE (44): Xaa equals any of the naturally occurring L-amino acids
WHRRESEEWSGKDSLMLACYAGHLDVXKYLRRHGASWQARDLGXCTALHWAADGGHCSVIEWMIKDGCEVDVVDTGSGWTPLMRVSAVSGNQRVASLLIDAGAM

SEQ ID NO: 886 - protein, 127 aa, Homo sapiens
  SITE (76): Xaa equals any of the naturally occurring L-amino acids
  SITE (84): Xaa equals any of the naturally occurring L-amino acids
  SITE (85): Xaa equals any of the naturally occurring L-amino acids
  SITE (88): Xaa equals any of the naturally occurring L-amino acids
  SITE (94): Xaa equals any of the naturally occurring L-amino acids
  SITE (108): Xaa equals any of the naturally occurring L-amino acids
  SITE (111): Xaa equals any of the naturally occurring L-amino acids
DMTQTRGSRHCSTGCPLPSSGAKPSASRKPYLPRDGRVRPAHLCEAALQSRSPGHRSTRREATSTARAIRCHVPAXTQPQAHSXXHAXPNRSPXQDHRQWGGPSPPPXLYXPPLPRARTPGSCAMPT

SEQ ID NO: 887 - protein, 80 aa, Homo sapiens
  SITE (21): Xaa equals any of the naturally occurring L-amino acids
KVRLQVPVRNSRVDPRVRISXILAQRPGRHHLNPVIKVNLPSTCTTTAALKGCTENISVSFLPQMRYLNLIMKRQETNPD

SEQ ID NO: 888 - protein, 69 aa, Homo sapiens
HPCPTDRPPPIPVWKARLPSSRTSDSSPFRVTSSLDKAYVTPCQVSWLGAPPEFGSCPQPSMHGDNAPT

SEQ ID NO: 889 - protein, 73 aa, Homo sapiens
  SITE (3): Xaa equals any of the naturally occurring L-amino acids
  SITE (5): Xaa equals any of the naturally occurring L-amino acids
  SITE (6): Xaa equals any of the naturally occurring L-amino acids
  SITE (8): Xaa equals any of the naturally occurring L-amino acids
  SITE (11): Xaa equals any of the naturally occurring L-amino acids
  SITE (15): Xaa equals any of the naturally occurring L-amino acids
  SITE (18): Xaa equals any of the naturally occurring L-amino acids
  SITE (21): Xaa equals any of the naturally occurring L-amino acids
FLXLXXLXSWXKPKXSLXSCXSWLWSFKFWHIFSYLSVEVSQNYHCNMTPVFWTCRVHDSKIKPFGLLPAIIV

SEQ ID NO: 890 - protein, 105 aa, Homo sapiens
  SITE (62): Xaa equals any of the naturally occurring L-amino acids
GSRPSIKVQRNSSEGGQRTASILPAHPGPPESLTSWLQGGEVFISSTPLNMELIPGRGFLNXEGLMLGMAIEEFGRTTKPRQWRESHTRWASSPGLQHLLGEERN

SEQ ID NO: 891 - protein, 44 aa, Homo sapiens
VFGGFLRWTLVLSPRVECNGAILAHCILVWATEGDFISTEKKKK

SEQ ID NO: 892 - protein, 77 aa, Homo sapiens
  SITE (28): Xaa equals any of the naturally occurring L-amino acids
IYITVINEKTLLIFRHLVKYWLVIDACXPVWALWGFEVCVVCSTRTFPSQRRGIFGTSFNRKSRNKLAGFGLHGPVK

SEQ ID NO: 893 - protein, 42 aa, Homo sapiens
SVFFSWYIGASREKRLKMEGREEPVVRTRCQGCWEENRSRDI

SEQ ID NO: 894 - protein, 107 aa, Homo sapiens
LNHGARAVWLISPNRELHFVHREILQCDLEGIMPNVTISLSLPTNGSPLQDILVHPCVTSLDSAILTSSSIDAMDDSAFSGPYKFPFTPPLESFNLCFYTSQVTTLE

SEQ ID NO: 895 - protein, 46 aa, Homo sapiens
KNKISSNSQLVPAAFYLLIFLLTYYLHMFTFMVCSLSSGEDHSDTR

SEQ ID NO: 896 - protein, 66 aa, Homo sapiens
HGQFQFQPKRLVTSTNAVLEAEKVLVPLQYLMYWGQISTNFSVVIAKSRDGLQKEILIFIFEVFVF

SEQ ID NO: 897 - protein, 84 aa, Homo sapiens
  SITE (81): Xaa equals any of the naturally occurring L-amino acids
NLGHRIFSTPVKRHVSYRIVPFDILPKRPRCNSPCDSLSLSPVTLNRGIIQAKDVSLGVYGMAAELFRGWGICGRPCFIGXELD

SEQ ID NO: 898 - protein, 78 aa, Homo sapiens
  SITE (66): Xaa equals any of the naturally occurring L-amino acids
  SITE (67): Xaa equals any of the naturally occurring L-amino acids
TQWAMDLLADLHSWQNSVPVGCWTQGFSFLLAVSLSLLSAYCPVALSIWQLTALQLVSSKPVRKIXXFKTGIIALCNV

SEQ ID NO: 899 - protein, 59 aa, Homo sapiens
  SITE (19): Xaa equals any of the naturally occurring L-amino acids
  SITE (46): Xaa equals any of the naturally occurring L-amino acids
SIYSSQNPCEVGVTHPHVXRAHSCSVNSGAGIRKSTVIPQHQGPLXQGKGHKRLTSTRD

SEQ ID NO: 900 - protein, 116 aa, Homo sapiens
  SITE (8): Xaa equals any of the naturally occurring L-amino acids
VLNHHDFXPVKVFWVLASPTWTSTRYLEVYCPSGGLPTDSAFAVPGRMASSSPHSASFQDGSEDLPRASGISRMRLMRKYDPSLGRFTRILHKLQNNLIARREDFECFYYKEMINV

SEQ ID NO: 901 - protein, 90 aa, Homo sapiens
  SITE (20): Xaa equals any of the naturally occurring L-amino acids
LVLLCECDKRLRLVYKDLLXSLVNKTRAMCYYNIGVNFVWRLFQAQEVVISLCVRYCPHTILKSGTKNGQFTSAKLLGLLCLIMGLPYLL

SEQ ID NO: 902 - protein, 66 aa, Homo sapiens
  SITE (1): Xaa equals any of the naturally occurring L-amino acids
  SITE (8): Xaa equals any of the naturally occurring L-amino acids
  SITE (41): Xaa equals any of the naturally occurring L-amino acids
  SITE (45): Xaa equals any of the naturally occurring L-amino acids
XLPSLPPXQAPSLPNQFPPRKILLWKNNTFNKMCFLSLNTXAYSXHKKTDSGMNLMDDSCPLSGCL

SEQ ID NO: 903 - protein, 79 aa, Homo sapiens
  SITE (14): Xaa equals any of the naturally occurring L-amino acids
  SITE (36): Xaa equals any of the naturally occurring L-amino acids
  SITE (62): Xaa equals any of the naturally occurring L-amino acids
SLTLPKLCIITTLXIAPLGGHVKPSSVPSRCLGPEXSEDLTWVLEGFQPQVSQEAAHFFARXFNALSQTSLVPPAFCSL

SEQ ID NO: 904 - protein, 137 aa, Homo sapiens
  SITE (64): Xaa equals any of the naturally occurring L-amino acids
  SITE (131): Xaa equals any of the naturally occurring L-amino acids
VLLHIDVAAARQVCLGFSKSTAPGGRIHTQHGPPRGHVRAPWGRGTGRCGGPGQDHQLSSHRYXKREDVQPGTGMLAYTHILMEAAPGLLALYRDTHRVLASVVGTTGVSLNLTQLPPFNVHLQTKLVLLXKLPRPS

SEQ ID NO: 905 - protein, 48 aa, Homo sapiens
  SITE (30): Xaa equals any of the naturally occurring L-amino acids
  SITE (44): Xaa equals any of the naturally occurring L-amino acids
KKKKFKNDSWEIELLQMEMKGWVCSIFCLXVSPLETLLPLSLPXSPPQ

SEQ ID NO: 906 - protein, 60 aa, Homo sapiens
VISHCMFSSYYFLILLSFKKKKKLSLLKSMLRDSKLLKSTMPNYNIQFKIHIKFHWEYSL

SEQ ID NO: 907 - protein, 117 aa, Homo sapiens
  SITE (117): Xaa equals any of the naturally occurring L-amino acids
YLLSLLALEVLKTIQDGDSDELTIKRFIEGKEKPGALWHIYAAKDTEKIREFLKKVSEEQGQENPADHDPIHDQSWYLDRSLRKCLHQEYGSSRLGYCTVSWGCGVYPGRSFHIQVX

SEQ ID NO: 908 - protein, 99 aa, Homo sapiens
SASQSAGMTAVSHRAPPRSRGVLTGRLQASSDGREGIRAGVSSEMASGHLRWSREHLWRASSLEAACEPYGGPGLRAVRQTVSCSLQHWGTLNLLFQVL

SEQ ID NO: 909 - protein, 103 aa, Homo sapiens
  SITE (4): Xaa equals any of the naturally occurring L-amino acids
  SITE (56): Xaa equals any of the naturally occurring L-amino acids
  SITE (81): Xaa equals any of the naturally occurring L-amino acids
  SITE (94): Xaa equals any of the naturally occurring L-amino acids
  SITE (102): Xaa equals any of the naturally occurring L-amino acids
TLQXLSSIQFLPSALLVTITHPITKNHTHNIPLHTLKQVQGLGRPQTYSWLLVLGXDFLYFVMGVFFCFCFLFFFCAGRVXVGVRKLGGVAFSXYGPGGQGXG

SEQ ID NO: 910 - protein, 55 aa, Homo sapiens
QGLPGVPQSPQGSENISQKCLRRGDMAGVKWSYSIAVTRSPQPPNVPDTLPSPHR

SEQ ID NO: 911 - protein, 95 aa, Homo sapiens
QHWGPSLLSEALCSCHCPCLESSLSRCYLSSSFLSFASLLKCHFKEPASEQPALRIRGRSRWRFLGFFVINAINKYLWYYLTKLQIFITLVNVYI

SEQ ID NO: 912 - protein, 44 aa, Homo sapiens
  SITE (4): Xaa equals any of the naturally occurring L-amino acids
  SITE (6): Xaa equals any of the naturally occurring L-amino acids
MLYXLXMFNVVFCKTKDSRILLQSCLLICFFCVSALFISRSWLL

SEQ ID NO: 913 - protein, 45 aa, Homo sapiens
ESYPNFRLSIFFGMKINIHNRKYFLLKGLVVIGSITVFHIRKIQY

SEQ ID NO: 914 - protein, 57 aa, Homo sapiens
  SITE (54): Xaa equals any of the naturally occurring L-amino acids
GAEGSCWSLSSLICQNLALRNWVLWEPAEKHTGTGSKNLSIVLRWQKLPCQLSXEKF

SEQ ID NO: 915 - protein, 67 aa, Homo sapiens
  SITE (45): Xaa equals any of the naturally occurring L-amino acids
LGTYRSTDSDITSICYFQALQSTNGYNGMGWLLLTVLEKVGKKKXSSAPHRRTCKLLSWPRRSPYSL

SEQ ID NO: 916 - protein, 117 aa, Homo sapiens
CQFPVATPTPSCSSLGQVPFIRVSVAPCVYCSHNTESRFLSVSRTMLDINFLRGRTVLFIFEFPVSDSMPGTWLFEKSSWNAFKKYIRIYIKILIKTELSVYRVKKKTLEEEKFYIL

SEQ ID NO: 917 - protein, 92 aa, Homo sapiens
  SITE (88): Xaa equals any of the naturally occurring L-amino acids
AGLLVPLSEPQLLLLLGLNPAPSCPNYIVKVLYTLQSPDSKAPTYPHSEGLSALLSLQDALCTPDGTKTSTLQHAHLPPSRDGIFQGXCFSL

SEQ ID NO: 918 - protein, 90 aa, Homo sapiens
DQPGQHGEISTLLKIQKVAGHGGAHLYSQLLGRLRQENCLNLGSGFKRQDCTTALQPGQLSEAPSQKKQFEATKYGTLQGFNILVSKGRL

SEQ ID NO: 919 - protein, 83 aa, Homo sapiens
ADAWVPPLFTLSFYPQPQLLCFSPMQLLFSVMFKLSHIWAARSPFRLAHKSFPHASVVLGNFLACRINFVKFCSGVLPSVFIN

SEQ ID NO: 920 - protein, 51 aa, Homo sapiens
LEMDFHHRYKLPEEVKLSHTDIKTVSERSSLQCAVDRECFPRITKLSVIPC

SEQ ID NO: 921 - protein, 88 aa, Homo sapiens
  SITE (43): Xaa equals any of the naturally occurring L-amino acids
GFKLQTLLWFETSMFLSILMCRRKWVMVLSEILNGILKCVSEXPSTELIHGYLLIINYFKQHKCLSLVRLSFSKHSPYSVVLQCSIYL

SEQ ID NO: 922 - protein, 77 aa, Homo sapiens
  SITE (65): Xaa equals any of the naturally occurring L-amino acids
  SITE (72): Xaa equals any of the naturally occurring L-amino acids
ELRFLKSNGRLVTWLVSIIPALWGDQGQVDYLCPGVETSLGQHGQNPISYKKNTNISWVCWHGFXFRATGRXGRRSL

SEQ ID NO: 923 - protein, 144 aa, Homo sapiens
NTLSSKVKELKHSNKLEITDIKLETARAKSELERERNKIQSELDGLQSDNEILKAAVEHHKVLLVEKDRELIRKVQAAKEEGYQKLVVLQDEKLELENRLADLEKMKVEHDVWRPSEKDQYEEELRASQMARRDHQEGASEWLG

SEQ ID NO: 924 - protein, 37 aa, Homo sapiens
TWIHLYARVYSKANSVIFPFIYSWISGAFALSFCKCE

SEQ ID NO: 925 - protein, 121 aa, Homo sapiens
LLVNLPSCTPIVPPLLPNTISFLCFWHPSVRLHRGLCPWFKDSVVGRDILTPPDLERIFGLPGGNIFHCAMSLDQLYFTRPVPLHSGYRCPLQGLYLCGSGAHPGRRCDGSCWAKCSTCGL

SEQ ID NO: 926 - protein, 71 aa, Homo sapiens
  SITE (29): Xaa equals any of the naturally occurring L-amino acids
  SITE (42): Xaa equals any of the naturally occurring L-amino acids
YLDLGKLSTALSAGSLITYAFYKRLPKKXLLTRNVNKPLKAXKQQTVVFAFSYSWASRSKSVGAFNFLGGC

SEQ ID NO: 927 - protein, 48 aa, Homo sapiens
TESLEEYFALFDFCAKGKDFKDAGASKLRFYHWITIKSIKLMGKQTGK

SEQ ID NO: 928 - protein, 39 aa, Homo sapiens
  SITE (33): Xaa equals any of the naturally occurring L-amino acids
  SITE (38): Xaa equals any of the naturally occurring L-amino acids
KCMDIKYQHYYANALSYNLKIGSLLPFLTNKFXYTTYXV

SEQ ID NO: 929 - protein, 68 aa, Homo sapiens
NDTAESIRYTVDSNLVWLGELLFHQIRHGKSVNRQECDTSIKALSVYEALKAKKPHTLKKTKVLISLF

SEQ ID NO: 930 - protein, 48 aa, Homo sapiens
ETGSIIYVDVLELKDGNIFSFQNFFSILYSVFQVFIMKIFKLTGKLKD

SEQ ID NO: 931 - protein, 58 aa, Homo sapiens
ATPTTSCARGLSPNPGTLGSSLPGRQLHSKVKSPVCRQVPPLTQGEGAQGTYRLSQYW

SEQ ID NO: 932 - protein, 70 aa, Homo sapiens
  SITE (4): Xaa equals any of the naturally occurring L-amino acids
  SITE (7): Xaa equals any of the naturally occurring L-amino acids
  SITE (8): Xaa equals any of the naturally occurring L-amino acids
  SITE (9): Xaa equals any of the naturally occurring L-amino acids
TNDXIWXXXTYQVHGGHSYYNKYSGLENSCAEGSPKCFLISISHASKLPFEVGQYYYPHFNRRKTEAPYS

SEQ ID NO: 933 - protein, 72 aa, Homo sapiens
IASGRSRGSKLTYACMRRHSSSIVSPKFNSLAVVLQRRDWENPGVTQLNRLAAHPPFASWRNSEEARTDRPS

SEQ ID NO: 934 - protein, 81 aa, Homo sapiens
  SITE (55): Xaa equals any of the naturally occurring L-amino acids
  SITE (64): Xaa equals any of the naturally occurring L-amino acids
SQHFERPRQVDCLSPGVPDQPGQHGEIPSLFKMQEISWVWWCAPIVLATREAEVXESPKPWEVXAVVSQNHITALQSGQPE

SEQ ID NO: 935 - protein, 56 aa, Homo sapiens
TPFRKTKVTIDCEHSPIGKYNSTRIQPAILMTCFLHFFPFRENTFSRRSLGPLTQK

SEQ ID NO: 936 - protein, 51 aa, Homo sapiens
QLYFTLFLSGLDNILITGTTIAVQTHFIIYHLSVTAPTVATKGIEYLYFKF

SEQ ID NO: 937 - protein, 39 aa, Homo sapiens
YLASLHLNLFLGGLGFGNINTIKSKNLNFILKLRISVFK

SEQ ID NO: 938 - protein, 52 aa, Homo sapiens
LKKYLFYFCRDAGLTMLPRLGWFLASSYPPALAFQSAEITGVSHCASLSSKF

SEQ ID NO: 939 - protein, 38 aa, Homo sapiens
MFVYLNISKYRKGAVKIWPHNLTGPPLYMPFVVDTVNL

SEQ ID NO: 940 - protein, 38 aa, Homo sapiens
  SITE (3): Xaa equals any of the naturally occurring L-amino acids
  SITE (19): Xaa equals any of the naturally occurring L-amino acids
  SITE (22): Xaa equals any of the naturally occurring L-amino acids
RRXNAAMSYDCTTALQPGXQSXTLSQKKKKKKKKGAAY

SEQ ID NO: 941 - protein, 71 aa, Homo sapiens
  SITE (10): Xaa equals any of the naturally occurring L-amino acids
WKKINPLKIXLINLGCISNYLNQPRVRTKQLLIVHLASGIFCSLDIFHWQIQTRAILIRNMRVKEKPTVYL

SEQ ID NO: 942 - protein, 263 aa, Homo sapiens
  SITE (16): Xaa equals any of the naturally occurring L-amino acids
  SITE (21): Xaa equals any of the naturally occurring L-amino acids
NDDGKEEPPTTLLWVXYYLAXHYDKIGQPSIALEYINTAIESTPTLIELFLVKAKIYKHAGNIKEAARWMDEAQALDTADRFINSKCAKYMLKANLIKEAEEMCSKFTREGTSAVENLNEMQCMWFQTECAQAYKAMNKFGEALKKCHEIERHFIEITDDQFDFHTYCMRKITLRSYVDLLKLEDVLRQHPFYFKAARIAIEIYLKLHDNPLTDENKEHEADTANMSDKELKKLRNKQRRAQKKAQIEEEKKNAEKEKQQRNQ

SEQ ID NO: 943 - protein, 94 aa, Homo sapiens
  SITE (43): Xaa equals any of the naturally occurring L-amino acids
  SITE (49): Xaa equals any of the naturally occurring L-amino acids
  SITE (54): Xaa equals any of the naturally occurring L-amino acids
  SITE (60): Xaa equals any of the naturally occurring L-amino acids
  SITE (63): Xaa equals any of the naturally occurring L-amino acids
  SITE (79): Xaa equals any of the naturally occurring L-amino acids
  SITE (86): Xaa equals any of the naturally occurring L-amino acids
  SITE (90): Xaa equals any of the naturally occurring L-amino acids
LKFIFISRYQKTFTYLHFLSCYYLRICNSFSQGFKIGIVLCLXITGPKXTKIIXRMGVGXKTXGLCSPTPCYHPLGSPXRVLLKSXRVKXNVAT

SEQ ID NO: 944 - protein, 53 aa, Homo sapiens
CVVLLRGSQENNPMVLLKVVHTPLNGTWSEGCGNAGPGQMHFSYRSLPGVCLS

SEQ ID NO: 945 - protein, 59 aa, Homo sapiens
LSVYFFLFYLFLFLLYVCLFTMHFLYIYPEIHYVAYIFVLIKFFCVFHEYFQFTFYVLN

SEQ ID NO: 946 - protein, 75 aa, Homo sapiens
GVLYLPGWTEGSQRERPSRVTHLCLPVAPSMVPKSLWRNPGFCDSQSLLRRPSLSRFVWQSQGPGRSQSRLSLMD

SEQ ID NO: 947 - protein, 73 aa, Homo sapiens
  SITE (65): Xaa equals any of the naturally occurring L-amino acids
  SITE (71): Xaa equals any of the naturally occurring L-amino acids
ITLKAIITGEHILFTTVIKAINTWGQNLLLTRGKRELKQNILPPDWPVFQKLLRPSVGEGVWEIXAVQRLXVD

SEQ ID NO: 948 - protein, 75 aa, Homo sapiens
  SITE (56): Xaa equals any of the naturally occurring L-amino acids
  SITE (71): Xaa equals any of the naturally occurring L-amino acids
GRAERSFVLHLALGPILLFHFSEEISLSAPCPSPATLDHCISREQVCPLRPQALSXCPHPPIMISDAAVTXSSKA

SEQ ID NO: 949 - protein, 35 aa, Homo sapiens
  SITE (6): Xaa equals any of the naturally occurring L-amino acids
QCAFNXELNHLKVHFIISWTLIFCVVFPLVQEPFL

SEQ ID NO: 950 - protein, 61 aa, Homo sapiens
  SITE (29): Xaa equals any of the naturally occurring L-amino acids
  SITE (55): Xaa equals any of the naturally occurring L-amino acids
FPVDPRRPPTRPGKAGWGQITKPFVVLDXRIRHDIEDMGIIGIGEQESGIKRCEXKNQAVW

SEQ ID NO: 951 - protein, 40 aa, Homo sapiens
DVCLNIHCHSTTTNYNFNHTFLINKEMSLSCSSLHLQYHA

SEQ ID NO: 952 - protein, 90 aa, Homo sapiens
  SITE (1): Xaa equals any of the naturally occurring L-amino acids
  SITE (11): Xaa equals any of the naturally occurring L-amino acids
  SITE (17): Xaa equals any of the naturally occurring L-amino acids
  SITE (23): Xaa equals any of the naturally occurring L-amino acids
  SITE (30): Xaa equals any of the naturally occurring L-amino acids
XVKNLFPNYTXYVFLSXIYFFLXGFVSDFXFFLASRKRPRMISVKGEKFKGGKSYCSFLPHFKTYGNKVYCYANSLLGNLERIMYSSVCK

SEQ ID NO: 953 - protein, 58 aa, Homo sapiens
  SITE (10): Xaa equals any of the naturally occurring L-amino acids
FDSPALAKHXNEIVTYGLTLNLQDVTLFSSLGAAHMLHCDIFLSPALRLCDSPFLLRP

SEQ ID NO: 954 - protein, 45 aa, Homo sapiens
  SITE (11): Xaa equals any of the naturally occurring L-amino acids
  SITE (14): Xaa equals any of the naturally occurring L-amino acids
SFVIVGFTFRXIIXIELFFIVCCELWVEVTFFAYEYTIVPEPFIG

SEQ ID NO: 955 - protein, 48 aa, Homo sapiens
NTPKIPGSPDAGQVFLWQEVNCSGDPEMQKKLLTLWTAPPMKKRVRLS

SEQ ID NO: 956 - protein, 84 aa, Homo sapiens
  SITE (65): Xaa equals any of the naturally occurring L-amino acids
  SITE (66): Xaa equals any of the naturally occurring L-amino acids
VSCWSVALRGGRDGLDTELSKCFFKGPVFMAFISFHPTHLSAVLDMFYKSTSLHKYMQLVLGGKXXKYAYFLCGFVPLNCVSSL

SEQ ID NO: 957 - protein, 67 aa, Homo sapiens
  SITE (14): Xaa equals any of the naturally occurring L-amino acids
  SITE (48): Xaa equals any of the naturally occurring L-amino acids
  SITE (60): Xaa equals any of the naturally occurring L-amino acids
  SITE (63): Xaa equals any of the naturally occurring L-amino acids
  SITE (65): Xaa equals any of the naturally occurring L-amino acids
GSRYLGYMVLKQRXPIFSVMAFSSRWTDKGMNIPFSLSVGPGNRIGHXSTRPSFGPSKQXGRXKXEE

SEQ ID NO: 958 - protein, 67 aa, Homo sapiens
  SITE (59): Xaa equals any of the naturally occurring L-amino acids
VWKCVAKNAKNLTNFYKSLRDLFQFSEVPLIAHVFQLADRQEFGFVCLKICTSWFIMMXYFQNGDSY

SEQ ID NO: 959 - protein, 43 aa, Homo sapiens
  SITE (13): Xaa equals any of the naturally occurring L-amino acids
  SITE (29): Xaa equals any of the naturally occurring L-amino acids
CGKWKMYWTLVFXGSWRFILCTQIYCGQXLSVTLFLCLSTGFT

SEQ ID NO: 960 - protein, 45 aa, Homo sapiens
LQVRIISYMSRSPVKFCDDQRGDDRVGLMVKKKLSVGFESGTACQ

SEQ ID NO: 961 - protein, 47 aa, Homo sapiens
EETSIERELEMKLSAKVSIYRCTSISRNSEGKSDGLKTKKNIISIHF

SEQ ID NO: 962 - protein, 91 aa, Homo sapiens
WYFCFVFATFPESGSCYQKVTVMTTMCIDAISFIKVGNRVYVAQLSAPLRLILKFQFPRIYLLGDLALATTALQPGQPSETPSQKKKKKGR

SEQ ID NO: 963 - protein, 80 aa, Homo sapiens
FMGKERGNPGCLVPPGPADRPLSVTLMTPGIGYLPHRASASQKNLDKQCQGQRKHIKLSGFRHPEEQKRMRVHPKHTHRS

SEQ ID NO: 964 - protein, 36 aa, Homo sapiens
  SITE (4): Xaa equals any of the naturally occurring L-amino acids
  SITE (9): Xaa equals any of the naturally occurring L-amino acids
  SITE (12): Xaa equals any of the naturally occurring L-amino acids
  SITE (13): Xaa equals any of the naturally occurring L-amino acids
  SITE (27): Xaa equals any of the naturally occurring L-amino acids
SRIXGNTYXLIXXERKQILEEISLIGXNSKVNETQF

SEQ ID NO: 965 - protein, 48 aa, Homo sapiens
KWQPSLWPHQETHGDRVILHLLENEWDTPGPLALPTTPTYVLRRSPMH

SEQ ID NO: 966 - protein, 93 aa, Homo sapiens
  SITE (49): Xaa equals any of the naturally occurring L-amino acids
  SITE (53): Xaa equals any of the naturally occurring L-amino acids
  SITE (62): Xaa equals any of the naturally occurring L-amino acids
TGDSHTSENVKMTSALSSFIMSAGQITYGHYGKSGKWKTIFDPAFEEQXLKKXGLRGGSRGXRNAFPCFHPDRGPCFRALLIHLFLPLPLPFF

SEQ ID NO: 967 - protein, 40 aa, Homo sapiens
  SITE (17): Xaa equals any of the naturally occurring L-amino acids
SSLKVFIPRKENTYIYXHKKIKIGSFINCQMTYPKQFYMS

SEQ ID NO: 968 - protein, 55 aa, Homo sapiens
  SITE (2): Xaa equals any of the naturally occurring L-amino acids
  SITE (55): Xaa equals any of the naturally occurring L-amino acids
PXRSEESPVCLRRGELAQIRNEALPCWFSRGIMPVNSHCTAAWATRGKLRLKKRX

SEQ ID NO: 969 - protein, 63 aa, Homo sapiens
HQTMLYKIFPNIFIKEHRYTVGPTYPWVPHPWIEPTVDQKYWEKKCLDCTCTLFFCFCFFLKR

SEQ ID NO: 970 - protein, 93 aa, Homo sapiens
HILMVCFDTDAIPRSQIQIRLTEILKCPTKVVLLRNMVGAGEVDEDLEVETKEECEKYGKVGKCVIFEIPGAPDDEAVRIFLEFERVESAIKG

SEQ ID NO: 971 - protein, 69 aa, Homo sapiens
SESGEINSKLTKNAKYPRSCLTFDQKLCPVNSCFFQKYSAEKPKEKWGWYLQYREFQVRLDPRRLSVAF

SEQ ID NO: 972 - protein, 147 aa, Homo sapiens
  SITE (16): Xaa equals any of the naturally occurring L-amino acids
  SITE (18): Xaa equals any of the naturally occurring L-amino acids
  SITE (21): Xaa equals any of the naturally occurring L-amino acids
  SITE (126): Xaa equals any of the naturally occurring L-amino acids
  SITE (135): Xaa equals any of the naturally occurring L-amino acids
  SITE (143): Xaa equals any of the naturally occurring L-amino acids
GTRFSPFGPDASVLGXRXLRXEDCKMEEGGNLGGLIKMVHLLVLSGAWGMQMWVTFVSGFLLFRSLPRHTFGLVQSKLFPFYFHISMGCAFHQPLASWAFTAWLGASASHSGGGPAQLLPAVSWSXYAGPLFNAXGLGTPHHXGQWG

SEQ ID NO: 973 - protein, 157 aa, Homo sapiens
  SITE (120): Xaa equals any of the naturally occurring L-amino acids
  SITE (122): Xaa equals any of the naturally occurring L-amino acids
  SITE (127): Xaa equals any of the naturally occurring L-amino acids
  SITE (142): Xaa equals any of the naturally occurring L-amino acids
  SITE (147): Xaa equals any of the naturally occurring L-amino acids
  SITE (152): Xaa equals any of the naturally occurring L-amino acids
RLRGSVFPPRAGVSQLPADPEPALPPTALFVGGRKPQPPLDMFGACYKQPLKPSGSEPPAEECRMTPRHAGCDVTEMQRILSQPTFTEHLLRAVLFNGKGSLSRPQESILGSLARKNLRXIXRVSLXMLLSDLLRPKQSHHXPLLNXMLLTXRLGLE

SEQ ID NO: 974 - protein, 113 aa, Homo sapiens
LSNSIPPQSSTYRSAQESAPHLLQPQFSLLPSALGGSQQTPQAYSSTLFTSSTASIERALLRECSVIKHHQRPSGTQSIQAQLTGSQHSLHSYLSNSSVVNFQETTRAVIFIL

SEQ ID NO: 975 - protein, 142 aa, Homo sapiens
  SITE (122): Xaa equals any of the naturally occurring L-amino acids
PVSMPPLQPLLPQHCLPPLSPAVPVSPSCVPEVPQRPMGSQTRAPTPAPPTPLARPPRHHHSAATVTRTLATTASSSLPCVAAESGAATETSSQQARSYGGEAKGNVQKMGALKGNWGKTFXFPSWNSFFLQPGNFIIMIPG

SEQ ID NO: 976 - protein, 88 aa, Homo sapiens
GTQKEAFRCSGGNGALEGEGDASDGSRLPVVSVTAAEPKAALSVQCHCSCGLQQGIRAKQTDAPVFRTKNILSQISFLFLYIYFLLSF

SEQ ID NO: 977 - protein, 76 aa, Homo sapiens
CKKTEHSCGDKSQQYMLAACFISLVVFVIRENLHIFKNVFLEWKSNLFAPTWKKILSKNMELMEKKLMDYIDQRNT

SEQ ID NO: 978 - protein, 76 aa, Homo sapiens
  SITE (25): Xaa equals any of the naturally occurring L-amino acids
LLREINSVGYSVFVTERVQKSIHPXENVNHIMIICESFENQSSVSYYQFIKYYHICLNVTLDTFMPKINSHEHMTV

SEQ ID NO: 979 - protein, 114 aa, Homo sapiens
  SITE (39): Xaa equals any of the naturally occurring L-amino acids
  SITE (40): Xaa equals any of the naturally occurring L-amino acids
  SITE (74): Xaa equals any of the naturally occurring L-amino acids
  SITE (85): Xaa equals any of the naturally occurring L-amino acids
QHQALVMPPLFLCTDCVPTLASCLPASVPFLVLSPAWGXXCPYPFLLCLLKFCLSHQAQIRYLEGAFYNFLFFXLPSPPVRMDLXSTCFQGTLLLVRVFHPLACIPLSPGYCKL

SEQ ID NO: 980 - protein, 66 aa, Homo sapiens
  SITE (23): Xaa equals any of the naturally occurring L-amino acids
FSILGRLLYFMAVAANPSEFKLXKESDNRMVVKRIFSKAIVDNKNLSKGKTDLLVLFLNGSSERCF

SEQ ID NO: 981 - protein, 71 aa, Homo sapiens
  SITE (27): Xaa equals any of the naturally occurring L-amino acids
GTRRGAGAKLLPLLLLLRATGFTCAQXDGRNGYTAVIEVTSGGPWGDWAWPEMCPDGFFASGFSLKVGAQA

SEQ ID NO: 982 - protein, 65 aa, Homo sapiens
GGGNLTCSVRQTYTGCRKNLRAGGPYHSSHFRHLNDGREMNEVQGRSFPRALTTALVHVIWGYFS

SEQ ID NO: 983 - protein, 59 aa, Homo sapiens
LSVRILLVAIQQGPLFTVALHRHTLRRKCRVEFLQGISQNDSFSQGPAWASSLSIGIVK

SEQ ID NO: 984 - protein, 84 aa, Homo sapiens; identical to SEQ ID NO: 633

SEQ ID NO: 985 - protein, 109 aa, Homo sapiens
  SITE (91): Xaa equals any of the naturally occurring L-amino acids
GPARGRGHLSSGASPRNGATQDPCARAGGTLWPQACAPPWHTAPDTSSPAGTYRAAHFPSPLTATWNPSQLSSEGSAPGLGPWEPHPTPPXRRCNLESAQTLPLEVTTY

SEQ ID NO: 986 - protein, 34 aa, Homo sapiens
KICVLAPNALPITMPVKKLKISLRCIYSSLHGIK

SEQ ID NO: 987 - protein, 79 aa, Homo sapiens
AFAKSYLGDTIEGTPAGTGPEFPGRPTRPAWNHLCLCQAKLGFIPGSPTIAHPHWGPSSSLGFWMYDSHRWRKAPREVC

SEQ ID NO: 988 - protein, 89 aa, Homo sapiens
  SITE (58): Xaa equals any of the naturally occurring L-amino acids
  SITE (59): Xaa equals any of the naturally occurring L-amino acids
  SITE (60): Xaa equals any of the naturally occurring L-amino acids
NTVALEKPLWVPLLSGLVSNNQNKFGDFLPQKLKVPGQIYPLSGPKGNADSHGRDHGXXXNHKAKIIVAIAVLTVLVNIDFSVSRSIMK

SEQ ID NO: 989 - DNA, 436 bp, Homo sapiens
ataattttgttgcggcatgtgatcttccttaatgctataggtaattaaggcgagcgtttagtaaataataatgtactgatattaaggctaagcgtgcgggggaatttaaactgtgaaaagattcacaaatagctgcggttaggaatgtgatatccgcagcttatcaggtgaagtaataattattctcaataattaactggagaggggaatattaacgatagaaaataagataaacaatcatgccgatagataaaattccgaagccgatatatgccaccatataagcgaaaaagagtccgggattttttgctcgccagacatacaccggttccggtgcatttttaacccgtttatcaatcgcgcctgcgcgccagcctttccatgcttcgcggaaacaaaatatcgggataaggaaaaaaacggcaacgacaaaaaa

SEQ ID NO: 990 - DNA, 263 bp, Homo sapiens
tttcaatacgggcgatctctgcatccagcactgattgcggtaaccggaattgcggaataccgttacgcaaccagccaccggggtgcgcttctttctcataaatcgtgacgtcataaccctggtttgtcagtgtcacactggcctgcaatccggcaggacctgcgccaataatcgcgactttgccgagcgttttagtaccgggctgataaatttccattccggtttgttgttcaaaatcagtaacaaaacgctgtaagcggccg

SEQ ID NO: 991 - DNA, 15061 bp, Homo sapiens
aatcatttctcccaggcagacgcgtgccatgcctaccagatcattcaccgcaatgggattcctgacgaacagatcgttgtgatgatgtacgatgacattgcttactctgaagagtaagtggggaacacttggaacttggtggggaaggacttcagggtatttaaaaaaaggtcacatagactcacaggaatcctagtggcctaatgttaaaatatataagagactcccagacagaagatcacagggatacctcatgttgagcttttttttttttattattatttatttgagacagtcttgctctgttgcccaggctggagtgcagtggtgcgatctcggctcactgcaacctccacttcctgggttcaagtgatcctcccacctcagcctcccaagaagctgggactgcaggtgtgcactgccatgcccagctaatttttgtatttttagtagagacaggatttcaccatgttggccaggctggtcttgaactcctgacctcaagtgatccggctgccttggcctcccaaaatgctgggattacagatgtgagccaccatgtctggccctcatgttgagcttcgaccataacttgggtgtgccctgggaatggcaaagacataggaagtgggtgctggtcgctgctttgaaagggtctaaagccgagttcctcctcaccttcgaggacttgttggattctatggtgcttgctcctaagctccgagcaggctgcagcacaggggacctgcacgtagaatgtttttgtttgtaggttagatactcctactaccttctttctatacttattttattacttgctgagtttaacttcacaaatagttcccttgtgcctgcttatctgatttcttgcagagatcagaggcagcaagtatgggcataaactcagcgagttctaacctcctagctccgtggtcaccctgctgcggtgaaggacgctacccttactgtggtcacattctcagctcatacatcacccactctgacgctttaacgcctaagctcttgtattaaagtcttgttctctgtcctgtctctttctgaaagtagtttcactctgagagagcttttgatgagaccttgccctcacgatgctctctggtttccagcaggcagccaggcgcacctatgctttggtccctgcccgaggcttttcgggctcagctcctcactgcctctgccaagagctcttgggctgtgggactgctgagatccccaagctgctcaaaccactcacacgttggccaccctgcaggccataagttgtttctttgaccaacatagacgtttactattttttcgcataacatacatgtgtttgaagagagagatttcggaggcatgccacatctcgtttaaattgtgtcctttaattttcagcaatcccactccaggaattgtgatcaacaggcccaatggcacagatgtctatcagggagtcccgaaggactacactggagaggtgagtggcttctacggttggagccagctggtttagttttcattttagtgatgatttttccctctttcttctgtttctagaatcagaatctccctagactggcttctggtcggtgtttcacattcgtattaggatttttgcctgaggagtaaattatgagagttttgaaagaaagcagaggaaaagagaatgtttagaataagttgcaatccactgatagttcccagtcttctcatactttaggcctgaccatgtagtttcatccatattaacctttcttgagatatcaccattaatctgatcatagattacctgtgctcttttataaaaatcagttttctcagtaccaggcttggtgcaaagtatctcaggatttttgctgagatagtttttcatttattattgttatatagtttattatatagtgtattatagctataatagtatattacttccaaaaacttttctgttcctcctagttgattgagactgtctcaattgacacatttttaaaatcgaccgtgatgccttcattcacctggttttcatagtctgttttaaatatcggatcttttaggaattaattatccttttgataagaaacttttatctgatgtttaacaattctttgtttcattttattttatttttcttttaaagtcaaatacaattaaatttaacatatcatacaggtaaaaaagatgaccgtatttaatgaaattgtttctgtatagtgtttgtttgtttgagatggagtcttgcactgttacccaggctggagtgcagtggcacaatcttggctcactgcaacctccgcttcccgggttcaagtgattctcctgcctcagcctccatagtagctgggattacaggcaggtgccatgatgcctggctaatttttctactttcagtagagatggggtttcactgtgttggccaggctagccttgaactcctgacctcaagtgttccgcccgcttcggcctcccaaagtgctaggattacaggcgtgagccacggcacccgaccaaaagtgtttgctgttaagccatgagccttggaatgtgcaggctggtggcatgggtcggttgcagactcagccaactctctgggttggagcgacagctgcatctgattgtggctcctaattctttgtaggatgttaccccacaaaatttccttgctgtgttgagaggcgatgcagaagcagtgaagggcataggatccggcaaagtcctgaagaggtaatgtctgtttacggatactacacttctctcaatggcttgggacccccgtatagagaattgaaacaggtgttgttctgtgcccctagcctgtttacctgtgagaaattacagagtggagagttttgttctgacttaggacaggtgcttagggctgttgtttcagtggcttctcttggtggcccatttctgcactgaattcaccttatgatccagggcccctcattattaataaaatgttcctatcacttaaactcctcgttccttgtctggggatcatagcacagggatgtcccactgccagcggagcccctgaggcaggtgtgaatctgaatccctgtgcccagattgcagggccaccagccctgtgctctgatcacagatcagcccagcggggagaggcacattcgtaagtcccttcatattggaggaagtggactttcatattggggaacacgaaccccagtgcttacccccactggctgtgggctagagatgtcttgttgtttagtaattgctcatgtggcatttttatgtgatgccagagattctagtagcatatttcttttaagctggaagggaggcctgggcacaagtaagctcgtgtggattagtgcagaggctgggtacagtggctcacgcctgtaatcccagcactttgggaggccaaggtgggcggatcacttgagatcaggagttgaagaccagcctggccaacatgatgaaaccccatctctactaaaaatacaaaaattagccaggcgtggtggcatgcacctgtaatcccagctactctggtggctgaaggagaattgcttgaatccaggaggtggaggttgcagtgaggcaagattgtgccactgtactccagcctgagtgacagagtgagactctgtctcaaacacacacacacacacacacccaccctgaccaacagtgtgaatccccgtctctactaaaaatacaaaaattaaccaggcgtggtggcgtgtgcctataatcccagctactcgggaggctgaggcaggagaactgctttaacctgggaggcggaagttacagtgagctgagatcatgccattgcactccagcctgggcgacagggcaagactccatctcaaaaaaaaaaaaaaaaaaaaaattagtatggagatggacatctgtgagggtgaaccaaattggcttcatgtaagttactacatctctgccactttgaagcagcgccatctggtggaagccctggtgaggcaggtaggtgggcatccagactgtgggccacaggaggcctggagggggggaggctgcaggcctgtgttgaggtcattttggggagatctggttggagagtgtggctgcctgggatgaggcccaattgccaaaggaccccactatccacctcacaccaggtctgtctgatgggttgcccaggaaaggcccctcctcctttccagccgtagttcagaatttggaggctctaggatctatactgtggttcagaatcacaccaaggggagtggaggggacaggccagacaccgggcaccgggcccttgtgttcatcttcaaacctggttgggcaactctactccccaaacttcttaattttttgattagggcagcttttcagagaaatagaagtaaaaacagaaaaaggaaatgattgacccccgattccttcttggcagtggcccccaggatcacgtgttcatttacttcactgaccatggatctactggaatactggtttttcccaatgaagatgtgagttttcttaacgttttaaggacaaactagcagaacagaaaagcaagcctaggtgtcgagattaaacccatagcgtgtattttctagtgtcctgccagggttggtttgtacgtgtggtgggtgggagtgggggacaggtttagcagcttgaaatctatccaaggacatctcttccagacagttttccctgcttttctgttcatgtcgcagcgtcggtagctgtctcaggatgtgggtgtatcacactagacctgagaatagaccaaaagctccggacaaagtaatgggtgaagaggtacatcctcttgccctttttaaatgcgtgcataaaacatgtgacgacattctggggttatgttcttcaccatgattacttctagggattggtagaaaagagtttatgaaggatcatcagaactttactagtggcttatccagcaaatagtttctcttgatgtgttggtctgacaatattctcacctttcagcttcatgtaaaggacctgaatgagaccatccattacatgtacaaacacaaaatgtaccgaaaggtaattcagcccttggggcagccttgtgggggcggggggtgtgaggaaagccgtgagtgcagagcccacagtcccgtgaccgtcctccaactgtgggtgctgtgttttctagaaaggggatccttccaatccctggtttcccaggatgaggctttcggctttagctattagactggaatcatggagagcttgttaaaacagtgtgggcctcgcccccagagtttgacccagtaggtctgcggagggggcctgagaatttgccttgggtttccatgtgatcctgctgctgctggtcttcggcccacactttgcagactcctattcctaggactgtcctcaatttcgggcagctggggaggaaaataccactatcttattctcactttgagcctttctcacccctatagcaccctttatggaaactgtgcagggccagagtttttggctgggtgtggtggctcactcctgtagtcccagcactttaggaggctgaggcgggaagatcacttgaggccaggagtttaagaccagcctgggcaacatagtgagaccgtgtctctactaaaaaaacaaaaaaacaaaacaaaaaaaaacctgcatgggttgggtgatacgtgacagtaacgcagaaagatggcctgctgcactgtatggtctttgaaactcctccctgcactggatggtggaaccgttttccttagcatcccatggctccgttttctctgcattatttcagctactagacgattttattccattagcaatgaataaatttgtgtggcagcagcttccatagcttctggcagcagcctctttacagcagtaatgtctccagaagcaagcctggaggacttgttaggaatgggtagagagagtgggcagagctccagtagcatggctggaggcccgtacctggatggggtgagctcacctgccccgtctgcctcacagatggtgttctacattgaagcctgtgagtctgggtccatgatgaaccacctgccggataacatcaatggtaggtggttggggcgccggcctcgacctgggctggcaagcaggttgctcagacaccgctgacatggaactgagcattctccgtaagcaggggctgctgagggcagcctgggccatagaagtggggagatacttgcaggtagctctgggcttcctctgcttctgaagcactggtagtcagggaataaagaatctgtatgtgagcctcacagtgctcttccaggttctcgtaaaactactgaagctaaaactacatgggctttggactagcctccatcctttgcaatgtgttggttgcactctgacctcaaagcaggtgactgactctctttgaccctcagttatccccatctgtaaaatggggataaagatagtgtgtgtctgttgggagacttgtattttaaacactagcatttgtccagcacaattctaagcccatggtagagagatagtaagtggtagcttttgtataggttcagttaatctagatgtttcttcaataaatgtcagatctctctggaaaccaaagtaagcccatattgttcaagtttcctgtgctgtggaaatgtcagcattcttccagaatagcatgatgtcctaagcatgccaatttgccaattgctgcaaaaaacatccaccagctggctcctctttcttccgcatttaattttagatgagttattgtaatcgaatacacaagtctgggtatagttacgtgtccctgccctcctgtgtggatcataagtagcatgcttcgatttcaccgggggagaaagaaggactcaagcttcaagcgtaatccaaggcaggaataaaatgcaactaaaagatcatctttaattcctcgtagtttatgcaactactgctgccaaccccagagagtcgtcctacgcctgttactatgatgagaagaggtccacgtacctgggggactggtacagcgtcaactggatggaagattcggacgtggtgagccctttgggggctggctgttcagctggggtttaaccgtcagactctgattgtcaaaggtctctaatggtctcactttttgcaggaagatctgactaaagagaccctgcacaagcagtaccacctggtaaaatcgcacaccaacaccagccacgtcatgcagtatggaaacaaagtgagtcgggagcctcgcgtgctggccctctgttccttgtgtcctaggtggacttgcctggaatattgatctcttgctaaagagacatgggatctgagtgaggaatgcttgaggcagggatgcctctgcctctcatgccactccatcctggggacctgtgggctttggaatcagacctttctaggttcaaacttgcagagttgtgagactttgggcaagtgatttcacttctgtgaatttgttttctcattggttgaaacccaagcgtacaaggtagctaggagcatgcaagagggctatgcgttacttatgctaaacacaggcctagtgtgcagcaagggatcactgactcaaaagctgctgctttacggtttgtagattgtcccacagccactctgcaccttggattttctggggtcctgcccctttgcaaatggcaggttgttacctttaccctttggctataaattggagacattttatcctcctccaaatatgtccagaagggacctgtgtggttaaatggtgttgcagtaagtggctgctaaaagcttgggccctaagtgaagctgctggggctagcgtttgggatgtgcaaacaccgtaacaaatgtgcagggcctcccaattgttcaccatcccccaagaagcccacccccagcggagagctcgccagctgagatctgttccttgggcacaaacgttggccttctagaagaaactggagtcagtaaatccagccatggttagcccttcagcagggcatgggatgggggacatgagacctgcacccagggcacaatgacctggtcaggcttttgagcaggtgtaggagagagttggagcagagggacggccagggaaaggtgacacggagaaggcagggtcagtggtggcatagccctggccatgtgggggccccgccttgggctttccgttctcttcacagtgtcctcatcattggccatttctgatcttggttgaggagttgtggtggatcttctccaaactctgtgtttttatatagattggtgtgtgtggtattgctgattttagaactgttgttagattattgttgcttgctttaggaagagaacgcttgcagcattttcccttctgattgggagccagtctgtagtgaccgctacagccaaatcgagcctggccgctgtgcccatttggtagctcttgatgccaagcatcagcctggcctctctgtggccttagctctgcccttcccagtggacccagacttcagctctaacctgggcagatgctttgtaccttcccactactggtccttagggacttgcaggtgagtgcgggggagtgagcacatacaggtcacccgcctggataggcggcatcctttgcaggtgacattctttgcctggcatcctttgcagcagaactgctattcttttacatatgaagggcactgctgatgcagtcaggcagagcttggaccagagctgtctggtgaaagaatagcagttctgcaaaggatgccaggcattttgagtcactcactggtagatttcaggggctcccgtgcattgcctgcgtactgctggggtgaccatgcctttcagactgtgactgtggccctgtggtcctgaaagcatgaggagtaaatgtgagcctctgagggagaggctggacttggggtatgttgggcacctctgctcctcccactcaaaccagctctctctctccctctctctctggccttctctcactctctctcgctttctctctcgctctctcttgctgtctgtctccccagacaatctccaccatgaaagtgatgcagtttcagggtatgaaacgcaaagccagttctcccgtccccctacctccagtcacacaccttgacctcacccccagccctgatgtgcctctcaccatcatgaaaaggaaactgatgaacaccaatgatctggaggagtccaggcagctcacggaggagatccagcggcatctggatgtgagtagtggtgaaaggagctgtgcccaggtgctgtccccagcccaggtgggcagcatgcatgagcacggccctgcctcctatgctccctgccacacaggagtatggggggacagaagccagcctttgtcctccatgtaacggaagcgggtgggcggagccgtggttgcctcccatcttcatgagtaaactaaccttgacctcttcggtagtagggagcagtggaatgggggcctatctcccctgtatcgtaccaagaagccatgtacatgggtgtttccctcttttataccttgttgcttagaggatatttttattttgttgcttattaagttattagctaatcatattcattttaaaaatccagagacaggtacggtggcgtgcgcctctagtcccagctacttagggggctgaggcaggaggattccttgagtctgggactttgaggtcagcttgggcaacctagcaaaaccccttctcttaaaaaaaaaaaaaatccaatccacaaaaatttctgctgttctcagaaaaacatagtcatgcctaaaattctttctaaaatgcttatgccgtcctttccaatcagtgagtctgttttcagtagctcatcagtgtgtttggagctggcagaattgctatgtaaattacagctgtgtgctcaccggaatgctgggcagagggctgcctgtcccttcccacaaagccaactctgttagcccttatccccattgtcagcacagcacagtgatggatgtgctgaaatatggcctgagttttctaggcaagatttttttttttttttttttttttttgagacaagagtcttgctctgtcgccaggctggaatgcagtggtgtgatctcggctcactgcaacctccgcctcctgggtttaagagattcccctgcctcagcctcccaagtagctgggattacaggcatgtgccaccatgccccagttaatttttgtatttttagtagagatggggtttcaccatgttggtcaggctggtctcgaactcctgacctcaggtgatccacccgtctaggcaagattctttttttaaatcaatgtggtttgttttaaatgcacatatctagttatctccaaaattggtgccctgtgtgtgaaaaacgtattaaccaggacatatttttagttggtgtcaaacgcagtatagcacagtagtgctcagacattttagtcttgggcctctttatttattaatttttttgtagagctggggtgtcactatgttgcccaggctggtctcaaactcctgagctcaagtgatcttcccacctgggccctgaaagtgctgggattacaggagtgggccactgcacccggccaaacctctttatactctttaaattattgatcccaaagagcttttgttcatggtgggttatgtctattgatatttattgcattaaattaagatgagatgaaaggacatttttgatagttcacagaaagtgaaccagaggttttttggtgattttttttttttttttgagatggagttctgctcttgctgcccaggctggagtacaatggcatgatctcagctcactgcaacctctgcctcccgggttcaagcgattctcctgcctcagcctcccgagtagctgggattacaggcacccgtcaccacgcctggctaattttgtatttttagtagagacggggtttcaccacgttggccagactggtctcaaactcctggcctcaagtgatccacctgcatcagcctcccaaagttctgggattacaggcgtgaggcaccgcacctggctcagagttttcttgtgtttgcttaaacagctgtgtaaatcatataggacttctttggtatctgctgcaaatttgaaaactatttccaagactgtttaactattgcataattatacttttatgtaaagtaaaagattatgaaaaaattaaaactaagatttaaaaatatttaactcatttacaaataacaatattcttaacaaataacattttacactaatatattttctatgagaaataaccattttccaaaacaaaaagcattgggtgagaagagtggcattgctttacatgtgggagtatctcttttgtgtccggcattgctagacgacagctggatccttgaactggcttctgctttcgccgtcgggcgctgttctttcggctgaagtgtaagaagaaaatccagccttgtaaagatacagagttgaggaagggaagaccttctggagcctgagagctcttggggagtctgtggttctggaccacgcctggagaactgctggtctaacacacagtgggtggagggtctttgtggaattcagatatgaagcaagcaaaccctggctggagagcgggtaggacagagcttgcttgtagagtgaaggttttttttttttttagttttttgatttttattttaatagaggcagggtcttcctgtgttgcccaggccggtctggaactgctggcctcaagtgatcctcctgcctcggcctcctaaaagtactgggagtacaggcctgagccactgtgcctggccagagtgagggtagtgtagaagcattttcttctttatgatgctgtttttcattgtctggaaagaaaataaaagtccctctgtgccctgctgtgtaaccattcaatagtttcctgaatgggcagaggtgcccgtggacacagcaccctcacggcacagtcgtctgctttggggcacaggttctgccacctcctttctccacagcaaaggttgttttttgatacaaatgtttgcatcatgccagaagatccccaaaaggcaggtctttctgaccgtcgcacaagtgggcacagacatctctcgcctttctcggagcacattgattgttatttcctctaacctgcgggaggctgagggctgtgtggagagtagcctttgaatgcacttctcaccgcacctgggtccctgagagaccgcattcagggaggcacattctgacaggccgcgtttctccccaggccaggcacctcattgagaagtcagtgcgtaagatcgtctccttgctggcagcgtccgaggctgaggtggagcagctcctgtccgagagagccccgctcacggggcacagctgctacccagaggccctgctgcacttccggacccactgcttcaactggcactcccccacggtgagccagcaggctctccccatgaccagaatccagaagctgaattcatattgtcccctggcagtcacattggttgtacgaccttatagaaggttccatccaggctgagaaacagtgggctcatttcagagaggaagaaggttgtccaaattcactaattttaaatcttggccccagaacactcttcttgtcccagtgggtaggagagtttaccagagccatagatgacagctctcacttctagtttgaagaacagttacttgtgttcacacttctgctgtccctgccaaaccccaccctcgtctctacccctcacacgagccacacacatcttctcccttctgagtctgttctgacctcttcccaagacagttgaagtcaggtgtggcccatggagaagtactgagtttctgcagatgtagaattggaaggcacctgaaaagcctcctggtcagtagcatgtggtgcttcaatccttctagagaaaggttggcaaactggcctacaggtctgtttctcccccataacctgtttttgtaaataaagttttattggggccgggcatggtggctcatgtctgcaatcccagcacgttgggaggccaaggtgggtggctcacctgaagtcaggagttccagaccagcctggccaacatggtaagacctcatctctactaaatataccaaaattagccagacttggtggtgcacgcccgtaatcccaactactcgggaggctgaggcaggagaatcgcttgaaccagggaggtggaggttgcaatgagccgagattgtgccactatactccagcctgggcgacagagtgaaactctgtctccaaaaaaaagttttattggaacatagccacatcctgctcagttccctgttgtccctgtccctggcttctttcacactggggcagagttaaggtagctcgactttacccctccagtcttgttttttttgtttgtttgtttgttttagacacagttttgctcttgttgcccaggctagagtgcagtggtgtgatctcagctcactgcaacctctgcctcctgggttcaagcaattctcctgcctcagcctcccgagtagctgggattacaggcacgcgccaccacacctggctaattttcgtatttttagtagagacagggtttcaccatgttgtccaggctggtcctgaacttctggcctcaggtgacccacctgcctcggcctcccacagtgctgggattacaagcatgagccaccgcacccggcccagtcttggtcttttgacctttggagtcatgcacagtgaacctcttcctttgttctcagagagttcttgggttcccctgaagtttgtttcaagataaacatccccgctgcttcacccttccctggtgtgatccagcgtggctttcacacgccgtccatctccctcgctggcgtgtccctcccagaatcaaaaggcagacttcccggggagatcccaggccatggcggggagcagagccatcgggagttccctgtcaggagtcctgccctcagatttgagagtgcagaaccccgccagccccccaacttgcatgcaaaccctggcatgtgtgcctctttcctgagggatcgtccataaatatcaccagattatctaaaggttgggaaaggatccatgaaccaaaatagggcaagagccactggtcaagatgcttcccctctgcaattgcaaaagtggagtggattgtgtggtgagatgaggaagtttcattcttctcgtttgttttctcccagtacgagtatgcgttgagacatttgtacgtgctggtcaacctttgtgagaagccgtatccgcttcacaggtaactaatgcagcggtgacgcttgaaaggtcgatgtcattctgaaagcagaaggggctgccatcctcttctgcaagtgggcattttcacttctgccaggagctccctccagctttcctctacagccatttgtcagcagggtccagaagccacgttctcagtgacagctgctgggcgggcctgtcataactgcctgcctgccgcatgtgggtttgcgtttgtctgcctttcttcagagttgacacggttcaccaagttctccttcctgtctctcgcaggataaaattgtccatggaccacgtgtgccttggtcactactgaagagctgcctcctggaagcttttccaagtgtgagcgccccaccgactgtgtgctgatcagagactggagaggtggagtgagaagtctccgctgctcgggccctcctggggagcccccgctccagggctcgctccaggaccttcttcacaagatgacttgctcgctgttacctgcttccccagtcttttctgaaaaactacaaattagggtgggaaaagctctgtattgagaagggtcatatttgctttctaggaggtttgttgttttgcctgttagttttgaggagcaggaagctcatgggggcttctgtagcccctctcaaaaggagtctttattctgagaatttgaagctgaaacctctttaaatcttcagaatgattttattgaagagggccgcaagccccaaatggaaaactgtttttagaaaatatgatgatttttgattgcttttgtatttaattctgcaggtgttcaagtcttaaaaaataaagatttataacagaacccaaatattcacgtc

SEQ ID NO: 992 - DNA, 140 bp, Homo sapiens
gcatgcctgtagtcccatctacttgggaggctgaggcaggagaatcgcttgagcccgggaggcagaggttgcagtgagccaagatcacaccactgcactccagcctgggcgacagagtgagactccgtctcaaaaaaaaa

SEQ ID NO: 993 - DNA, 1865 bp, Homo sapiens
agaatgttcttttggccactgtgaagcctcaggaaggggctcggattgctcaaggacccatgggagagaggaggctttgactgggctgcctgcctgtgaggtctctggactagaggtgagggaacggtccccagaagtgtgaggtggtgtgactcacctcctgccagcgtaaagtggactctgtccccatggacaggaacaaatcgggcaaggcttcttcagccctgagttgggttatctgctcagtgtgaccagagccaggggatgagaaacatggagtgagtgggactggggcaggagcagcagctgctgagtgaggctgagcctgagcacccggtggggagaggggtggggtctccagcttggtcttggttggcatgcatggggccggacaggagaagggctgggggaggtatgtgtgagttgggatagaagaatagggaggaaggttgctgaacaggggttgggttgcaccttgcctaacaatgagagagatgggaaccctctcatctcaccctgatgaattgtttctgcctccttcccaggtccaacgcagtccagctgacaaggatggaatacgccatgaagtcccttagccttctctaccccaagtccctctccaggtgaggaaagtcatgggcagaatggaaagagagccacctatgagctgtaagccagaacttctcaaactttaatgggtatacaggtcacaggggaccttgttcaagtgcagattctgattcaggaggtctggagtgggacccgagattttgcactgccaagaagtccctgggtgatattaatgctgctgcttacaccaccaccacaccatgcataaaaaggagtagacactatgcttggtgcttttactcctgatctcatgtaagcctcacaacaactttgggaagtgggggttattataccaaattaataggtgagagaactgaggcacatagtgggtgctctcaatcacccagcaaatccatgagggagccaagattctaaattgggactgcctgactgtaaaatccaggtcctttcctttcctttggttctaaattgagtgcttcagttaaaaaaataccttacattgacttcaggcttcccccacttcatccaactttacaggtgaggagagtgaggccaagacaggtggtaaatggggaatgtggggtgggtcttttattactttgctacttactcctcatggtctgagaaccagcgttatcaacatcacttgggaacttgtgaaacatttggaatctcaggcctcacccaggtctactcagtcagaatctgcatttgaacagaagccctggtgacttatgtgtccttcgaagtttgagatgcactgctctagcaggctttttttaatttttattttattatttttttttaagtcgaggtctccctctgttgcccaggctggagtgcagtggcaccatcacagctcactgcaacctctgccgcctcccagggttcaagcaattcttgtgtcccggcctatggagctgggattacaggcatgtgccaccacactggctaatctttgtatttttagtagagatggtgtttcaccatgttagccagggtggtcttgaactcctgacttcaagtgatctgcccacctcagccttccaaagtgtgggattacagacatgagccaccgtgcctggcttctagcaggcttctgagtaagactagggcaggattagcaggtgatggggggttgactgatcatgagcccagtcaggaggggtggggaggtggctcccctgtgtggtgggcaagggttgggcaaagtgggtggctcaccctgatgcttcaactgccccaggcatgtgtcagtgcgtacctctgtgggg

SEQ ID NO: 994 - DNA, 464 bp, Homo sapiens
aatgaattaaaacctttccaccccttggtataaacatgtaattaacaaaacagagcttgaaccacacagagcagaaagcagaatcacacttcctggtcttttcctacatgaacaatttcctccatttaaagagcaggagacaaaaagcataacagactgacagggaaagagaaaggcaactgatctctcaaggtgaatccaagaaaatacaggacccactaatacagtaatctgtaaactacacagcctaatcacaatcaaagccttgccactagagaagcttaaagagggcactaagatgtggtcgtttctgctcgctgcattgttcctgcaagctaacattttttttccttaagtatttcagaagactaaactaaagatcaaagagagcaaggaggcctaccaatatgatgggtctctgaatgactttccatcttagtgaaaataactgttagctaagtatt

SEQ ID NO: 995 - DNA, 8847 bp, Homo sapiens
gaagggttaagagcaactctggcatcagagctaggttcaaattctgcatagccactttttaaccatgaggttttagacaagtctaacttctcagaggttagagaagcaaagcaatgtttatttcagaaagttgctttgaggactgcagaggcaactacagcacctagcgcaatacctggacacaagaaacagcacatcagcagttaaccttactgataagcaagcaggaaatgtaagcactgttgctcatgtggcattgtttttttcttttttttctttttttttttttttgagacaaggtctggctctgttacccaagttggatttcagtggtgtgatcttggctcactgtaacctccacacccaaggctcaagccatcctcctacctcagcctcctgagtagctgggactaccacgcctggctaattttttccaaagacagggtttcgccatgttgtccaagctagtcttgaacttgtgagctcaagcattcctccagcctcaacctcacaaggtcctaggattacaggcgtgagccaccgcacccggcccccatgtgacatctttgaaggtgctcccaccatctcttctgaagaggggtgctaggccaggtcacttgatttaggaactgaccaagacaatgtaaacaaaagcttttaaaactaattttattcctaaagttaaaatcagctagcgggtagcactgaaaatacaccttcactatacaaaacaatgtaaactgattacacattaataaggaatttagcacacacacttctaataaaagaagctagatgcagcccttgctataaaaagctatacctgaacaaaaatggacatgtggagtctaaggccctggcagtcgactagagaatgtcagttgttcccaattatgtttaaatgcagaaacagcaacaatgtggaaacttacattcatcaaatgttagcatttaaaatatacatgactaataaagtgaacattcagaggagccactgctcagcatgttccatgtcggccacttgtggacactgatctcatccaaagaggacagaagtttcaaacatctgagcagtttaagttaaaaataggatgaaggggaaataagagaacaggataagtgtcctcccaagacagcagtggctgatgcccacatggcgcaaacaggctgacttcaatgagtgttcacgggatgtgtgataaagcccagctgagcccgggaagctcacgtgtccacaggcagacaggctcacggcatggaccaatgtttccacaactcaggatggatctttctgtccccacttagtagtcaaaataatgttttaaaatagcttcagcctttgaacataactttccagtcccttctgtgcattgaaatgttgggggtcaagtttgggggtgactgtcctggtgaggggagcctgtttcaggacttgaacacgtgcacggctcgcaccacatactgccggcagatgggacactcactcatgcgcttgccgcacttggtgcaggtaaccatgtgcccacactccagtaggacacagtcgatgacggcatccatgcagatgcgacacaggctgtcgtcttcctcatcctgcagctgcagccgctcgccatctgaaaggcaacagagagctaaggcctcggcttcaggcatggccagtcagccagccaccctcccagtccgaagctgagcagccacctgctgaatgacccctgcaggcccaatgccaccccagtgttgtacaagaaataatcccaacttctctgcactttggttctctccactagaaatggcaatgataaaagctatacctcagggttttgtaaagaataaaatgcttgacgtacccaacaaatgttagctatgtatttctattttatatctttgtctaattcaagacatctgtgatagggatatattacttctgtaactagaaaaagaaaccctcagctggtcttctgtagatgggctttggagtcaggatgctattggaatttaactcagttgccccagctttgtagccctgggaacaccacagtctctggagcctcatctcagtaggaaaaggagccttagttcccccttaggaaagttaggaataattgtgcatccttccctccctagccttagaatcatctcaagccatctgtgttcctggccctgctgaagtctaacttgaaagagatgggccgtcctggctcttggcccacctttacatctgagaaaatccagtctgtgaataagaaagacgatgaataagttaaaaaaaagttaaccccagcctgagatttggccatagggctatggatttgggtgcttccctttctacaggtcagaggagatcaaagggaatcatgaatagttggaacagaacaggaattcaagcttgaaaggtcagtagtctctagatttaagagaaatgttttactgccattcatggggagagattcttgtgatctggggtcttagttcatggcccacgactactggtgtggacctggggagaaaggatctatgggatgagatggcagatatgccaatggagaaggcactaggcaactcaagatgaaatcagagtgggccttggtctctccttctgtgtggagggttccttcccactctttagaacttaggaaagcagaggagccagtatcttgtcagggatatgggaacaatcttggtagtgacttggagccagtcaagctaggaaagatgccagctgtgctcaaaacaaaatgtgtgttccagcccaagccagagattgaactaggggtagattatgcagggagttaatgggagaaagacactggaaaccatgctgtcataataacaaccatgttatatcctacgccgcaaagtacttaagggtgggaatggcattatcgttgtgcactgtacatagttgctatttacatttatgaagtcaactgacttctcccctcactgccagaaaaccatttcccagccagcagcctacgacctctgaaagctctgaggatgaagattcctgcatctaccactgtgacatcatctttgaagtaggattgccaaaatattttgtgcatattctgggcataaacctgttcatcaacaaatgctgtattataaccagcttttaaaggacaaaactcaagatgataaaagttaatgatgggagggctgtttaagctagataggaacataagatttgttagtctgaacaccactgagggtcaggcatggtggcccacgcctaattcagcactagtctgggcaacatagtgagaccctgtctcaatttaaaaatattaagtacatatatattttttttacaattaaaaagaaaaaaataaatacaactgaattattttttcttgtccataaatgttccgtggcttgatcgtgttaccagctgaggaagaatttctgtgccaaatttcatcaatgtatagttgagaagtttttgttctgttttgttttgttttgagacagtcttgctctgtcacctaggctggagtgcagtggcatgaccacggctccctgcaggctcaagcaatcctcccccctcagcctcccaagtagctgggaccacaggctggtgccaccacaccaggtttttttggtttttttttttttttttttttttttttagagatgggatctctctatgttgcccaggctggtctcaaactcctgggctcaagtgatcctcctgcctcagcctcccaaagtcctagaattacagttgtgagccaccaagcccagcctagttcagaagttcttaacctcagctttttgtgacttacacagaaatctacagatagttgatgctaagaactatgtaacatctgggctatagggaattttccccctactgttagatttaaaagttgagagaaccaaggtactggccggccaaaggcattagtgagaaaataagcatttttacagagacgaggaatttaattagggttgtaacaaatagttaattatagtaagaaaaaccaaattgaataattttctaactcacttggcagtggtggtctcgcagccataatgaacatcacataatgaagttactcctttccagatctataaacaggctcatgtaactaactgatactcagtaaaatggtacacagctttctcaaaaataaatttgacttaattgtgacaaaaacaacccagtttttaaaagcctaaggaaaaatactacagggaaaaaatgaaaagataaacctacaggacttttggttttcttcattctctttgtataaccggtttactttctctaccagttcccatttttcacaacagccagaatagttgacaaaattccgagccagaatttccttcagctggcgcacgctcattccttccacatcatcaaggcttgacaagtcagacagtgaagctctcactctctccttggagagcccggggttctgaaaccacagagcatccattagccctggtcccataagtccagaccctccccactctaaactcatcactggccctgaatattctcccagccatctcagcagtcctagaagtgtttcagtatactgtcctacattcaaaccagaagaaacatcctgtactaatctagcgaatgtccacagggcactgtcccttcctgtcaggctgacatgtcagggaaaccaaattttataggtggcctcacccgatcctctgcgttttcttcttcatcatcatcatcctcatcatcgtcgtcatcatcatcttctgtgtttgctgaagtgatttcactttgtacctacacttatacaacgtatctgattaggtcaggaatcaatctgtatttatcactagagaaaaccttgtcattgatgctccccatgatgaccagaaagccagcataatgcacatctttggattcagaatgctgctgacccttccaaaaagttgggccctacaaaattgcatgaagaacctaccttccataaagttagctcaaaacacaaattcctgtgtgtgtgtaaagttataaaatctaaccagagtattaactctctcaggaaggtcccataatggaatgccaaagccattaaggatatgggacagcactgtgtcattatcaaagtacctgcaaatggctagtttaactggagcctgtaagatgcagacagaaaaaagctaaagctctgatgggtcagcccaagcatcaggggcatctgatttgaaagatctcagtcctaccacagcgtacttagacaatctaattccaacgaaggctttctagacttcactgatggctgaggctaattctagtttttaaaatttctcaatcagaacactttagaaaacacaaatctcttcagtttgggttatgtaccttccttcacatattttcttttgactatatttgacaatagctctccaataagctaggtcggttcccaatttcaaatattccaccctgattgccaggcaccatactgtagcatccaacaatccacatcacccaaatggtggtgtatacccaaaaggggtatgtaagtcagctgtgccttatgtttgcagcataaatatgccaattctcatttgggagaataataaaactcctggcttggacttatctaatttacgactacagtatgtgttgcttgacgactaggagacgttctgagtaatgtgtccttaggcgattttgtcattgtgcgaacatcacagtgtacttccacaaacctagatggcacagcctgctacacacctaggctatagggcatggccggctacgaagccgtacatcacgttagtgtactgaatactgtaggcagctataacacagtaataagtatttgtgtatctaaacatatctaaacacaaaaaaggtacaataaaaatatggtattataatcttacagaaccactgccgtgtatgtggtctatcactgaccaaaacattattagaggacacaggactatatctagaaggcaattagaccaaatttccctctgcatttattcatttactaattaaaagacactcttggccaggcgcggttggctcatgcctgtaatcttagcacttaggccaaggcaggtagataacctgaggtcaggtattcgagaccagcctgaccaacatggtgaaaccccatctttactaaaaatacaaaaattaactggggtgtaatcctagctactcggaaggctgaggcaggagaattgcttgaacccagcggggcagaggttgcagtgaactaagatctcgccacttcactctagcctgggcaacagagtgagactctgcctccaaacaaaaaaaaaagtcttgctatgttgcccaggctgggggtacagtggctattcacagttgcaatcatggtacacctgcagcctcgtactcctgaactaaagcaatcctcttgcctcagcctgccaagtatcagactgcaggctcacaccaccgcatccagctttcctctacttttaataacccccttcttcagagaagaaaattaagcgtgaaaaaatttgttcaaaacatttctttcagcagtttagaatcactcacgtacaagtaaatattaattacaagcctttacatgttattcaatcaggatgtccaaggacctcactgggccaatattattaattacaattagtaaataactacattttttcactaattcagatggctctttcattaactaaattagaacaatttcactgtagcaagacaaatgggcattaggctaacttacactactgattgttttctgtggtcactgaaacacgtgcactaacacataacactacaaatgtgtatgtgctactttttcacagccatttcttcaacagttagtgtctaactgtgtaagacagagaaattaactaaggccaagagactgatgagctattttgggacccttcagacagcagactttggagccacctagcacctcagcagacactatacatcaggacagcctttaagtgcagagttcagctgggtgtggaagcttcactccagcacatgacttgaagtttatcagaagtcatcaagcactaaaggccccaccatatacggccaagaataagcgtgccgggccctgggtgtaattagttaccccctcgtacctgtgccggcactccagatctggatgtttggtctccatccataagctctccctgaaacgaagacatagtagcagagggggctgtatagtttgaaaaaaacgaacgtgtaaaaaagctagaagtctgggaccttgaagaattcagactgcttgtgtccatgtcgtcctcagagcctagtccatgatggcacagtactagatccaccaagtcttctttctcacgacaagtatctatgggtatatttctcagaatgagatactgccgcaggtccttcaccttcagtcgcattaactgagggcgctgaaatgctgtctcttgtaataagtgacaagtagaacatctacggagattttcttgtaagactgaacaaacggagcaaaaatccttcttgcagtcacagcaaacatgctgaagaaagaaaagcatttgatgacagcaagatataaaccattatgaaagcatgagttttctttctgccttctactaaaatttaattttagttcttagtgaagtccccagtggcaccagactatttccagaggtattttcatgtttcaaaagccatgaaaatcaaaatattcattgccaaggcagtctggattcacagaagttctaatataggactttaagaaaaacacactcttgtgttaatgaattaaaacctttccaccccttggtataaacatgtaattaacaaaacagagcttgaaccacacagagcagaaagcagaatcacacttcctggtcttttcctacatgaacaatttcctccatttaaagagcaggagacaaaaagcataacagactgacagggaaagagaaaggcaactgatctctcaaggtgaatccaagaaaatacaggacccactaatacagtaatctgtaaactacacagcctaatcacaatcaaagccttgccactagagaagcttaaagagggcactaagatgtggtcgtttctgctcgctgcattgttcctgcaagctaacattttttttccttaagtatttcagaagactaaactaaagatcaaagagagcaaggaggcctaccaatatgatgggtctctgaatgactttccatcttagtgaaaataactgttagctaagtatttgatgttgaatctctaaagagtagttaatttattgcattcatttattcatttgaaagttaaggtacgggatacttttttgaaacttgaatctgaatcatagttacagtaaatcatttgtgaacaaaactacagactaacaaatttcttgcttttggaaataaacataatagaaaataaaatgatacaaacaggtcaaagttcaggagaaaggatgcctgaacatgagaaacaatgtctataaaacttgagcagtaatataatccctccaattaagtatttttctagatggaaaatggctaatggaactaagcttttgatatttttataaacagaaatgaaaattcaatagctattcaaaataacctacaatcaagaatgctgacccatgtgtgttgttatgtaacatttcatccaactcaccttctttctaaagactgaaaatgaaagcccacaggctttacaaactatgttgggcccttccgtagctgctggtgggtaggtggaaaactcagggtttggtgtaaatctgaatggaccggtggctcctgcaaatgctgactgctggcccctgacagctccagttcccatgacttcattcagcagcccacagcacgaagcccacatagacgtggcacccgcct

SEQ ID NO: 996 - DNA, 695 bp, Homo sapiens
caacagttagtgtctaactgtgtaagacagagaaattaactaaggccaagagactgatgagctattttgggacccttcagacagcagactttggagccacctagcacctcagcagacactatacatcaggacagcctttaagtgcagagttcagctgggtgtggaagcttcactccagcacatgacttgaagtttatcagaagtcatcaagcactaaaggccccaccatatacggccaagaataagcgtgccgggccctgggtgtaattagttaccccctcgtacctgtgccggcactccagatctggatgtttggtctccatccataagctctccctgaaacgaagacatagtagcagagggggctgtatagtttgaaaaaaacgaacgtgtaaaaaagctagaagtctgggaccttgaagaattcagactgcttgtgtccatgtcgtcctcagagcctagtccatgatggcacagtactagatccaccaagtcttctttctcacgacaagtatctatgggtatatttctcagaatgagatactgccgcaggtccttcaccttcagtcgcattaactgagggcgctgaaatgctgtctcttgtaataagtgacaagtagaacatctacggagattttcttgtaagactgaacaaacggagcaaaaatccttcttgcagtcacagcaaacatgct

SEQ ID NO: 997 - DNA, 191 bp, Homo sapiens
aaccccgtctctactaaatatacagaaaaattagccgggcgtggtggcgggtgcctgtagtcccagctacttgggaggctgaggcaggagaatggcgtgaacccaggaggtggaatttgcagtgagctgagatcacgccactgcactccggcctgggcaacagagcgagactctgtctcaaaaaaaaaaaa

SEQ ID NO: 998 - DNA, 308 bp, Homo sapiens
catacaattatcacatgagctagcccttccacatgtagatatttaccaaagagaagtgaaaatatttgtccacacaaagacttgcacacacatgtttatggcagctgaacattgggaacgtggccatcaacaagcagatggatgaacagactggggtgcacccttctgtggggatactgctcagccaggaaagggagcacctggtaacctgcagcatatgggcgaatctggaaagaattgtgccaagtgcaggaggccacacaaagaagggagtgtcctctaagatctgacttacatgagaatctaga

SEQ ID NO: 999 - DNA, 308 bp, Homo sapiens; identical to SEQ ID NO: 998

SEQ ID NO: 1000 - DNA, 308 bp, Homo sapiens; identical to SEQ ID NO: 998

SEQ ID NO: 1001 - DNA, 308 bp, Homo sapiens; identical to SEQ ID NO: 998

SEQ ID NO: 1002 - DNA, 277 bp, Homo sapiens
tttttttttttttgagatggagtctcactctgttgcccaggctggagtgcagtggtgcgatcttggctcactgcaagctccgcctcctgggttcacgccattctcctgcctcagcctcccaagtagctgggactacaggtgcccaccaccacgcccggctaattttttgcatttttagtagagacgggtttcaccattttagccaggatggtctcgagctcctgacctcgtgatccgcctgcctctgcctccccaagtgctgggattacaggcgtga

SEQ ID NO: 1003 - DNA, 266 bp, Homo sapiens
tgctgggattacaggtgtgagccacggcgcctggccttttctttgattttaataatttggtttactaagtctgttccctgtccatttgctctgcaaggagtcatcagagcctggcgcttgcagtacccccaggtccacgtttagatgatcttaaaacattgccataatcttgcacgatggccttgcacttaggcagtgccagtattcctatggtatacagtgaaggggcattcggtttcagtaactctgatttgtaatcgtcctac

SEQ ID NO: 1004 - DNA, 299 bp, Homo sapiens
cacctttttctttttttttttttgagatggagtctcactctgttgcccaggctggagtgcagtggtgcgatcttggctcactgcaagctccgcctcctgggttcacgccattctcctgcctcagcctcccaagtagctgggactacaggtgcccaccaccacgcccggctaattttttgcatttttagtagagacgggtttcaccattttagccaggatggtctcgagctcctgacctcgtgatccgcctgcctctgcctccccaagtgctgggattacaggcgtgagccactgcaccc

SEQ ID NO: 1005 - DNA, 239 bp, Homo sapiens
tttttttttttttgagatggagtctcactctgttgcccaggctggagtgcagtggtgcgatcttggctcactgcaagctccgcctcctgggttcacgccattctcctgcctcagcctcccaagtagctgggactacaggtgcccaccaccacgcccggctaattttttgcatttttagtagagacgggtttcaccattttagccaggatggtctcgagctcctgacctcgtgatccgcc

SEQ ID NO: 1006 - DNA, 266 bp, Homo sapiens; identical to SEQ ID NO: 1003

SEQ ID NO: 1007 - DNA, 356 bp, Homo sapiens
gagaaatttctcataaggttgtagaaagagattgtaactttaactctacaatcataaggttgtagaaagagactgcctcctttaactttaccactctccacattggcatttactctaggagaggagatatagaggtttgtgctcttttaatattttgtatttccacattgctgattggggaaatccttttggtgactgatacctagagccttgaaaatgtttatacattgttgagaatctttcctaaggagctaaatggaaaaattctatgcccacagatgtacttagcagtattattaataatagagaaaaattagaatacatccaaatgttcaattataaagaacaagttaatg

SEQ ID NO: 1008 - DNA, 794 bp, Homo sapiens
gatctgagattgtgccactgcactccagcctaggtaacagagtaagactctgtctcaaatgagtgaatgaatgaatgatccaggaagaaaaaggaacattttatttgccagctctggaacttgtaacattgaattaggtagctattcaccattttaaatttacatttttattattctaaatatctttaacaaggacttttaacataggggtctttttaaataagtgttttgctaggcacagtggctcacagttgaggagccacttggtaggctgaaggagggtggatcgcttgagcccgggagttccagaccagtctaggcaacatggtgaaaccccatcgctacaaaaaatgcaaaaattagcctggcatggtgacgcatgcctgtaatctcagcttcttggggatgctggggcaggatgcttgagcccaggaggtcgaggctgcagtgagccaagattgcaccactgcagtccagcttgggtgacagagtgagaccctgtctcaacaacaacaaaaataagtaaaataataaaaaataagttaaataaacgttttaagtaagtaaaataagtgttttatgtttctggtttgttagggctctctaatctgttgaaaactaggggtaaataaacagggcaggtaaacattttcaatagaacctcattaatctataagaaaaagtaagaaatattctccttaccctaaactagtgctggaaaagaaaggttatcaacaattagtacattaaggaacagggaaacatgcagacagattggaccaatccaaaatagc

SEQ ID NO: 1009 - DNA, 312 bp, Homo sapiens
ctgattataaaagttcttaaggtaccacacaattctgaagtaccttctgaattatcaaaaaaaagttacgttagtatagatttagatttatgtattcagttctttggaagctgcggttttgtatatggcaattcgtgattagaatattcaccagcttgcacagtgtaaagaaaatagttttgtaaattatgccatttggagaggtagctgctttttttaaaacatattctgaaatttgctctttgaactatagtctactgtagtttcactgtctgcatcattttgatgaacgctacccctgaggttcctttt

SEQ ID NO: 1010 - DNA, 312 bp, Homo sapiens; identical to SEQ ID NO: 1009

SEQ ID NO: 1011 - DNA, 603 bp, Homo sapiens
gcaatttagttccttttccttgttctaataaattagagggaaacatacattgtataggttattaagaactttgtaacagcatcacaaactcccattcatttttttccttaattttcaagtgttatgaaaataacaacctcagcgtatttttcaattttatctattttctcctctatatccgtcaccgatttgtatgtatttacatttataaaatgactgaatgaaatattttttgtacagcttgtcttattgatatcaagtgcagcgcagatgtatgccaattccaacttttaaaaaacccctctgtgtattaatttttctttgaaatattaaggcaccaaggaagaattgtctttaagcattcagtaaactcagtacgtgcctaaggatttttttatggaacaacagctcatatcataaattggagagacattgtcttgaagctgaaaatactgagtctttctgattagcaggttgtttggatctttaaataatacattttagcttaagatttgtattgttttacttcttaaaaatttattattaaatttaagttttaacttctgttttgagtgataatccatttatgtagctcagaatttc

SEQ ID NO: 1012 - DNA, 603 bp, Homo sapiens; identical to SEQ ID NO: 1011

SEQ ID NO: 1013 - DNA, 349 bp, Homo sapiens
taaaaattaactgttctttgttgaagactctatataagctgaaatcaaggctacctcttggagaattactcattctctgggtgtcttatatgtcatgtatatacaagacatacatgttcataagcttctgtttgtttttctcttgttaatctgtctttagttctaaggagtccattccaactaagaacctatgggggttgaagaaaaaatattcttcccctacacatctaaaggagtgactctttgagatctcctggcacacactaaatcgactgctactcgaccattcgagtgtcccttgaatgtggtgttggttcatggaatctctgctataattcatccaaagaaa

SEQ ID NO: 1014 - DNA, 438 bp, Homo sapiens
ggttttaaagttccacagaaattactagctatttaatattattattatattagttcactttaatttacactaattttatagagaaataaatacttttaaaaagatgttttccagcagcctgagaatgactacaggatttagcagtagtgtcttgttttgaatggcatttaaacacttcagtcatagttttaatttgagaaatcaggattcagatttcctaagcaggcagtgtatcagctcttgtttttttctcagattaattattttgcagtgtgattgttgtctgtacttttggccaaccgtggcctcaaattatttgagaattaggtgttgtatttaaaaaaaaaaagccaacaggagtcttgttttctccgtgcgtaagggagtggccgaggggagcggatgagaacagtggcagcacgagtgccccggcctggg

SEQ ID NO: 1015 - DNA, 438 bp, Homo sapiens; identical to SEQ ID NO: 1014

SEQ ID NO: 1016 - DNA, 341 bp, Homo sapiens
ggctttttagtttttggctttgccgtgttccttgggttgcagatttcactatatctgaaatctcagagtaccgaggctccaaggatgctgcagagaagaaggtgaactggaatataggcaagaggtaggtaggatggaggattttgtcagggcagatgggaaggaagaaaatacatctgctgcacactgctctgcaaagccatgcttggcctgggttggaaggcagaaggccgcgagtgcccgggttccctgtgacagaggcaacacgtcaccctctggtgcctgtcaggtggtgtgtgctgtcactcatgatagctcagtggagttctcccccaaccccg

SEQ ID NO: 1017 - DNA, 208 bp, Homo sapiens
gaattttgagaatagcctgggcaacatagcgagaccccatctctataaaataaaaaatgaaaaaattagctgggtgtggtggcatgtacctgtggtcccaactactctggaggctgaggtaggaggatcaattgagcccaggatttgaggctgctatgattgcgccactgcactccagcctgggcaacagagtgagaccctgtctctt

SEQ ID NO: 1018 - DNA, 341 bp, Homo sapiens; identical to SEQ ID NO: 1016

SEQ ID NO: 1019 - DNA, 6902 bp, Homo sapiens
cgtggcttcggcagcgccccctctagatctcagtgacctgcttcagctgaacaaccggaacctcaatcttgacatatatgttattgggtaggtatctgcaggctccttcgcccatccctgaccagtcccaggtttccctgtgggaagcactgtgacctgccctcctccgctctggagtctgaaggctgggagctttcagcctgcttcagggacagtcccatgtctctggtcccgggtcagcaacggcaaagggggctggagatcagcaggcaggggagggagacctcatggccatcagaactcaggccttgaaagtccgtgaagatggtatcaaatatctgtggcaggggaagtagcctggaggccaggggccaagcctctgagctggcatggtcagtttgcaggaattgaactctgggatcataagcctcctttccgatgctgcctttaatgactcgtggagcagtttcctcatggatgtgctttcccctctgagcttcatcaaggtaacttgccagttcattggcacttgacaactgtgttttcacatctccactgacccctgcttgttgggtctgatgtgttcctcttactcctgctcagcctttcatgctgtttcccatttgtttaaagggctaaacctcccttccacctggaccccggggcccctgcctgccttcgcctttctgagggagctggagtctccaggggttgggttaacacctggatatgtttcagcttgggaagattctgaggggaggtgcagcagggcttgtcatcacctcagtgctggctgctgccccagccaccagtctctactcaaatgcccatcctgaagtctctgagtgtaatcatacggctgtcatttatcaagtgcttacttgttgttacacatcataagtagctctttatagtatatatgttattttaaaatcttaacaagtctgttgaaatagagatattttacagagaaaaccatggctcagaagccacatgcgctatctgggatttggatccagatctctcaaacttcataacccaagttcttaactactaataccttattgctatgctggtgaactctaagactgacagatcttaggcgtggctagcctgctggtgtcatagggtatcctcaggtcatacgggacgtgcacttcagattctgggggtccagaggttaggagaggggagtcaggtgtggtgggtactttgggcggctttcttagtctgagagaccagtatactctggggtgtctttagacagtaggagagtccacaggaaggccctgggttgccagatcttcaccttcaccttggttctgccctgcacacctgaggaatgaaacacactcccattcacagcacctggtatacagctgcttagaaataccagaattccctctttccccttcctggatgactcttgttcttcagaatggattctgtcagcctagtttgcctgggggtactgaggcaagagctgtgtgtcctttggagggggagcagaatggggaggaaagaatctaaggtttagaactcctgctgaggataaaaaacaccagcccgagtccttggttccctccacatcaaacccagaggcctccttctgtagatagggagctagatccttacagaggacacaaccacttctctctcacccgccactcccttcccaagactgcaggcctccttgcttctcggctgactggcaaaggattggtaggatggaattgagccaaggaaattagctcaacttgtggcagagacacagccctttctacccatgtggcctactgagattgggaggccagactgagggcctggcacccaaaatgaatgcccttctttccccagccaagaatcagggtggatgggtgagctccgtgcatttgccagctatagactgagaagggctgacccccttccactgctccagggcccccagccacctcctgctagtcctttcttcgctcctcctacttcatttcctccaactagaactttccctagaactctcctgcttttcccacagccccaccctttctcccagtctaactctgtcctgccccgaccccaccctccccgcccccacttccctgctgctccttcacaaagcgagccagtgtctttgtggtggaacccagtggcctaaagctgctttgtgggtggggattaagcctgaaacttttcctgagtctttatcagtccccttgcttcaatcctgaccctgggagtcagcccctcatggtccagcccgtcctccatccctgttggcacgtgtgcttgggtgtaggagagagaagactggggaggaagtaggcttgaggacacacctgtagcaacctctggcccacctgaagttctgatgcctcccttacccagtgctgggtttgaggttccccctgcttcgactccgctatgccagggctcgtggcctgcaggatcaagtttcataattcctggaaggccccagtacacgctccccacccggggatttcctccttggcctccacacttcattctccggaaacggctcctcgggtgccggtggtagacagcctgaacctgagagggagagctactggctgcggcccattcccaccccaccttttgcagctgcagatagtagggatcttggcagtcctagccctttgatgttgttttacaatacaggtagccctactggttccttagcctccctaaatcttagttcctcaactacaaaacagggacggtgattccttacaggcttggcaggagtaaatgagagaggaggcacttgagcagatgttagctattctccctagcctgtgcacatgtgtccttacccactggcattccatgggcgttgccttcatggacacccagctgcacgcagtatatagttatggggtttggggggagcattttcttatttttttttcactgagctataatgtacacagaaaagcatgcagaaattcagtgtacactttgatgggtttttgcatatacccatgttaccatcagccacatctagataaagagcaggccgagtacagtggctcatgcctgtaatcccagcactttgggattatagaggcagggagattgcttgaacccaggagttcaagaccaccctgggcaatatggcaagaccctgtctctacaaaacaaacaaaaatagccgggcatgttggtgcacacctgtggtcctagctactcaggaggctgaggtgggaggattgcctgagcccaggatgtcaaggctgcagcgagccgtgattgcaccactgcactccagcctggtagacagagcgaaatcctgtctctaagtaaaaagggaggaatgggggcagctggtggataaagaacatttccaaggagagagggaggaagggaaggggataaagaagagcatttcccagtatcctggaaacctcttatgttccttccttttaagaatgcttggccgggcgcggtggctcacgcctacaatcccagcactttgagaggccaaggcaggcagatcacctgaggtcgagagttcaagaccagcctggccaacacggtgaaaccccatctctactaaaaatacaagacctggtggtgggcgcctgtaatcccagctacttgggaagctgagacaggagaatcacctgaacccaggaggtggaggttgcagtgagccgagaccacgccattgcactccagcctgggcgacagagcgagactccgtctcaaaaaaaaaagaatgctgaaaccaaaaaataatagctttcagataatccccacagcatctatgagatggattcctactttatcaatgagaaaatacactgagaaactgcctcaatgtcaaatactaagaatcagagccagggtttgaacccagatctaacttcaaagccagtatccttagcttatcttctcttcccgccacccgcacgcctaggcgcagaatcgaaaacctcagcccccagaatgtatcatttggcagctgagaagaagaatggaaaggcttgaaactctgagattcaaactgggatatcgtagaccctggagcaggacactgcatgtagctgagggctctctagagtccctagcacggagcttggaagggatgcacttggcctgtgtggtttaatgagcgacctttgccctctctctcctgcaggtctcccatgtccgtatgcaggggatcctcttactggtctttgccaagtatcagcatttgccctatatccagattctgtctactaaatccacccccactggcctgtttgggtactgggtaaggactgagctattgtctgagtcgtgagctgggaagggctgggaactgtggagctgggcaaaagaaaaaggaagtgaaaggaatcttggtcctctgtccagcccaatgcatgtttgttcttttgcctcagagtgggcttgctatccctgaggccaggcgaggcgagctgggctctgtgcatggagagatcaccctgggaagcttagttactgtccctaggagaccctgcaggaagtgagactgtctgccctcaggtccaggatgtggaaagaggggtgtgtccaacccgagtagcttcccactcttctgttgacctgttctaccaggggaacaaaggtggagtcaacatctgcctgaagctttatggctactatgtcagcatcatcaactgccacctgcctccccacatttccaacaattaccagcggctggagcactttgaccggatcctggagatgcagaattgtgaggggcgagacatcccaaacatcctggaccacgagtgagcctgggtctgcagaccgttccccgccctctgccccacgctaacccccactaacccccacgagtgagcctgggtctgcagaccgctccccgccctctgccccacgctgacccccacgagtgagcctgggtctgcagactgttccccgccctctgccccacgctgaccgccacgagtgagcctgggtctgcagactgttccccgccctctgccccacgctgacccccacgagtgagcctgggtctgcagaccgttccccgccctctgccccacgctgaccgccacgagtgagcctgggtctgcagaccgttccccgccctctgccccacgctgacccccacgagtgagcctgggtctgcagactgttccccgccctctgccccacgctaacccaagccagcatcctctgctccatcacggatcccccagccagtgtcgtcagtgttctggctcccaccctctccctgacccttccctggtgcccatctgctgtctccccttgctttgcctgcctggggtccccttcctccagcccgtctgtcttgcttagaaaccctgaacacttgggaacaggtcaaggaccttgtggctcctgaggtcaccaggagggcttctcagcctttcctcgtgaccagttaaggagaggaaggaagggccacagcctgctctgtgtttgccagagcaggctctttggtaggtctctccggtttgaatggtggtttaggagccatgagaacagttccagaggacccacgcgtgccctggcgtctcacttgcccctcaggttttctgtgccccagcagcccttgggttgagcaggctgagccacctggtgatctcccttccccgacttcatcacaaatcctcaggctgccctcctttttttctgaagcctcattatctggtttggagacatgaactttcggatcgaggactttgggttgcactttgttcgggaatccattaaaaatcggtgctacggtggcctgtgggagaaggaccaggtatccagtgaggggagggtcccagggggtgatctgagcccacggtgggggccatgtgagctgtgcagagtgttgctagatgccctcgctgctgttttcttttgcccaggtctggtgggggaggctgtctagcagggcttcgcatccaggggtgaggcagccacgcctgatcttcacatggaaaagccagggtaacagaccctggatgtgctttagaatagagagtcagatacaaagcatgaaatgaattatttaaaaaagaagaataggggccgggcacggtggcttatgcctgtaattccagcactctgggaggccgaggtgggtggatcacctgaggtcgggggtttgagaccagcctgaccaacttggagaaacctcatctctactaaaaatacaaaaaaaaattcgccgggcgtggtggcacgtgcctgtaatcccagctactcgggaggctgaggtaggggaatcgcttgaacccgggaggcagaggttgcagtgagcagagatagcgccattgcactccagcctgggcaacaaaagcaaaactccatctcaaaaaaaaaaaaagaagaagaatagggaaccagaagggctttgcaccaggtaccatcatgcgtcagcccatcgtgtccctgtcgtctttcccatccccagcctcgtttccctcttggagggtgaggtgcccctttggagaaccctggcttccccaggttcccctctgacacatgtctgctagtgatctcccctagagatggaattccaagttgggtccctgcagtctaaggactgggaaacggcagacagctgcctcccctgggccttggtaatgtttccgaaaggattcgcctgctttctggtgggagtgggctgctgagtagtcactggggcagtgaggaattggagtggcattgcttgactcttgccccatttgtgacggcatgtgctgatcccttgaatggagtgtggtactgggccactgggtcgagactactgggagacggggactatgactttgtctgcagctcagcattgccaagaaacatgacccgctgctccgggagttccaggagggccgcctactcttcccgcccacctacaagtttgataggaa

SEQ ID NO: 1020 - DNA, 22161 bp, Homo sapiens
  SITE (179): n equals a,t,g, or c
  SITE (450): n equals a,t,g, or c
  SITE (607): n equals a,t,g, or c
  SITE (1357): n equals a,t,g, or c
  SITE (2307): n equals a,t,g, or c
  SITE (2898): n equals a,t,g, or c
  SITE (4895): n equals a,t,g, or c
  SITE (5744): n equals a,t,g, or c
  SITE (10106): n equals a,t,g, or c
  SITE (11622): n equals a,t,g, or c
  SITE (12838): n equals a,t,g, or c
  SITE (12900): n equals a,t,g, or c
  SITE (20446): n equals a,t,g, or c
  SITE (20981): n equals a,t,g, or c
  SITE (20988): n equals a,t,g, or c
cggccgcacacctcgcgtcgtctggggcagtgttgcgcgtgcgctgatgacaggcccgacacgcccctcttacgtccgcgaacccgtcttcgctcagcctctcgcagctttgcgctcgtgggagagtcccgcctccttctgcgaaccgcaccacccagatcccggggtgcgcggagggncgcgtctctgacggaagccggggcggacggtcggagtccggaagaaaaacagtccgcgacagctaggcgcgtgagaccgaccgccgcgcagggctgctctggccgggacccgctggccgggagacgcgaacctgccggaccaccgcgcggggacgacggcggccatgagctcgcggaagctgagcgggccgaaaggcaggaggctcaggtgagggcaccctggcggcagaggcaggcctgctcggggggatcggcgccccttgggctgcgnggctgggggtggacaaggcaccagacctccatgactgcctttggttcagaggcgctctcgccttctcccacgcctgtgtcaggtgggctgtgttgggcccgagcctcgcgccccctctaagccgaggccgccaagctcgttcccactggggcgcagncaggtgtcccggttgctttctggagaggacagccgtgtggggttgtttgaggttaaagacataacgaggccgtcacccttcggctctcggttagaaatctttttcctacttttcatcagcacatacatcaggaggtctgcctgatcccatggtgaaccccgggaatccgaaatcagattgagataagatcctttagggaagtgacttagcctggtctcttgcctgctctttcacggggaacaacgctaatcgcccacttagtctaagtcacgatgcttggatttgctgctaatcgtcggatttgagagtgggaacaagaaatccggacttttgctctccatcctcttagagtgagtctgggaaaagaagtctctgagtaaaaggtctttgttccttaagcctctgtcggacagcagggggagatcgtaaacaaatgaagctcaaaatctcaggccgagtgcctgggaaggtggtttctgtatagtgttgtttatgctaacagggagggacaggaagttgctttaaactggccaagaatttcttgaagtgcttttgagaacgtcgacctctaaggacggggtctgttggaggagagatgttttggcattaactgcccttttctcccatccccctgtaccctctgccattccagatctccagctgctgcaggtactcctcatcgtgtgcctaggactcatgctaggctgttcctggtctctgcagggtctgtagctcctgcccgctctttgntccgcacagtctgaggcttcttgaagagctgctgtgactgactgttccactaaagacatctgtaggtctctctttcctgagcctctgactggatccagtgtcattgaggccccttatctagttttcttgcttccctaagacttgtaagctgaggtggaaaatatccaactgatgacttttccccagagagtactctttatttttcacggaatactacgcagacatagagcatagactcttaagagagatgtcgagaaacctgttacttaaaaactccttggccgggcgcggtggctcaggcctgtaatcccagcactttgggaggctgaggcgggcggatcacctgagagatcaggagttcaggaccagcctggccaacatggtgaaaccccgtctctactaaaaatacaaaagttagccagatgtggtggcacacacctgtaatcccagctacttgggaggttgaggcaggagaactgctggaacctgggaggcggaggctgcgatgagccgagatcatcccagtccactccagcctgggcaacagagtgagactcagtctcaaaaaaaaaaaaaaaaaaagtctcgctgaagtgcttggcaaaattggcttgctccagggatctgctagggaggagagaggaagggaatatggtggtgttatctcttttattttttaaattcctctgcccttgtagtgctgaggcctatcacaaggtgaaatctgaatccctaggatcttcctggtggtcttaggaacacttggggtgagaagtagggatcagaagttgccgactgagccatagatgatgacagaggggtgtgggtggctggaggagctgatggaattaatacattcctggcagttcagccccctaacccttcgctagcctgacctgaaattcttgggctccctttggcgactctgctatatcacgagcaccagtgcntgccgggtgtgggtggctgtgagccagcatggaggacccagtccggggtggggatttcttgcttcagcagagaaaggtgaggacggacagctgatggttcagtatccccattccctccaccagcacagaaacccacatttcccatcatgagtgtggcagattgcagtgacataagcaggcctagaccccgtgcactatcttttttttttttcttttgagacagagtctcactctgtcacccaggctggagtgcagtggcacaatgtcggctcactgcaacctctgcctcgtgggttcaagcaattctcctgcctcagcctccagagtagctgggattacaggcgcctgccaccatgctgggctaatttttgtacttttagtagagacggggtttcaccatgttggccaggcttgtctcgaactcccgacctcaggtgatccgcccacctcggccgcccaaagtgctgtgatgacaacgtgtgagcctctgcgcccagccgaccccgtgcactatcttatcctccttcctccatgacttccctctgcatcccttccgcagcatacacgtcgtgacttggaacgtggcttcgncagcgccccctctagatctcagtgacctgcttcagctgaacaaccggaacctcaatcttgacatatatgttattgggtaggtatctgcaggctccttcgcccatccctgaccagtcccaggtttccctgtgggaagcactgtgacctgccctcctccgctctggagtctgaaggctgggagctttcagcctgcttcagggacagtcccatgtctctggtcccgggtcagcaacggcaaagggggctggagatcagcaggcaggggagggagacctcatggccatcagaactcaggccttgaaagtccgtgaagatggtatcaaatatctgtggcaggggaagtagcctggaggccaggggccaagcctctgagctggcatggtcagtttgcaggaattgaactctgggatcataagcctcctttccgatgctgcctttaatgactcgtggagcagtttcctcatggatgtgctttcccctctgagcttcatcaaggtaacttgccagttcattggcacttgacaactgtgttttcacatctccactgacccctgcttgttgggtctgatgtgttcctcttactcctgctcagcctttcatgctgtttcccatttgtttaaagggctaaacctcccttccacctggaccccggggcccctgcctgccttcgcctttctgagggagctggagtctccaggggttgggttaacacctggatatgtttcagcttgggaagattctgaggggaggtgcagcagggcttgtcatcacctcagtgctggccgctgccccagccaccagtctctacacaaatgcccatcctgaagtctctgagtgtaatcatacggctgtcatttatcaagtgcttacttgttgttacacatcataagtagctctttatagtatatatgttattttaaaatcttaacaagtctgttgaaatagagatattttacagagaaaaccatggctcagaagccacatgcgctatctgggatttagatccagatctctcaaacttcataacccaagttcttaactactaataccttattgctatgctggtgaactctaagactgacagatcttaggcgtggctagcctgctggtgtcatagggtatcctcaggtcatacgggacgtgcacttcagattctgggggtccagaggttaggagaggggagtcaggtgtggtgggtactttgggcggctttcttagtctgagagaccagtatactctggggtgtctttagacagtaggagagtccacaggaaggccctgggttgccagatcttcaccttcaccttggttctgccctgcacacctgaggattgaaacacactcccattcacagcacctggtatacagctgcttagaaataccagaattccctctttccccttcctggatgactcttgttcttcagaatggattctgtcagcctagtttgcctgggggtactgaggcaagagctgtgtgtcctttggagggggagcagaatggggaggaaagaatctaaggtttagaactcctgctgaggatagaaaacaccagcccgagtccttggttccctccacatcaaacccagaggcctccttctgtagatagggagctagatccttacagaggacacaaccacttctctctcacccgccactcccttcccaagactgcaggcctccttgcttctcggctgactggcaaaggattggtaggatggaattgagccaaggaaattagctcaacttgtggcagagacacagccctttctacccatgtggcctactgagattgggaggccagactgagggcctggcacccaaaatgaatgcccttctttccccagccaagaatcagggtggatgggtgagctccgtgcatttgccagctatagactgagaagggctgacccccttccactgctccagggcccccagccacctcctgctagtcctttcttcgctcctcctacttcatttcctccaactagaactttnccctagaactctcctgcttttcccacagccccaccctttctcccagtctaactctgtcctgcccctaccccaccctccccgcccccacttccctgctgctccttcacaaagcgagccagtgtctttgtggtggaacccagtggcctaaagctgctttgtgggtggggattaagcctgaaacttttcctgagtctttatcagtccccttgcttcaatcctgaccctgggagtcagcccctcatggtccagcccgtcctccatccctgttggcacgtgtgcttgggtgtaggagagagaagactggggaggaagtaggcttgaggacacacctgtagcaacctctggcccacctgaagttctgatgcctcccttacccagtgctgggtttgaggttccccctgcttcgactccgctatgccagggctcgtggcctgcaggatcaagtttcataattcctggaaggccccagtacacgctccccacccggggatttcctccttggcctccacacttcattctccggaaacggctcctcgggtgccggtggtagacagcctgaacctgagagggagagctactggctgcggcccattcccaccccaccttttgcagctgcagatagtagggatcttggcagtcctagccctttgatgttgttttacaatacaggtagccctactggttccttagcctccctaaatcttagttcctcaactacaaaacagggacggtgattccttacaggcttggcaggagtaaatgagagaggaggcacttgagcagatgttagctattctccctagcctgtgcacatgtgtccttacccactggcattccatgggcgttgcnttcatggacacccagctgcacgcagtatatagttatggggtttggggggagcattttcttatttttttttcactgagctataatgtacacagaaaagcatgcagaaattcagtgtacactttgatgggtttttgcatatacccatgttaccatcagccacatctagataaagagcaggccgagtacagtggctcatgcctgtaatcccagcactttgggattatagaggcagggagattgcttgaacccaggaattcaagaccaccctgggcaatatggcaagaccctgtctctacaaaacaaacaaaaatagccgggcatgttggtgcacacctgtggtcctagctactcaggaggctgaggtgggaggattgcctgagcccaggatgtcaaggctgcagcgagccgtgattgcaccactgcactccagcctggtagacagagcgaaatcctgtctctaagtaaaaagggaggaatgggggcagctggtggataaagaacatttccaaggagagagggaggaagggaaggggataaagaagagcatttcccagtatcctggaaacctcttatgttccttccttttaagaatgcttggccgggcgcggtggctcacgcctacaatcccagcactttgagaggccaaggcaggcagatcacctgaggtcgagagttcaagaccagcctggccaacacggtgaaaccccatctctactaaaaatacaagacctggtggtgggcgcctgtaatcccagctacttgggaagctgagacaggagaatcacctgaacccaggaggtggaggttgcagtgagccgagaccacgccattgcactccagcctgggcgacagagcgagactccgtctcaaaaaaaaaagaatgctgaaaccaaaaaataatagctttcagataatccccacagcatctatgagatggattcctactttatcaatgagaaaatacactgagaaactgcctcaatgtcaaatactaagaatcagagccagggtttgaacccagatctaacttcaaagccagtatccttagcttatcttctcttcccgccacccgcacgcctaggcgcagaatcgaaaacctcagcccccagaatgtatcatttggcagctgagaagaagaatggaaaggcttgaaactctgagattcaaactgggatatcgtagaccctggagcaggacactgcatgtagctgagggctctctagagtccctagcacggagcttggaagggatgcacttggcctgtgtggtttaatgagcgacctttgccctctctctcctgcaggtctcccatgtccgtatgcaggggatcctcttactggtctttgccaagtatcagcatttgccctatatccagattctgtctactaaatccacccccactggcctgtttgggtactgggtaaggactgagctattgtctgagtcgtgagctgggaagggctgggaactgtggagctgggcaaaagaaaaaggaagtgaaaggaatcttggtcctctgtccagcccaatgcatgtttgttcttttgcctcagagtgggcttgctatccctgaggccaggcgaggcgagctgggctctgtgcatggagagatcaccctgggaagcttagttactgtccctaggagaccctgcaggaagtgagactgtctgccctcaggtccaggatgtggaaagaggggtgtgtccaacccgagtagcttcccactcttctgttgacctgttctaccaggggaacaaaggtggagtcaacatctgcctgaagctttatggctactatgtcagcatcatcaactgccacctgcctccccacatttccaacaattaccagcggctggagcactttgaccggatcctggagatgcagaattgtgaggggcgagacatcccaaacatcctggaccacgagtgagcctgggtctgcagaccgttccccgccctctgccccacgctaacccccacgagtgagcctgggtctgcagaccgctccccgccctctgccccacgctgacccccacgagtgagcctgggtctgcagactgttccccgccctctgccccacgctgaccgccacgagtgagcctgggtctgcagactgttccccgccctctgccccacgctgacccccacgagtgagcctgggtctgcagactgttccccgccctctgccccacgctgaccgccacgagtgagcctgggtctgcagactgttccccgccctctgccccacgctaacccaagccagcatcctctgctccatcacggatcccccagccagtgtcgtcagtgttctggctcccaccctctccctgacccttccctggtgcccatctgctgtctccccttgctttgcctgcctggggtccccttcctccagcccgtctgtcttgcttagaaaccctgaacacttgggaacaggtcaaggaccttgtggctcctgaggtcaccaggagggcttctcagcctttcctcgtgaccagttaaggagaggaaggaagggccacagcctgctctgtgtttgccagagcaggctctttggtaggtctctccggtttgaatggtggtttaggagccatgagaacagttccagaggacccacgcgtgccctggcgtctcacttgcccctcaggttttctgtgccccagcagcccttgggttgaacaggctgagccacctggtgatctcccttccccgacttcatcacaaatcctcaggctgccctcctttttttctgaagcctcattatctggtttggagacatgaactttcggatcgaggactttgggttgcactttgttcgggaatccattaaaaatcggtgctacggtggcctgtgggagaaggaccaggtatccagtgaggggagggtcccagggggtgatctgagcccacggtgggggccatgtgagctgtgcagagtgttgctagatgccctcgctgctgttttcttttgcccaggtctggtgggggaggctgtctagcagggcttcgcatccaggggtgaggcagccacgcctgatcttcacatggaaaagccagggtaacagaccctggatgtgctttagaatagagagtcagatacaaagcatgaaatgaattctttaaaaaagaagaataggggccgggcacggtggcttatgcctgtaattccagcactctgggaggccgaggtgggtggatcacctgaggtcgggggtttgagaccagcctgaccaacttggagaaacctcatctctactaaaaatacaaaaaaaaattcgccgggcgtggtggcacgtgcctgtaatcccagctactcgggaggctgaggtaggggaatcgcttgaacccgggaggcagaggttgcagtgagcagagatagcgccattgcactccagcctgggcaacaaaagcaaaactccatctcaaaaaaaaaaaaagaagaagaatagggaaccagaagggctttgcaccaggtaccatcatgcgtcagcccatcgtgtccctgtcgtctttcccatccccagcctcgtttccctcttggagggtgaggtgcccctttggagaaccctggcttccccaggttcccctctgacacatgtctgctagtgatctcccctagagatggaattccaagttgggtccctgcagtctaaggactgggaaacggcagacagctgcctcccctgggccttggtaatgtttccgaaaggattcgcctgctttctggtgggagtgggctgctgagtagtcactggagcagtgaggaattggagtggcattgcttgactcttgccccatttgtgacggcatgtgctgatcccttgaatggagtgtagtactgggccactgggtcgagactactgggagacggggactatgactgtgtctgcagctcagcattgccaagaaacatgacccgctgctccgggagttccaggagggccgcctactcttcccgcccacctacaagtttgataggaactccaacgactatgacaccaggtgaggagggagtgcggggccagaaggtctaggaagtcaggttacactgaccctgctggcatgggaactgtctcagaatagaagtgttagggggggcaggaattggtctagtcatcccctctccagagtggcacctcctgtccacttcatgaggcgctgactcggggagccgtcccagatctcgagagagtgggaggaaagccagtgccagcaagggcaggagaggtgtgtggggggtgggggtgttacagatagaaccagaggagagggtggagcagctgcctcctgacctaggagggactgcacttcagcttcgggaaaccccagaccttctggtccccaaacggggcagaaagcttgncccagccagttactggtattaaggatgcctgccccagcctgtgaatgggtcaggtcttgtgtgagaaggtgaagtagtaggtagagagtttcatcaggatcagtgtagagatcatgagtctggtagttagaagcacggctctgtcttattttagccaaagcgtttaggccttgattttgtcagctataaggtgtggatgagaagagcacacacctcatgaggctgaggactgaaggaggccgtcacccagtaaccatgggagagaacggctattgtgacttttcgattcatgccggctgggcgcggtggctcacacctgtaatcccagcactttgggagggccgaggcaggtggatcactgaaggtcaggagtttgagaccagcctgaccaacatggtaaaaccccatctctactaaaaattcaaaaattagctgggcatggtagcgcgcacctgtaatcccagctactcaggaagctgaggcaggagaattgcttgaacccaagaggcagaggttgccgtgagccgagatctcaccgctgcactccagcctgggtgacagagcgagactccgtctcaaaaaaataataataaaataaatagattcatgtcttcccgtgatagatttactaaaaacctttctaagaagctgagaaggggccaaataaccaccaaaacctgagaaagaaccactggcaacatgtccctgactcattttggggcaaggaacctaatctctttgaagaaaagaagagccccttacatgtcatgagggtctttgttccagcgggagcagcttgttcattcctcctagctggagtgtctctgtgagggaggcgggaggtaccggcagggcagcccagggctttgggatttagccagggaagaaatatctccacagccagaccaagacaagaggtagaactcaagcttggttctggaagtgttacagcaaagccaaaatatccttgtcaaggaaagggggaaagagtgagccgattcagcagtgtggagcaagacagggtagggtcgtgagcagggccgtccacagaagaggaggcagtggacgctggggaagggacccgccctgggcaacagagcaggcaggaaaggaggtaagaggccaggctgcagcaggatggccggcccagatcaacagctgcagggagactgccagtctctgcagccatccattggaaacaagagtcctggtgggagctgtaaggacagggtagggccttgggtggggagggggtgcttgaagccaggagttcaagacctgcctgggcaacatagttagaccccgtctctatgaaaatttaaaaattagctgggtgtagtggcatgtgcctgtagtcccagctactcaggaaagctgaggcaggaggatcacttgagcccaggagttaaaggctgcagtgagctgagattgactcactgcactccagctgggcaaccctgtctccaaaaaaaaaaatcctctttaaaaacttaccagcaggaagagagctgctggncaggccctacggccaggcgtccccttctcccagccctatggcagagagacctccaggagactgaagtttgttgcaaaagctggatctgggctggagttggcagggtcagaaagggtagagagctttggagaagttcaagggcttccccaggtagctcagccagtgagtggcagagctggggctgagactgatctctgagtctgtagcccacagtactttcctcaagcccatcgtacctcaggattcatggtcatccttgccagcaagaggaaaaaggatggcacggtgaggaaggcagactcccgctaaggaggaggcacgcacctatttccaaataacagctcattgtgattggcgtgcaggtgtgcgccaaggctttgcctgtatcagttcctaccatgtcctcgttaggtaaacagtgttattattgcctgtttacaaggaaagcaactgagtctcaaagaatatataagtaaggagtaacaggcttcttcatcgcacgaggattggaactcatatctgtgtctgtagactcatgagccttcggtactgcttccctttggctggagcccaggaaatgcaagactgtctgggcgggaacaggggacatggtaactgaaatactcctggctggggccaggatccaggggcagctgggagttttgcagtgagcagggcctgagcccacctggggaacagatattcctgtctaatgacactgttattttatccttggaaacccagttgagacatcacttctcctaggacgccttcccggcccctcctcatctcactgagagttcctctcctgccttgtgccacccccagccttgcgcatgccatgctttcagtgttgcttttgagacacagcgtacctttcttactgtactgtgattgcccagagagcagagacgatctgatttaggaccatccctgggagtagcacagtacctggcatatgttaccaagcctgggagttagtcaatagaaggtttccagaactccgtgcagaaggttggagcaaatgttaaggaggtgaacagctaaagctaggagaggcctgtcagacttcctgtcaaggacagtatcttgaaggaggcacagagtttcgcagaaagcagaaaggcgggctttccaatcagtcagcacactgacgagaggaacctggagggggccggtttgatgaagtgactgtgagcgttagtgtgctgggccnagccactacggtgtccctgagccaagatgtaatgagaaacgaggccagctcccttatagggnagggcaaaagggctgagggcagggcgggaatcctgctaaagtccggggttacactggagttttgttatagttgccactgtgagcccagacaaagtgttttatttttttcgagacagagttttcttcttgtcacccaggctggagtgcaatggcatgatcttggctcactgcaacgtccgcctcctgggctcaagtgattctcgcctgcctcagcctcctgaatagctaggattacaggcacccgccaccatgcctggctaattttttgtatttttagtagagatgaggtttcaccatcagagtgagaaccctccccctgcaaaatttttttaaaaggcctggtgtggccgggtgcggtggctcacgcctgaaatcccagcactttgggaggccaggcgggtggatcacgaggtcaggagatcgagaccatcctggcgaacacggtgaaaccccgtctctactaaaaataaaaaaaaattagccgggcatggtggcgggcacctgtagtcccagctactcgggaggctgaggcaggagaatggcgtgaacccaggaggcggaggttgcagtgagccgagatcacgccactgcactccagcctgagtgacagagcgagacttcgtctcaaaaaaaaaaaaaaggccaggcgtgatgggtcacacctctaaacccagcaatttgggaggcagagacaggatgatcacttgaacccaggagctcaggttcagcctgggcaacatggtgaaaccccatctctacaaaaaaatacaaaagttggcatggtggcacatacccgtagtcccagctactcaggagactggggtgggagccttgcttgagtccaggaggttgaggctgtagtgggctgtgatcacaccactgcactccagcctgggcaacagtgagaccctgtcttaaaaagaaaaaaaaaatagctgggcatggtgtgtacccctgaagtcccagctcctcaggaggctgaggcaggaggatcatttgagcctcggagttcaaggaggctgcagtgagctaggaggacaccactgcactccagcctgcatgacagcaagaccctgtctctaaagaaaaacaaggtggagtggagagaacttggttaatttgtacacgctcactttgcttgtttcttggattttgctaaacaggctcctcaaggactttgtccatcctatttctcatatccccagttgcggggcacataagaagggctaagtaaatcttggtatgcccagtgatcagcctggccgtggcaaggaaaaggaaaaaaggggggtgggggtgggctgagagtcctgaggaggaaggagagacaggctgtggtcagggcttggggaagacccttacatgacagcatatatgggctccaaaccatcacagggaagttagggagggagaatgctttgaaagagagaacgtgcatttgtgtggttcattaccaagtttgtttgtttgtttgtttgagacggagtctcgctctgtcgcccaggctggagtgcagtggcgcgatctccactcactacaagctctgtctcccgggttcacgccattctcttgcttcagcctcctgaatagctgggactacaggcgcccgtcaccacgcctggctaattttttgtatttttagtagagacggggtttcaccatgttagccaggatggtctccatgtcctgacctcatgatctgcctgccttggcctcccaaagtgttgggattacaggtgtgagccaccgtgcctggccctatgtttgtttgtttttttcttttttttttttgagatggagtcttgctctgttgcccaggctggaatgcaacaatgcaatcttggctcactgaaacctccgcttcccaggttcaagcgattctcctgcctcagcctcctgagtagctggggttacaggcacatgccaccacgcctggcaaatttgtgtgtgtgtgtgtgtgtgtgtgtgtgtttttagtagagacggggtttcaccatgttggccaggctggtcttgaactcctgaccttgtgatccgcccgcctcagcctcccacagtgctgggattacaggcgtgagccaccgtgcccagccccattaccaagttgtaagcattgctaggcacctgctgtccaaggcagattcagggacgcagtgtctgtggtctctgggatgggaataccacattccagtgccctctgaacactccttagaagagtgaaagattggaaatgacccaaggagccaacaggcagaccagggttagtcaaagttaccgcttcgtgaccacccccttgacgccctttaatttcattactgctctttgaagtaagtactgttatcaccccgtcttaacagctgaagaaactgaggcttagagaaatgaagtcacttgcccaggggcatacagctctcaattaacaggacggacccttcccccaactggtctctgattcaaaagtctgagctcaccactgtaacgccattctcctcagttgctagaatacttactcttttactgttgaagggacaccagtacattgggaacatttatttaaaatagcagttgaataggccaggcacggtggctcacgcctataatcccagcactttgggaggccgaggcgggcggatcacaaggtcaggagttcaagaccagcctggccagcatggtgaaacccagtctctactaaaaatacaaaaattagctgggcatggtggctcaacgcctataatcccagctacttgggaggctgaggcaggagaatcgcttgaacccgggaggcagaggttgcagtgagctgagattgcgccactgcactccagcctgggcgatagcgagactccgtcttaaaaaaaaaaaaaaaaaaaagcagttgaataaagaaggagacaaaaatagtgtttccaactgcgagtatatggagctgtaaacattaagattagacggacatttttgagggacgagcttcagcttgggtttttagtaagtgtacctggttattgagtacctgtgtgccaggatctgtgctaatgctgaggatacacaggacactccaacagctaagtccttgccttcagggcttacacactaagtgacgtgctgagtgggaaacagaaaattgcaatgtagtgtaatcgtataatactggtataaaatgtttcagtggccgggcgcggtggctcacgcctgtaatccagcactttgggaggccaaggcgagcagatcacgaggtcaggagatcaagaccatcctggctaatgcggtgaaaccccgtctctactaaaaatacaaaaaagttagccaggcatggtggcaggcgcctgtaatcccagctattctggaggctgaggcaggagaattgcatgaacctgggaggcggagcttgcagtgagccgagattgcgccagtgcactccagcctgggcaacagagcgagactccgtctcaaaaaaaaaaaaaaacttcggaagcaaaaagctaatgtctgggatggtttcggcaaaggcctctccctggtgaagaaaggtgttccaggcagcaaatactgcaaaagcaaaggtccagaggcttgagagagtcaccaaggtggagtgggtctggggaagtggtgtgagatgaaggatggggtggtcagactcctgagccacttgaaagccctacttggggactttaactttattctggaggcagtgaagatgccttaaaggttctaaaatagccgggtgccctggcacatgcctgtggtcccagctggtcaggaggcggaggtggggggttgcttgaagcccaggcatttgaagctgcagtgagttaggattgtgccaccgcactcagcctgggcaacacagcaagaccctgtcgatggattgatcaatcaataggtaggtagataggattcaacacagtgagacctgtcgatcgatcaatagatgagatagagtgtgtgagaccctgtctatagattgattgattgattgatccaattaggctttattactctgggttgattcaagaaaggagattgtccatgaagggggtggaacccagaaaccgcagctgtcctgctcccccgccacacacacaccccacctccaggagtcagagctgctggtctccaggagggcagggcctcaaggacaaggtggccttagaaactgccacagtagttgcttcggaaggctgggttatgggtcagagactcgtctttggtcaacttcagttacctagaggaggaatgcattttgtctccggagcgtattaccttttccaaacccctcagggaaactggcaagtgaagaacaggtgggaggtctctcagtcgactcctttttttttggagatagagtcttgctctgtcgcccaggctagagtgccgtggtatgatctcagctcactgcaacctccgcctgccaggttcaagcaattatcttgcctcagcctcccgagtagctgggattacaggcacctgccaccatgcctggctaatgtttgtacttttagtagagagtcaggatggtcttgatctcctgacctcatgatccacccaccctggcctcccaaagtgcttggattacaggcgtgagcactgcgcgcggcctctcagtcgactcttgagaggaaatcataaaggccagtgtgcatggcgagctcgttttgcaccaagcactgtgctaaacattttatgtactttatctcattgactcatcctagcaacccttcatggtaactactgttattccctccactggcaggcgaggaagttgaggcctgagagaggttagtttagtttggtggttaagagcacatgctctgtggtcatgctggctggccctgaatcctggctccaccacttagtaccttgtgactttgggaaaggtgcttcccctctaagctaagtctcagtttctccacctgtaaagagagcatgatacacccaggcacagtggtccatgccttctaatcccaacactttgggaagctgagatgggaagatcctttgaggccagcagttcaaaactaggctgggaaacatactgtctttacaaaaaaatgtttaaaaattagccaggcatagtgccacgcacttaccgtcccagccactcaggaggctgaggtgggatcgcctgagcccagtagtttgaggctacagtaagctgtgaggtcaccactgcactccagcctgcatgacagagcaagaccctgtctctttaaaaaaataaaattaaatttaaaaaaaggtgtggtaacagtactgatcacaggcatcctctggtaagcatttcctaaatgcttcccttccctttcctgaggcatacttctagtatgcagggcagccaaatacaagctcaggtgtgtccagcctcagaatctcaaacctcagctgctttgatccactgctgcttttgctcaagaaagaagcaaagctttgaaatggaatgtttctgagtcacaatttgatccataaaaacatgagctagacatacagagggtcctggctaagtctgacaagggctggcatactttggattctgttaggcaccttcctgcctgctgccttgctccctccggctctggccccgggggtctgtggctgccagtagttgctggagttaggggctccagcaagctcatgtgggctcatttctgctcttagccaaccctttcttctttccccattcttcctctttatgccccctgcccctgcagtgagaaaaaacgcaagcctgcatggaccgatcgcatcctgtggaggctgaagcggcaggcctgtgctggccccgacactcccataccgccggcgtcacacttctccttgtctctgaggggctacagcagccacatgacgtacggcatcagcgaccacaagcctgtctccggcacgttcgacttggaggtgaacttctgggctgcctgatacttgccagaggaatagctatgctggccacatccccaagccctccatccctggattcgaatgtcagccagtcccccaggggagacctgtggaggccatgattgcctttcctgccaggtcggatatcccagctcctcttaggagccgttgatggctctgtctgtcaaaaccgtgttcaaaccctttgtgaaaaggtttccatttcctttgggtattctcccttggggctaatgagttccattaggcttattacccaatgtgagaagtaggacttcttttatttgtcctaaatctatctggatcaagttgcaacgggtgctccctccatccctgcgtccttgtatcttgctatctgaatgaccaaggtggtgttggcctccttcaggctgctgcccctcagccttcacgttttcatacaggtttactggcgtgtgtgtgtgtgtgttagggtctcgttctgccgcccaggctggagtgcagtggcggtatcatagctcactgaagcctccacctcctgggctcaagtgattgatccttccacctcagcctccctagtagcgggactacaggtgcacgccaccacgcctggctgttatgtattttttgtagacacagggtttcactatgttgcccaggctagtctcgaactcctgggctcaagtgatcctcccaaactgttgggattatgggtgtgagccaccgtgcctggcccccgctggtatctgcgttgtgttcttgcacgttcacagctgttctcaccagagcatccccccatgtggggctttgggtcagataaggcgggaggcctgagagcagctgcctggccgcctccttaagcctctcagccgtgcctctgctctccgccattcctaccccccagcgctgggccccatgggattccgacagggccagccacccgccgactggtgttcggccctctttcctgatggccagccaaggtccgttggagcagcccagtggagttccatgcccaccccctctgggtgccccaccttccccactatgttggaagggcacagtgaggaacacttggcctcagaggagggaatgatgctgcgagattcagcccccttcccacccccgtgtctagctgaagccattggtgtctgctccgctgatcgtcctgatgcccgaggacctgtggaccgtggaaaatgacatgatggtcagctactcttcaacctcggacttccccagcagcccgtgggactggattggactgtacaaggtgatgtggtggcaaggcaggaagtccatcagcgacagcccctggttcatccttcccgagggctcctgggagctgggcagatgctgacgaactcaccctcatccaccccagcggttcttctgtagctaaaggctggcagtgaagggcggcggggaggcacacagtacggtagccaggcccagcagggagaccatctcttccttaggacttgccttaggtcccatgtcctccctgaccactgatggcctgactccccctcacaggtggggctgcgggacgttaatgactacgtgtcctatgcctgggtcggggacagcaaggtctcctgcagcgacaacctgaaccaggtacgtcaccagcaccaggtacatcaccagcagncaggcctgcctcagcactcctgtcttgtggaaggaacagagtgctgaataacttgtcactcagagctgggtggagcccagagccctggagctgaccccagtcctgtccatccccctccaggtttacatcgacatcagcaatatccctaccactgaagatgagtttctcctctgttactacagcaacagtctgcgttctgtggtggggataagcagacccttccaggtaagcagtgctggtgagggaaggggaagggtgagggcttgagctcatcactggctccctgaggcccaggcctgggagccagccggtacatgaggggccgctgcagtgcaggaacgggggtgatggaaagcacggaggaagacccgctctccatttccaccacctgctttatccctgcagatcccgcctggctccttgagggaggacccactgggtgaagcacagccacagatctgagccaggatgggagtgaatcccaggcggaggccagagctggcagccagctctgcctttccactgccgggagtgnctggggncccagcctggccccctgaagagacagccaagtgtcgtccacatactcctcccagagtgagctctaaccaggctcatttgctctctccactactcatctctggaattagccgcttaaatacaggtttttgttgctgagatgtgagtgaaaccagctagtgtgtcaacagtgaagacctggggacagttctgcgtctcatttctggattcctaccccctcttctagtcttgcccaagtagtcctgccaggcacatgccccatttggcacaggcctgcattcttgtcgtgccgtcctgggcctcaggctgtctgggaggggagatgctcacatttgtacaggctacatagactggtgcaagcagtgctggattccaggagtcttggcatctcatagcttgtccccgtgaggagtgagcagagggtctgggatttctgctttcagcaaaagcagtctgactcagtgggcagaatggaggggcccctctagccaggctcttacgccatggttatgagcaggttgatgagggtccttcggccagcacaaccttcctccctactcacggcatggagtctgactgcatggaagttccagatcctgacagagagaactgggaaggatccaggttcgcttccgttggtagcttgagtcccatgcctccaccctgccatctgaggaaggggtgacaagtggtcaaggagctgtggccacagacttttccagggtggtccttggcaggtgaggtgcgtctgtgccacccttgtcaggagccattgacgacgggccccccctggaccccccgggacctcagagtgggggcaggcagaagggagaaccagctcaagacattttggaggatctggccctggggttcttcagagaacaccctctaggggctttggggacatggcctgtccccacatccagcacttgcctccgccatggtcactcggcagcccttttcccaggagaagacacctctgggagcctgctcagtgcttgtcctgccatcctgtgtcctgggactgagggttactccagttgctctgtgttgcatactctcccccgcaagcctgtgtatgaagaattgtcccctggcttccagcaggccatggctggctgttttgtgactgttacattgtgcaggggtaattattagcgtggcttttacacttg

SEQ ID NO: 1021 - DNA, 414 bp, Homo sapiens
gcgggagcagcttgttcattcctcctagctggagtgtctctgtgagggaggcgggaggtaccggcagggcagcccagggctttgggatttagccagggaagaaatatctccacagccagaccaagacaagaggtagaactcaagcttggttctggaagtgttacagcaaagccaaaatatccttgtcaaggaaagggggaaagagtgagccgattcagcagtgtggagcaagacagggtagggtcgtgagcagggccgtccacagaagaggaggcagtggacgctggggaagggacccgccctgggcaacagagcaggcaggaaaggaggtaagaggccaggctgcagcaggatggccggcccagatcaacagctgcagggagactgccagtctctgcagccatccattggaaa

SEQ ID NO: 1022 - DNA, 3608 bp, Homo sapiens
  SITE (1949): n equals a,t,g, or c
ttttgcaagacagatggtcaacagggaagacccagcagctccaccctcccaagtgacaggccattttcggacgcagccgttctgtgcccattcttcaggcaactttcgattccttactgtagctaattctagatgcccttcagtattgtgaacaaatagaccgtctggtgtcacagagcccgcgtgtgcaggagcctgctcctccgagatacgtggcgtgtaggttgctgtagttacagcgcctccgtctctctccattgtgttccgacccatttctgtgtgttcccccaacctttatttccaagtgacattttcagtctttcaaatagctgccttttgtgatgtggtgatttaaatgatttaagttcatttgttctcaaccttggggtaaactgaggtattttgcttcctgggaagatcttcgcaattttgagtgctcctgtggggagcggggatgagctaaagatacaatgtttccctgccccgcaccgcttccacaaaatagcaatgtggttttgcagctctgacttctgctcccagtaacccatcgttagggcactctagcactatggaggtacccaaggctcagccagtctctatttaagaaaatttaacaaatacgagtaaccctgtcccaatcactgaatctctagttactactcttagaaacacctgtggcttcttggccctcctgttgcccgctctgaatctctctgcagtctacaaaatcgccccagtcaactctccacttggagggaattgtccagtgtggcccctagaattgagtcaccccctagataccaactgtctgaccccgaggagctctgtaagtccctgctcctcctcttccctttggggctggtgctgccactcagcaataatcctcttttctctgtgctttcttaggtccctgtcctctgtctttgaggctggttaggaagcaagagtcctgatctttcatgctgcacaatatgagcatgcaaaaagctttttccagcagaacatgttccctcgtctccagttgccggaaaggaatttggggatcaagaacttagctcgtcctacccccatgttgagttctgccctggaaaacccaaagcaagtagtgatcatagtacagaacccgaccaaagtaggctggtgaggaagtccaggctccaggggaacagacgctgcccagtgttcatagcttcctgcaacttgacagagcctgagtttgcctcttagtgggagaatgagagagagctgtagtgtcacctgacattccccaaaccttgtgaagcacgttggcctaagtgtgccgtgatcccagcccacactagcctgggtgcatctgctaatgggagaccaaatctttgtccgggaagcaagaagtgggtgggagaatgtatcctgtttttgtcagtttgtttgccttactcatttctaagtgcaataagggagtgtctcacaggattgcacctgtgacatcctgatggatgcttccctgtggccctcctggggcaagggtggacagactcagacccccagcatggttagcgctgaccttcattgaggtccctttggaaccagatgtcttgttacagacaccttcctctgtgtaagtctcctcaccttgaggggtctttagtaatgcatctgggtagcatctcaactgctggtagcatttatctgacttggaaagttggagaagaggcattcctactggagaaaaatgtcagtgttttcctataagctctgtgttagctattcattatatttgtgcttaaagatgttccttcattcatcaactaggggaagtccagatgcgggttatcttgaaagaaacaaactgacattctaggcagacagttgtctatgtggtctgagggtcagcagctgttagtctccttcctttggctcttgagacccacacatatcactttagccctaacaagggctcctcccancctccacctgttgccccagttgaaaagcatccattatgagctgaggtcagcctggatctggaattgcagcccacataaacataaaggaggatgtccctggtctgttccatccccacggatggtgttgctgctgggcaacagtgttggcttcttttaagtaccccctttcctcctcacccacctccaaactgactagcactcagagggacttatgataaaggttcagctccaggggtagtacctgagtgtgtgccatgccccttcagaccagctgcttccatcagaattccagggtcacagccccaacagaagcagcagtgcctctgtaggaggggtgctgggctctggccttctcatgcagagaggtccgggacagggtcagtatcgtgggcatgtgtatagcttcccaagttcttttacagtccctgctgggactccctgacttactttggttggttcctagtgctacttgttttacaaactacactttgtagaattgattagattaccttgtttatttaatgtgagtttgtgcctttttgtctcaatcttccaatacaggtatattgagaaaaaaagcagtctaataaaatcctagacagaactttctggagtccagtttggtgatgtccattttccagctgtatgtatcctcaaacttgcactgataaccgccattttaccagggcaggattaggaagaggtacaaaggtgtgtctgaaaatttttgcacgtggatttctgcatataatagtcccgtgtcagtttacttatgcaaacattgcacatctgaattgtaattcggccgtttcctactgacaggatgtccttttgcttttgtctgcctcctcttcacatcttcctctttatccaccctaccaaacaagcaaaacatttatttaaagtagttttaggccgggcgcggtggctcacacctgaaatcgcagcactctgggaggccgaggcgggtggatcagctgaggtcaggagttcgagaccagcctgaccaacatggcgaaaccccatctcggctaattattattattattttttttttttgaaacgaagtctcgctctgtcgcgcaggctggggtgcagtggcgcaatctcggctcactgcaacctccacctcccgggttcaggcgattctcctgcctcagcctcccgagtaggtgggattaacaggcgcgcgctatcaagcccagctagcttttgtgtttttagcagagacggggtttcaccatgttggccaggctggtcttaaactcctgacctcaagtgagccgcccgcctcggcctcccaaagtgctgggattacaggcattgagccaccgcgccccggcctacgtttcatttattgacggctaattctgtaggagtccaggaatccccaaacgtcccatatgcaataggtaatccaataagtttggagtagaagcctgaaagtgggcgtggagaacggaggcgctcccgcagtagcaggaatggggagattacctgcagccggggggcgggggagaccggatcccaggcaggacagtggctaggctgcgtgtccccacccccgaccctcgtttgacccctgggagccggggcgaagacagcacaaggacggagccctcggatccctcacgagtggggcagaggctgcggcggcgg

SEQ ID NO: 1023 - DNA, 96 bp, Homo sapiens
actgcatggcacccttcattgggcagatgggaaagccaaggctcagagaagtggtacagtctcttcaaagttccaggcacctgtggtttcccacag

SEQ ID NO: 1024 - DNA, 643 bp, Homo sapiens
catgtgccaccacacccgcctaatgttgtatttttggtagagacggggtttctccatgttggtcaggctggtctcaaactcccaacctcagatgatccgcccgccttggcctcccaaagtgctgggattataggcatgagccaccgcgcctggccgatcaccaccacttttgagtttactttttttcttatggccgctggtgaggggggatcttggaaacaagaaaatctgactattgtttagtatttttcctggtaggtgtctcttgccactgagtagaccttttgtaaaggggatggggtctttacaaacaatattgaggttaaactgaatcagttcttatgaattcagaccagtcagtgaataaaaacgttaaaatctgttctagccaaacattattggttcatagtattgatttattagtgttatatggatggtcagtcccctcacataattagcaaatctttcttgcagaacttttggctctttccagactatataattcaggtttttccaaattgtttgcagaattgttgaaaaaattctaccctaatactagacttaaaataatgttttatttccttgctctggtatgttggctgcctcaaagtgaaaatttttaccttcataaaaagctatttta

SEQ ID NO: 1025 - DNA, 363 bp, Homo sapiens
tgaaattccaaacacttctggtcccaaacatttcagaaaagggatactcaacctatgtagcaagagacaacctcttgtttccctccatcctacctagaatgttaagtttcagtaggagcaacttgatttagaacacttgtcttctctcctacctcaatgaccaaaggcagttttccctaaaatgcttttcagggacatggagggtgcctgtgtgtgggagatgtagcttcaggaaaggattgacctgagtttaggtaatgacctactgtgtgactaaaactgctttagagtgattatgggaagtgcttcaaagtaatttcaggatgagtattatagatgaaagaacattagctgtgtgtcatt

SEQ ID NO: 1026 - DNA, 330 bp, Homo sapiens
tcatccccaggaagtctcttcatgcttcttcccagtcaaatctttctatcccattcccctgggtaaccactcttggttctgagttttccccaatagattagttttctgtttttctaactacataaatgaaagtatatgctctcttgtgtaaggcttctttcagcataaggtatttgggatttatctatgttgtatgtatcaaaaatttattgctgaatattatttcattgtatgaatatgccatagtttatccttttgatggacacctgggccgtttccagttttttttacatattataaataaagcttctatggatatttttctgtaaa

SEQ ID NO: 1027 - DNA, 1302 bp, Homo sapiens
gtaattccagctactcaggaggctgagacaggagaattgcttgaacccgggaggcagaggttgagtgagccaagatcaagccattgcactccagcctgggcaacaagagcgaaactccatctcaaaacaaaacaaacaacacgggattcaaactgtgcttttgtgtaactggaaaaagtaaagtttatctgtttcacatgattgaagcccttatggaattttagagaaaacagtggcaaatttacatctcaaagcacagagagtgatggaaagtttaagcttaaagatgattttgtgttagttagaggaagataaagaatgatgctaaggtagcacaaaatcacaggaatttaccatagggttttgtaagaagaccagtttcatttagataggtagcttttaatttgatctctttcccaactggacaactgagctcagggtggagtccataaagaaacagagccaacaaagtatttgcagtttttagggcctaataatgtaaacatgtgaaaagcatgcacagctggaaggcagaccgtctagatctttaaaaaataaagaatttcacttttacacggaatcctgggttccccacaaaagggaaccaccatgggactggacagtgcaatcctttcacaatgaaatttgctacaaagacatttctctaagtgtttaaatcatgcctttcttatccaaatgcacaaagaaaggagtagcctcctgtagtaataaccatttactgtaaacaactgctgtcagctacctccaaaactgcagctctcaccagtgacttgtcagccatcacagatacaaaggtcaagtgttctctcatagtacaaagtaatctctggtacccacaaaagccaaagcgatcgggtaatgtaatacaaaagagagcagagttttagacctgagatgaatctgtccatgactttagactcctcaggaagacagaaaaggcagaagagaggtgagtggtgccttttttgtgtgttccttaaggggtttgagtcattagacgtcctctgtagatcctttcatgtgtactttaaaaggcaaagaggaagaaagagtagagataaatagaattaatgggaaaacaattcataaaaaaaggaagcaaacagagggaccaaacacgtaattttaaaaatgttatttgggcacctaaaaaaataaaaaaatccccaaaacaggatccaaaaagagaagaagcagaaagtccattaaatacatatattgaaaactagcttttaattaagctgacttctgactgtagagctccttaaaaaaaaaaaaaaa

SEQ ID NO: 1028 - DNA, 1302 bp, Homo sapiens
gtaattccagctactcaggaggctgagacaggagaattgcctgaacccgggaggcagaggttgagtgagccaagatcaagccattgcactccagcctgggcaacaagagcgaaactccatctcaaaacaaaacaaacaacacgggattcaaactgtgcttttgtgtaactggaaaaagtaaagtttatctgtttcacatgattgaagcccttatggaattttagagaaaacagtggcaaatttacatctcaaagcacagagagtgatggaaagtttaagcttaaagatgattttgtgttagttagaggaagataaagaatgatgctaaggtagcacaaaatcacaggaatttaccatagggttttgtaagaagaccagtttcatttagataggtagcttttaatttgatctctttcccaactggacaactgagctcagggtggagtccataaagaaacagagccaacaaagtatttgcagtttttagggcctaataatgtaaacatgtgaaaaacatgcacagctggaaggcagaccgtctagatctttaaaaaataaagaatttcacttttacacggaatcctgggttccccacaaaagggaaccaccatgggactggacagagcaatcctttcacaatgaaatttgctacaaagacatttctctaagtgtttaaatcatgcctttcttatccaaatgcacaaagaaaggagtagcctcctgtagtaataaccatttactgtaaacaactgctgtcagctacctccaaaactgcagctctcaccagtgacttgtcagccatcacagatacaaaggtcaagtgttctctcatagtacaaagtaatctctggtacccacaaaagccaaagcgatcgggtaatgtaatacaaaagagagcagagttttagacctgagatgaatctgtccatgactttagactcctcaggaagacagaaaaggcagaagagaggtgagtggtgccttttttgtgtgttccttaaggggtttgagtcattagacgtcctctgtagatcctttcatgtgtactttaaaaggcaaagaggaagaaagagtagagataaatagaattaatgggaaaacaattcataaaacaaggaagcaaacagagggaccaaacacgtaattttaaaaatgttatttgggcacctgaaaaaataaaaaaatccccaaaacaggatccaaaaagagaagaagcagaaagtccattaaatacatatattgaaaactagcttttaattaagctgacttctgactgtagagctccttaaaaaaaaaaaaaaa

SEQ ID NO: 1029 - DNA, 1302 bp, Homo sapiens
gtaattccagctactcaggaggctgagacaggagaattgcctgaacccgggaggcagaggttgagtgagccaagatcaagccattgcactccagcctgggcaacaagagcgaaactccatctcaaaacaaaacaaacaacacgggattcaaactgtgcttttgtgtaactggaaaaagtaaagtttatctgtttcacatgattgaagcccttatggaattttagagaaaacagtggcaaatttacatctcaaagcacagagagtgatggaaagtttaagcttaaagatgattttgtgttagttagaggaagataaagaatgatgctaaggtagcacaaaatcacaggaatttaccatagggttttgtaagaagaccagtttcatttagataggtagcttttaatttgatctctttcccaactggacaactgagctcagggtggagtccataaagaaacagagccaacaaagtatttgcagtttttagggcctaataatgtaaacatgtgaaaaacatgcacagctggaaggcagaccgtctagatctttaaaaaataaagaatttcacttttacacggaatcctgggttccccacaaaagggaaccaccatgggactggacagagcaatcctttcacaatgaaatttgctacaaagacatttctctaagtgtttaaatcatgcctttcttatccaaatgcacaaagaaaggagtagcctcctgtagtaataaccatttactgtaaacaactgctgtcagctacctccaaaactgcagctctcaccagtgacttgtcagccatcacagatacaaaggtcaagtgttctctcatagtacaaagtaatctctggtacccacaaaagccaaagcgatcgggtaatgtaatacaaaagagagcagagttttagacctgagatgaatctgtccatgactttagactcctcaggaagacagaaaaggcagaagagaggtgagtggtgccttttttgtgtgttccttaaggggtttgagtcattagacgtcctctgtagatcctttcatgtgtactttaaaaggcaaagaggaagaaagagtagagataaatagaattaatgggaaaacaattcataaaacaaggaagcaaacagagggaccaaacacgtaattttaaaaatgttatttgggcacctaaaaaaataaaaaaatccccaaaacaggatccaaaaagagaagaagcagaaagtccattaaatacatatattgaaaactagcttttaattaagctgacttctgactgtagagctccttaaaaaaaaaaaaaaa

SEQ ID NO: 1030 - DNA, 153 bp, Homo sapiens
ttttttttgagacagagtctcgctctgtctcccaggctggagtgcagtggcgcaatctcggctcactgtaagctccgcctcccgggttcacgcccttctcctgcctcaacctcccaagtagctgggactacaggcacccgccaccacgcccgg

SEQ ID NO: 1031 - DNA, 603 bp, Homo sapiens
aatgtggccaaaggaaccgtgcagaccggcgtggacgcctccaaggctgtgcttatgggtaccaaggacactgtcttcagtggggttaccggtgccatgagcatggccaaaggggccgtccaggggggcctggacaccaccaagacagtgctgaccggaaccaaagacgcagtgtccgctgggctcatggggtcagggaacgtggcgacaggggccacccacactggcctcagcaccttccagaactggttacctagtacccccgccacctcctggggtggactcaccagttccaggaccacagacaatggtggggagcagactgccctgagcccccaagaggccccgttctctggcatctccacgcccccggatgtgctcagtgtaggcccggagcctgcctgggaagccgcagccactaccaagggccttgcgactgacgtggcgacgttcacccaaggggccgccccaggcagggaggacacggggcttttggccaccacacacggccccgaagaagccccacgcttggcaatgctgcagaatgagttggaggggctgggggacatcttccaccccatgaatgcggaggagcaaggtgag

SEQ ID NO: 1032 - DNA, 247 bp, Homo sapiens
gtggccagaggaagcattcagaccggtgtggacaccagtaagactgtcctaacaggtaccaaggacaccgtctgtagtggggtgactggtgccatgaatgtggccaaaggaaccatccagaccggcgtggacaccagtaagactgtcctaacaggtaccaaggacaccgtctgtagtggggtgactggtgccatgaatgtggccaaaggaaccatccagaccggcgtggacaccagtaagactgtcc

SEQ ID NO: 1033 - DNA, 252 bp, Homo sapiens
tttttttttgagacagagtcgtgctctgttgcccaggctggagtgcagtggcgtgatctcggttcactgcaagctccgcctcccgggttcacgccatcctcctgcctcagcctcccaaacagctgggactacaggcgcccaccaccacacccggctaattttttgtatttttagtagagacagggtttcaccgtgttagccaggatggtctcgatctcttgacctcgtgatccgcccgcctcagcttcccaa

SEQ ID NO: 1034 - DNA, 1361 bp, Homo sapiens
attacatagtgcattctgttagttgcttcctttgtgtagaagggaatttgcttgtgtggaaataatccagatttaagtaaggcaaaataatataccaattaagatcacaggttttagcatcagacctgggtttcaggaataagactattcaataactggatgaccttggacagcctactcactctattaataatctattaaacagtgccttgccaggtgtggctcacacctataatcccagcactttgggaggccgaggcaggtgtatcacttgaagtctggagtttgagatcagcctggccaacatggcaaaaccccatctctaccaaaaatgcagaaattggccaggtttggtcatgcacacctgtagtcccagctactcaagaggctgaggcaccagaatcacttgagcctgggagacagaggttgcagtgagctgagattgcagcactgcactccagactgggcaacagagcgagaccctgtctcaaaaaagaaaaaaaaaattaaaacgagccttaaaactgttaaggattgtgttacagaattaattcaaatatatataaagtgctttacctcggtttatagcacatggagtgcagtcagtttatggtagttaataacttctaaagcaatccagttaggggacgtattgaattcaggcacatattgacattgattatttagtgagtgaaggaatgaatctatgacagtagttctcttaagtttaatgtgggggacttaattaaaagttagggtccggctgctgtggctcatgcctgtaatcctaacaatttgggaggcttgggtgggcagatcacttgagcccaggagtttgagaccattttgggcaatacggcaaaaccctgtctcaaaaaataaaaatattagctgtgtggggtagcatgttcctgtagtcgcaggtacctgggaggctaaggttggaagatcacttgagcccagaaggtcaaggctgtggtgagccatgatcgcacgactgcactctagcctgagcaacagagcgagaccctgtcttaaaaaaacaaaaaaagaaaaagtattctgattcagcaattctgatttctgaagaactccagaaaaatctgtatttttaataattgtacagggagttttgatgcgatgatttggggactgggctttaagcagcactctgtaaagtatcaaacaacttttctctttccttgcacactgttgaaatagctaactaaatatcttaggtgctgagcaaaaactttttttaaaaggttaatagctaacaattttaggaccactgtctacttctgaattttgaaaaaagaagggttattagaaaaagacattttgcatgaggaggatgtttc

SEQ ID NO: 1035 - DNA, 1808 bp, Homo sapiens
attacatagtgcattctgttagttgcttcctttgtgtagaagggaatttgcttgtgtggaaataatccagatttaagtaaggcaaaataatataccaattaagatcacaggttttagcatcagacctgggtttcaggaataagactattcaataactggatgaccttggacagcctactcactctattaataatctattaaacagtgccttgccaggtgtggctcacacctataatcccagcactttgggaggccgaggcaggtgtatcacttgaagtctggagtttgagatcagcctggccaacatggcaaaaccccatctctaccaaaaatgcagaaattggccaggtttggtcatgcacacctgtagtcccagctactcaagaggctgaggcaccagaatcacttgagcctgggagacagaggttgcagtgagctgagattgcagcactgcactccagactgggcaacagagcgagaccctgtctcaaaaaagaaaaaaaaaattaaaacgagccttaaaactgttaaggattgtgttacagaattaattcaaatatatataaagtgctttacctcggtttatagcacatggagtgcagtcagtttatggtagttaataacttctaaagcaatccagttaggggacgtattgaattcaggcacatattgacattgattatttagtgagtgaaggaatgaatctatgacagtagttctcttaagtttaatgtgggggacttaattaaaagttagggtccggctgctgtggctcatgcctgtaatcctaacaatttgggaggcttgggtgggcagatcacttgagcccaggagtttgagaccagcctgggcaatacggcaaaaccctgtctcaaaaaataaaaatattagctgggtggggtagcatgttcctgtagtcgcagctacctgggaggctaaggttggaagatcacttgagcccagaaggtcaaggctgtggtgagccatgatcgcacgactgcactctagcctgagcaacagagcgagaccctgtcttaaaaaaacaaaaaaagaaaaagtattctgattcagcaattctgatttctgaagaactccagaaaaatctgtatttttaataattgtacagggagttttgatgcgatgatttggggactgggctttaagcagcactctgtaaagtatcaaacaacttttctctttccttgcacactgttgaaatagctaactaaatatctcaggtgctgagcaaatactttttttaaaaggttaatagctaacatttttaggaccactgtctactactgaattttgaaataggaagggttattagaaaaagacattttgcatgagtaggatgtatcattactaacttaatagtagtgtctgctactggattttcccagagccagtggcatcatccaagttcacccaagaattcccattcttaggcctaggtacatttcagaagctagacaccacacattttattcacatgagcttgaattaattagctaaattgaacacgttgcaacatttttctaccagcagatgccagatagcaaagcagaatagaatctgctgtagtctccgacatatgacatatgatgtcatatgttacttggcatctccagataaacattatcaatccaaattaagcattctgctagcatgtgggcagttgagtaagagtgagtattactactttatgtttgctgaaaaatgcattctttctgggctccccttttcacctttttctcatatttacattcagaaatctagtatgtttttgaaaattcatctgtcagtta

SEQ ID NO: 1036 - DNA, 1808 bp, Homo sapiens; identical to SEQ ID NO: 1035

SEQ ID NO: 1037 - DNA, 338 bp, Homo sapiens
cagtattcacacttttctagtcatgactaagccttctcaaacgcagctatacgcactttgccgtgagttgctggttaaatccatctcacttcttagcatgcttacccctctccagtgtcctacaaagaagagggtagcatttaatcctgtgtgtatagagtatgtgttagtgccttgggttggcaacattgactacctttaataaagtgttgctgctactttgcctattcttggagctgatgcaatgactttctgcagtaaagtgtactgatgtcagcatagtttatgagtgtcaactcctggcaccctgcagacattgttgaaagatgtgtgggccc

SEQ ID NO: 1038 - DNA, 293 bp, Homo sapiens
ttcaaggtagattaaaatttagacaacaagcttctgttgccttgattacaattttaaaggttttaacctttgctgcccttttaaaagtttgttcacattttctcagctttgagttctattatgaaataggtttgctttattatcatactttttaaaacatttaagaacacaatttggcagcacgtgctgcttcaaaagtaagtaagtgaaacaggtttttaaagaaaagcacctttaaatagatcatgctgtcttataggtaccatgatatttatgaagattcaaagattttt

SEQ ID NO: 1039 - DNA, 293 bp, Homo sapiens; identical to SEQ ID NO: 1038

SEQ ID NO: 1040 - DNA, 338 bp, Homo sapiens; identical to SEQ ID NO: 1037

SEQ ID NO: 1041 - DNA, 8923 bp, Homo sapiens
accggcccagcgactctcccgggctgccagccgggacgcgcggccgccgccgctgcagacgacgagtccgccctcgtcccgcgcccccggggctcgcggagccaggtaacagcccgggcgcgcgggtcctcggggcggaggccgtggaggccggcgggtcccggcgcccgcggggactctgcaccctactaggctcccggggccggaacggggacgggacccgcccgggagaggcgcccccgggtgcccacaggaaggccgggcgcggccgcggagccgcgcgaggaaactccgagctttcgggcttcgtgtcccgttccaggctggtggagggggcagaggatcggacacggctgagcggccaaaatgcgcgaggagggggcgagccgaggggcagagcgggggctgtctccgcgccttcctgcgcgggggaaggaagggccggggcgggcagcgggcgacgcggcggaatgtctcccctccgccgaggcccacgcggagagcgggaagtggggggtggggggcccggggagatggacaggcaccctgcccccctccccgaccgccgcattccaggctggagccgcggatgaggtcatcccgtccggttcccctccggccaagacagccggtcgtccccttcccccgcggagcgaccctccgcgtcctgagccccgtccccccagggaatgttggatggccgaagtctttcccggacttccaatcccggccgccctccagattgttctgcctttgccccagcagtgccagacccgcaacattcgaagcccttttcctagaccgggaaactgaggcttagagagtaggggggactggccgggaggccgcagcggcactaaacgtggcgcggggacccgagacgcggcccgcagccgctccgtctcgctcggtcccgggctggttcggctctaactcggggcggtgggcacgaagcgcgtctcctttccactttccccgtcgctccctaatggcccacggtgccccccttggaatacggaggaccgggtcccctagcgcgactgcgaacaactagctaccccgttctggcctcagtttccccgtctctccaccttgaagcgtctggactttgaggagcaggagaagtcagccgaccggtttaaccccttattccagggaccagagcaggtttgggggagctgccgtaaccatgacagggacccgctgtccagcggtgggggggggcgtcacccagctggatgcccgcaggaagtgggctgtgtgcacccgagcagtggcctccaggatgagacgtgggcccctggccagcactgcggcctgcgggtgacccccaggtgaatgccagggtgcagccgcccccgctctccttcagacccgcccttggcctccccgcgaccacatgtgcctccacagcgacccctgttggcccgatcccggctccaaaacttgttcttgcgtcattcccaccattgagtgagctcaggccatgtgcccaggccctgactatcctctatagggtaaatataaggactccaaggacactgaggctgtgtggtgacctccttgcccaggtcacaggcagtgaatctgcagagctgggtctcctgtcttcccaggcctgcacctgcaccccacaccgggctcagcactgggcatccaagccctccaaatcgtcttccccattccccatcgtcttcacccccaccctggggcatttaccagcaatgttggtctgtgactgagggtaaatgtctcctttctgagcttcgttttttccatctgtgaaaggggtgttctgaacactaacgggcggtgttcctgagcaggtgaggggaggtgagcctggcaccaggacacttggagccctgcttactccagtgccaggtgaggcacacctgatggccagcagtgccctgtggttggcagcaagtgccacgtggctgccaccggggtccctggaatgagagatgttagtgtaaaggtgtcagatttgaacccatggctgccctgctccagtatctgagggtttcattacattttctacccttgcaactcccctgggaggggaactgcctggtgtgctgttccgttttccacatgggaagaccgggtcccaataccctgccctcagctccacagcgctgcagagtctctcgaccgcagtaggcagggtagtgtgaggggtgggtactattgggggggtgcccagaaacatttgaaagatgggatcatcgcaagattggggaggaagctggtcccccaagtcaaaagtgaccatgggggttcaggggggaggagccccttttgctgggagatgaggtgctgcctcaagaagtcagggaggccaggtgtggtggttcacacttgtaatcccagcactttgggaggctgaggcagcaggatggcttgagttcaggaatttgagaccaacctgggcaatggagtgagaccctgtccttacaaaaagtggaaaaacttagctgagcatggtggtatgtgcctgtagtcccagctactcaggaggctgaggtgggaggatcgcttgagcctgggagttcgaggctgcagttagctgtgatggagccactgcactcagcctgggtgacagagtgagaccctgcctcaaaaaagaaaaaaaaaaaagtcagggagctggggtgggagcaagtgggtaaggccacatggcagacccttctacaggacattgtacagaggaacacccttcccgctcccattccttcccccagagatgcatccttaatccctgctgagcagggaaacttggccctgccatgaacctgtcacttaaccttggacaggtctcccttccctccgaacctcagtgctgcctgtcaaataggccacgctgcggctttgcagggttgttggagaatcagatgacatcatgtaatggttggccaactgtggatcgcttcagaacttcagcaaacattccacgaggacttctcggtgccgggggtgccagggagggaagaagatgattcagaagttcccccccacgagggggaggagttagggttgggggaggatcagatggtgggaagggaagagaatgtagtcagaaaacaaagcaagctttgtcctattggcttctttgttcttatcttgttatttaacctattttgaatttcaaataacattagaagggcagtattgagatttctatgcttggaggtggcagcaatggttttaaaaaaggaagaaggctgagccgcagacataggtgttcttaaggatcattattgacttttatcagctgaggtcccaggtctgtgtaggtaagtgacttgcccaaggtcacattgtgaggacacagagcccagcctgccctcccactctcagaaggggccagggtgatgttttggcatgcaggttatcatggagatctgtgattcagctggcattgatttggcacttgttaagtgcagagcccaagctagatgcccaagggagaaaggcaggaaaatccaggcggcctccccaccctccaagtgcattgccgatctcgggaggcgagactgggctccacaagccagtcaagggcttatgtgagtcagaggctctgagttcaagtctcaactagctctgtggatctgacctctagccagctttgccctcagtgggccacaggaaaagcataggatcacaggtgcgctctagcctggactttgtatgacactagaaggaaaggggtcagaacaagagatgcttagagaagctggagcaggggaggatgtgtgtgtgtgtatggtgggggtggggaatcaggaaggagagatgcacaagaaatagcttttggcaccagctgagctttttccaaagcttgctccctgacagcaaggctcctacgtcagtttgacaaactgtgataaagtcttttcctgcgggccttctcagagacttgaatatgctcacgcatggaggaggcagctggaaaaagccacttttgaccacaggatccttattccaggaagctccttgaaggtggatggttcagaggaacctctgctctggctgtttacccagcttcacaaagctttggtgaggtgtctgctccctcctggcttcgctgcgtggcagagattttaatgcacagagaagggaggtgacttactcagttactcagcaggaggcagtgtagcctggggctccagggctctgggatgtggggcctgtttcaccatttcttactacgtagcctcaggcaagttacgtcactttgtgcctcagtttcccctctctaatctcatgctgccctcaggagtaatgtttttgttgttgttgttgtttgtgagacggagtctcgctctgtcgcacaggctggagtgcagtggcgcaatctcggctcactgcaacctctgcctcccgggttcaagcaattctcctgcctcaggctcctgagtagctgggattacaggcgcccgccactacgcccagctaattttttgtatttctggtagagacggggtttcaccatgttggccaggctggtctctaattcctgacctcgtgatccacccgccttggcctcccaaagtgctgggaatacaggcgtgagccaccgcgcccagcccctcaggagtattgtatgggtttaaacgatgaggcgggtgaggtcttggcacttagtaagtgcttcataagtgggccctgcagaataagtgctttcttttttttttccttttttttttttttttttttgagacaaggtcttgctctgtctcccagactggagtgcagtgacacaatcatggctcattgcagccttgacctcctaggctcaaaggatcctcccttcttagcctcctgagtagctaggaccacaggcatacaccaccacacccaactaatttttttaaaatttttttgtaaaaaccaggtctcattatgttgctcagacttagaatgagtgaatgagtgcttctattttttcctgatacatggcttaagtgtatagctcaatgaattatttgtcccctattcagtcagtacctgctcagaggctgccatcattctgattgctaatagcatcaattggttttgcctgttactgaacttccttgtttttttttttttttttttttttttttttgagacggaatgttgctcttgttgccgaggctggagtgccgtgatgtgatcttggctcactgcaacctctgcctccaaggttcaagtgattctcctgccacagcttcctgggtagctgggattacaggtgcgcaccaccacgtccggctaagttttgtatttttagtagagacggggtttctctatgttggccaggctggtctcgaactcctgacctcaggtgagccacccacctcaacctcccgaagtgctgggattaccagcatgagccaccgcacccggctgtgttcttgaactttctatacacagactcacttgggtccccgtgtgcctagcttctgccccgcgtcagttggaggcctccatccgtgtagttgggtgtgatcatctatcctcttcagctgctaatgtttggaccccggatttcctcctctgtcgcgggcctgccgtcaccgcccattctgtcttccttccaggtctccacctctgggcaggagagttgccgaccacctcgggggtgctttctctgcgcttgaacatctatagctgcttctgaggggctgggagccgggcccctgggagagacgagccatgaaccccccacagcctctgcatttggggacctcaccttaggagagtgccatttacagcttccgccagggcaaaggagctgagcagccatcccaagcccagcccacctccctcccccggcccctggtaggcatggactagcagctgtgagcagccagagctgatgcccggcccccaggggggcagaggcgccgccaccatgagcctgggcaagctctcgcctgtgggctgggtgtccagttcacagggaaagaggcggctgactgcagacatgatcagccacccactcggggacttccgccacaccatgcatgtgggccgtggcggggatgtcttcggggacacgtccttcctcagcaaccacggtggcagctccgggagcacccatcgctcaccccgcagcttcctggccaagaagctgcagctggtgcggagggtgggggcgcccccccggaggatggcatctccccctgcaccctccccggctccaccggccatctcccccatcatcaagaacgccatctccctgccccagctcaaccaggccgcctacgacagcctcgtggttggcaagctcagcttcgacagcagccccaccagctccacggacggccactccagctacggtgagggcctgggccatcttggcccacttttcagaggctgaggctgaggcccagaggggttcagtggctcctccaagctccaagtgagctccaagtgaccacagaggtcaggcccagaccccacatcatggatggggagggggtgcagtggtgggaacaagctgactccccaaaacacctgaggttgagagtgaggaggtggagtttgaattctagctgcccctcacttgctgtgtgacctgggcaagcacatccccctctctgggccttagctgaaccagtcacccacccattcttgcccccttcaaccaaagccttcccctcatgtcggaatgatatcatggagaggtgaagggcctgggctctagattccaatccagttctgcctgaatttcaggaagtcagttgacctctataagttcaagtcctcgcctggataatgagtctctcggggtcattgctaagattcagtgccaggagaggcgcaggggggctgatacttagtaggtgctcaggacactggagctgttgttatctgaacttggtttcctgtaactcgacaaatttgggaaaccactcacaggaaccgcaagccacaggccttcctgcccagccagaagtgccaccttggccgttcggtcagagctcacctgagaaccatgggcccctgctgccacctggtggccactccctgccttgcgggagtggctctaacacccctgccccaggcggctgctcagaaccgcactgaggactggtccacagaaacccgattctgtctcaggtctgtagtcctggaagcaggggctggacatgtctgtccttcatttctatacagtcagaccctgattgctggtcccatcctgtgtccacaaaccagctcacgtgctatgggttcacctgcagccatcggccagcgtcatggcagggagccggtggccatggctgaggtcacagttgggactgagaggagatttgagctccagacttgattccacctcgtcagacttctatggccttgggctagctccttcgccccatcccaaactgagcctcactttccccatctgcataatggaaatgaggataatgatgattttcagctttcggggtagacaggaagatcacacaggtgaccatggagtgtattctattggaaagatgggagaaaccgaggccagagaggggagggactagccagaggccacacagcaagccaggactggtcctgtctcccctcctgaattcctggtgagggaccccagctctgagcccactgcccatttctcttctaggcctggactctgggttctgcaccatctcccgcctgccccgctcggaaaagccgcatgaccgagaccgggatggttccttcccctctgagcccgggcttcgccgctctgactctctcttgtccttccgcctggacctcgaccttgggccctcactcctcagcgagctgctaggggtcatgagcctcccagaagcccctgcagctgagactccagcccccgctgcaaaccccccagcccctactgcaaaccccacgggtcctgctgcaaaccccccagccactactgcaaaccccccagcgcctgctgcaaacccctcagcacctgccgcaacccccacgggtcctgctgcaaatcccccagcccctgccgcaagctccacaccccatggacactgtcccaatggggtaacagctgggttgggcccagtggctgaggtgaagtccagcccagtgggagggggtccccgaggacctgctggccctgccctcggcaggcactggggagcaggctgggatggcggccaccactacccagagatggatgcgcggcaggagcgggtggaggtgctgccccaagcccgggcctcctgggagagcctggacgaagagtggagggcgccccaggcaggcagcaggaccccagtgcccagcacagtgcaagcaaacacctttgaatttgcggatgctgaggaggatgatgaggtcaaggtgtgaggggctggggcacggtcccagggccccacctaggtgcagagccggcccctcacctaacagctggttcctaccagaccggagaggggagaagtcatgttgcccctaaacccctccccacctctgcaggacagacatgggagggaggacagggaaggccaggcttgctctgggacttttatgctcccagaggccctgccaaactgaccacctcccccgactgccactctggacctaatagctgttccttaggccccactccatgccacccccaccagctggaggacccagcctcacagtgtgtcctttgtgccagaccaagcggcccgtggggggtggggggcagggagtgtaccacacagggccattgtctcacctcccaaagggaccgcctgcccccagctcatcccagagcgtccctgctgcaaccctgacagccgtctcccaggccgcttccccaacatccccgccccagcctccctcttaccccagaaaggtcaggtatgacctcccggggaggaatcccacctgcctgtataccccagacttgcctctggggcctgattaaataaggctgttttgataaaag

SEQ ID NO: 1042 - DNA, 945 bp, Homo sapiens
tgtttcctcctcagtattatgaaaatgccaggagcattaaaatgcacggaaagagaaatgccctccttaggtatcggaagaccggttaaatttagccacaaacagctaacgtgaggtggtgcactccctgtcactacaggtatgcaaccagaggatgtgtggcaggaggcaggatcactacgggacctcaggatccctgagagcaggacattctggatcatggggtgccttcattcagaggtcctcagaccaggggtatcccatgtttttgtaaacttgagggacccaagagagaaaggagtcacaagccacagttcttgccacaggaagactcgataaaaacagattattttgtttgcttttagccctggggcaggaactgcaggtagggataggggaacacacccaagctctgttgatcctggtgtgactcggaagaagaaccaggacagagaatctcggctggaagtcttttattcttttaacttgaaagaggacatgttgaacccgccccttacgctcaggtagctcaggtggctgtgacccagcctgttgggaaaagtcagctcgtgcccatctggcagcttcaccttgaatttgtcactctcaaaggtcactgtgaactgtggggagggagggtgtcaaggaggcaggaggccctggaaatgggccagggcagtgcctgatggctcaaacaaggccagcacctgtgtccaggccaggctctcttccatctgggccctccccttgacatcaccccagtgccctttccccctttgacctcaccttgacctctgaccctgggctgaagcacaggtgatcttcccgttgttcttgcccccagttgctgccgtccaatgagttgcagacaatggtggattcgctgaagcgagggttgaaatgcaggttcagcttgtctgtcccctggcccagattaattacaaa

SEQ ID NO: 1043 - DNA, 4571 bp, Homo sapiens
  SITE (2900): n equals a,t,g, or c
gattttggcatattacacgaaactctcccggaagaagttggtcatctaagttttaatagttccagtagttcagaggccaattttaaactggagccaaatagtcctatgcatggtggcactcttctagaagatgttgtgggagggagacagactactccagaatcagactttaatttacaggctcttcgcagtagatacgaggctctgaagaaatctctttccaagaaaagggaagaatcttacctctcgaattcccaaacacccgaaagacacaaaccagaattgagccctactccccaaaatgtacaaacagatgatacgcttaactttttggacacctgtgatttgcatactgagcatataaagccatctttacgcacgtccatcggtgaaagaaaacggtctctttcaccactaattaagttttctccagtggaacaaagattgagaaccacaatagcatgtagtcttggagaactacctaatttaaagggtaaggtttaaatagacctatgcatattcacctgttgaagttttctctcaacttttgataaaaccagtacacaaagaatgctgcatgacctttattgttaatgtgctcccccttccttcatttaggatgaggggaatgatccctcactggacaggtcctttcagaatctctgtttatgtatatatagttacaattgatttgagacaggggtgggaaaaaaaagcccccccaatctgaagcttacaggttttataatacaaatgactgaaaagtaaatgtcatcaaaatcttgcccagtggaaggtggtttttaaacacttgagaaacccaattttaaatatcatcactataatggtgtaatatctgggggtggggtgtagaaataaaagaagccaggtcagtgtattagtttcctagggctgccataacaaagcaccatcaagtgggtggcttagaacagcagaaatttattgtctctggagacagtaagttctagaggctagatgtccaaaatcaaggtgttgacagggccatgttccctctgaagccactagaagaggatccttctttgcctcttctagcctctggtagcaccaggcattccttggcttgtggcagtgtaattctaatctttgcctccattgtcacatggtattcttcccttgtgtgtgtattgtcttataaggacacagtcatattagctaattaatgggtcaccctactccagtatgacctcatcttacttagctaattatatctgtaatgaccacatttccaaataaggtcacattctgaggtactggggttagaacttcaacatatgtttttgggggtattcagttcataacagttagtattaataattattgaagctaggtgatggatatattgagttaatcacagttctcttcacttttgtatgtttgaatgttttcctcataaaaggttaaaaaaattgctcttgtagctcattaagagagataaggatctggtgatacagattcattacatactctgatttgcccataatagttatacactgccatattgaaaagtatttggctgggcacagtggctcacacctgcaatcccagcactttgggagtccgagatgggaggatcacttgaacccaggagttcgagactagcctcagcaacacagggagactatgtctctacaaaaaattaaacaattagctgggcacgttggcgcatgcctgtgatcccaggtacacaggaggctgaggtgggaggattgcttgggcctgggagtttgaggctgaagtgagctgcgatcgtgccactgcactccagcctgggtgacagagcaagaccctgtcgcagaaaaaagaaaaaaaaaaaagtactctgggaggaatgtattgatctctggagaaagagggtactttggtgagaataataataattttatcataatcaagtatttgcaaagctatgaaccttttttgtattgactaaaatttgctattgcttggaatctattgtttatttttctttggaatgtttgcttatacttttttaaaatcaatttgcagaagaagacattttgaataagagccttgatgcaaaagaaccaccgtctgacttgacaagatgaagacgtacccatttaatataactatgatgcacttaaattgaagctatgccacaggatagaaaatgaattacaacttaaatacatgttggaagtgtaacactgtttttcaaggtttaaaaaaattcctaatgccttttagccttctttaatatttttaggtaaggaaagtatgtttggattttttcctctttgtaggtatatgagattgaaatgtgaagtatttggacaacaaacgtcaagcaatgggaagccattttgatttcttgagtaatcttgtaagcattaagtgaatgacaaagtagtagtgtaacttatttcttatgttataacttcagtcaattaatataaggatagtttttgttgtatgttcactaaatggttaatataatagccattgaatatactaatctttcatcttagagaactatacaacttttattgtttcttaatggaacattctggctaaccagaaaaagtgagaaaagtagtaccttgggatgtgtagtcaagatgacaaattttaagactggaaaagctctaaacaggcttaatgattcttcaggtagaatgatcctgagaagtgatgtttgatggaataaagtgcatgtgatgattaagtgaagactggggcagaatgatttaaaaaaaggaaaaagatggaagatgagtagacacttgcaaggaacactgtcaaactataaatccattcagtgggttgtataacatttatatttagtctaatttagactttgataatttaatgctacttttatattttaacaaaatatnaattaaaatttcattagtctgttttgtggtggggtttttttggtagggacttcctgttgggggaaaggaacaaggaccacatcagattccccagtccctacagaatagcctcacagtaacttgtgaaaactgaacttggggttaaataacttgtcacacttgcagtctcctgcctcactccttcaggtgccctgcctagaaaaagacttgtgtctagcatccaagtgaacacatactattgccctctgtgaaccaggaggaatggaacaggcaatggaagggtgatagtacctacaataccctttgtagaccccatctcactaccatcaaaatcttgtccactagcccccaaaaaactggcaaggaaagaaggtggaggggaaatttatggaagtagatggcttaatagttatttcttttatcttgggctgcctttctctaagttggttgtcctgtcccagtgtgaagacccatctttttgtgagaaaagacaaaagaaagcacatgtaactaccttctttgcaatggaaaaggagaaagaaaaaatcttctcctaagttgctgttttcttttattagttaataaaacaaatcagggactatgcaggtctatggggaaacctttagtctgctttaagaaaactcagtatctgaaaatcttaacttagcatgtgatactgtcttatcagcatctgcagaagtgccaaagccactgctagacacttaatgtgtattatttcatttaattatattttaaatgtgcttccttggtaattcttaagctcgagaaagagtttgagaactgctgctaggaaatagagattcacatttaaccctgtggtacttttaagaagcaggtacgttgttgcatatatacttgggtagagattggtaactatctgatagggaagctcaagttggccacccaagtctgagaaacccttaattactgagaatcaaaagagcagaatgtctgtagacattttggatttgtaaaaatcacattgttgagttatacctgtgatgggctgaaagtttttggcattctttcctgttcttcatatgccagtaccataaacaaaaagtatctcagatctgtcactttcttctcctaaaccaatgtgatggcagctttttgccttcagccttttccctatccagtatctcctacatagttaccttttgatcttaaggaactgttttgattgggtcacttccttgcctaaaattccattgattgttcattgttaattctaaaatagagttcaaatttaaaggcatgtaagttcccctgtaacggatttcctctactcccccttccgctgtaatctcccatttttttactgaaatgcttcagtgagcatgggtctttagaggtcttgatatacaattttcctgaagcaggaataccttgctttcctctactagtttaccacaattacagctctcttttaagcctcagaaaaaaatctcacttccgtcttgaagtcttaataaaacgctttttatatccatgtgcctactccttctctgaaatctcctatggtttatctttttattcatttaatatcccacgaattgattttattatatattttttatggttgcatgtggtctttcctagttatagcaatatacacatacatgcataaatacatatacacctatgtaa

SEQ ID NO: 1044 - DNA, 10462 bp, Homo sapiens
aggacacaaagatgggaactcccaaagaaaaaaatgaagcaatttctaagaaaataccagaatttgaagtggaaaattctccattatcagatgttgcaaagaatacagagagtagtgcatttggagggtctttgccagctaaaaaaagtgatccatttcaaaaagagcaagatcatctggtagaagaggtgagaaaagactgtaatgagtatacttaaatatcagttattggatgggcacagtggcccatgtctgtaatcccaacacttggggaggtttcggcaagaggaacatttgagcccagaagttcgagaccagcatgggcaacatggcgaaacccatctctacaaaaaaattaaaaaaacagttgagcatgggggcgtgtctctgaagtcccagctacttactggtgaggctgaggtggaggatcacttaaagcccaggagactgaggctgcagtgagctgtgtttgcatcactgcactccagcctgagtgacagactgagaccctgtttcaaaaaacaaaatcaaaaacaaatattttctcaatggtgttgggatcctaagcgaaatacagttaattattgattacctcgggtaatatgggataaagaaggctacagataataaaaattatggttaaagcaaaattggtcttcctcaaaagtgagaatagatttaatataaacttatttagctaatattacatctgtggtttagaacccacttcccattctttaaacattacctgaaagtatacaaatgatacatttgagaaattttggagattaaccattacatggttagataaatgtacccagtgtttatactatattaaaatacttttgtcagtgttgtttgttgcttagctgagtttcctcttttttttgaatattagaacacactgcaatatcatatcattatcactgagcataggttttgttctttttgctgtctaaaatatttcagaagtgattagatgcattgttgttcatgaacttgattttcctaaccagccccctcccttaacactattctgctttttactggtaagtgaccacacaatactaccattgctcagcattacagaactcatttcactcaagctaaattctgaagttatttgctaatgttatttttagtacatgttttccacaacatgctttagcattgcttgaatttggttaagcagccagaaaatcagtgttactttttattcctgagacactgaaagaaaaatttggtttagcagatattaattcaggtattagagttccctcctttattgcattcctgatcaaactaaatgagcattgtccaaataagagaactggatgtcagacacttttcttttttcttttaagacagggtcttgttctgtcacccaagctggagtgcagttgtgtaattatagctcactgtaacttcgaacttctgagctcaagggatccttccacctcagccttccaaacagctacgactataggcgtgcaccactttgcctggctaagttttttattttttgtagagttgggaactcactcttttgcccaggttggtctcgaacccgtagcctgaagtgatcttctagctttggcctcccaaagtgctgggattacaggcatgagccaccatgcctgactggatgtcagttatttttcttgtttgtaacatgaggtctagtttcatggtccctaagtacttttaaatctctaaagttctattgtttctcttcattgactctacactaaagtaaagatggttagtattttttactttcctaattttgaaaggaaaaacacattttctgattaaaagaatttatattagcaatgggatcagatagaagaggaaagtcttaaaatttcatgaagctctgaaagtaaaattaattttctttaagagtgtttatgacaggggatatttagtgttttaattcccagaagcactctgttttcttgagggagaagccctttttttccatgggccaattttatttgtatttttaaattttatttatgttatttttttgagacggagttttgcacttgttgcccaggctggggtgcaatggcacgatcttggctcaccgcagcctccgcctcccgggttcaagcgattctcctgctgcagcctaccgagtagctggaattacaggcatgcgccaccatgcccagctaattttgtatttttagtagagatggggtttctccatgttgttggtcaggctggtcttgaactcctgacctgaagtgatccgaccgtctcggcctcccaaagtgctgggattacaggcgtgagccaccatgcccggcctcttgggtcaatttaattatggcttcaagaagtttattttttagtgatgtcgggggcagagtttttaatttgcatgttttttctttttcggttttattgatatttaatagagagcactattttgatattggatacttttttagttttagaatgtacgtatgcttttttcagtaatgaagatgtgataataggtttctggtgaagaggtatgttgtcagaatgattctgtttcttaatagagatgtcactgtccaaattgattataattgagaagagtctgcttcctttaaaactagtcattttagtgaatacagagctgtcaagctcacagttgtggcagacagcagcttaggtcactgcacaactggaactgcctctaaatcttcccagcataaagattcttatctattctctcctttataatgggatatccatttaagatgaggaaatacttcagtgtttcatttcactttacaggattgtacctggatggtctatacagagttgttggggaacttctttgttgcttatttttgtgttgtctgcaatgggaggggctgctgactgtgaagtgcttattatccttatcaggggttttgttgcattctaccaatgggcttggtaatctttgctttactttttcttttctgttttaggttgccagagcagttttatctgattcaccacagctctctgaaggaaaagaaataaaattagaggaactaattgactctctgggttctaaccccttcttaacaaggaatcagattccccgtactccagaaaacttgagtaagttaataatgctttctgttacttttttctttcatcgacataaccactgttagaaccatggcctgacagatctttttagctgagttgccaaaggctgtttatttatgctgttgtaatcgacgtactaagtgtgggcattctcacataacagtcttttagcagtattttgtgccttcagtgtactcaatatacagagatataaaattttgataatgtacaattttgtctttgttgttatactttgcttttatctagaaagatcttatttgagcatttaaaaaaaaaaatctcttgcctcctggtctgacctgtgatctacatatttatagagtacataggctgtgttctgccagtcatcaaccagaagcatcagccataaaccatgtgtgcggaggtctttacccctcccaaatgagtcaaactgcccaataccttttttcctataacctgtaatttgtgtaggcaaagttctgatattggtgtccttaggtaggcacatcatcttggttgagtaattaaataatttctgttttgctgctgatttaattcagtttgaactgagccacagcctaggtcagcaaactatagcctatgaaccaaatttggccccaccttgtgtgtttttgtatataaaattgtattgaacataagcatattcatttgttgacattgtttatggctactttcatgctatcatggcagagttaagtagttgacagaatggatggcctgcaaagcctaaaatattgctatctggcccttatagaaaatgtttgccaaactgtggcttagatggacaagaaaaggtctttttaatacatgtaattcatatgtgctgtgtaaaattggatgcatatttcaggaacagctgtctttatatgtgtttatttgtgcgagcagttggagatggggttcttcgatgttgggatttgttatattgtggaggcttatcatccaaccagtatatttatggaacatgtactgagtcaggagctttatcttcagtgttagaaataaaatgattcattgcatgctctatgtttgggaatgttagtaaactgtgtttttctcccctttaattagtaactgaaattaggagctcatggagaaaagctattgaaatggaagaaaacagaactaaagaaccaattcaaatggatgctgaacatagagaagtattgccagaatcattacctgtgttgcacaatcaaagagaatttagcatggctgattttctcttagaaaccactgtatcagattttggccagtctcatttgactgaagagaaagttatttcagattgcgagtgtgtgcctcagaaacatgtgctgaccagtcacatagatgaaccaccaacacaaaatcagtcagatttgttaaataagaaagtaatttgcaagcaagatttggaatgtttagccttcaccaagctttcagaaactagccgaatggagacattctcccctgctgtcggcaataggatagatgtgatgggtggcagtgaagaggagtttatgaaaatattggaccacttagaagtttcttgtaacaaaccttccacaaataaaactatgttgtggaattcttttcagatatcaagtggaattagttctaagagttttaaagataatgattttggcatattacacgaaactctcccggaagaagttggtcatctaagttttaatagttccagtagttcagaggccaattttaaactggagccaaatagtcctatgcatggtggcactcttctagaagatgttgtgggagggagacagactactccagaatcagactttaatttacaggctcttcgcagtagatacgaggctctgaagaaatctctttccaagaaaagggaagaatcttacctctcgaattcccaaacacccgaaagacacaaaccagaattgagccctactccccaaaatgtacaaacagatgatacgcttaactttttggacacctgtgatttgcatactgagcatataaagccatctttacgcacgtccatcggtgaaagaaaacggtctctttcaccactaattaagttttctccagtggaacaaagattgagaaccacaatagcatgtagtcttggagaactacctaatttaaagggtaaggtttaaatagacctatgcatattcacctgttgaagttttctctcaacttttgataaaaccagtacacaaagaatgctgcatgacctttattgttaatgtgctcccccttccttcatttaggatgaggggaatgatccctcactggacaggtcctttcagaatctctgtttatgtatatatagttacaattgatttgagacaggggtgggaaaaaaaagcccccccaatctgaagcttacaggttttataatacaaatgactgaaaagtaaatgtcatcaaaatcttgcccagtggaaggtggtttttaaacacttgagaaacccaattttaaatatcatcactataatggtgtaatatctgggggtggggtgtagaaataaaagaagccaggtcagtgtattagtttcctagggctgccataacaaagcaccatcaagtgggtggcttagaacagcagaaatttattgtctctggagacagtaagttctagaggctagatgtccaaaatcaaggtgttgacagggccatgttccctctgaagccactagaagaggatccttctttgcctcttctagcctctggtagcaccaggcattccttggcttgtggcagtgtaattctaatctttgcctccattgtcacatggtattcttcccttgtgtgtgtattgtcttataaggacacagtcatattagctaattaatgggtcaccctactccagtatgacctcatcttacttagctaattatatctgtaatgaccacatttccaaataaggtcacattctgaggtactggggttagaacttcaacatatgtttttgggggtattcagttcataacagttagtattaataattattgaagctaggtgatggatatattgagttaatcacagttctcttcacttttgtatgtttgaatgttttcctcataaaaggttaaaaaaattgctcttgtagctcattaagagagataaggatctggtgatacagattcattacatactctgatttgcccataatagttatacactgccatattgaaaagtatttggctgggcacagtggctcacacctgcaatcccagcactttgggagtccgagatgggaggatcacttgaacccaggagttcgagactagcctcagcaacacagggagactatgtctctacaaaaaattaaacaattagctgggcacgttggcgcatgcctgtgatcccaggtacacaggaggctgaggtgggaggattgcttgggcctgggagtttgaggctgaagtgagctgcgatcgtgccactgcactccagcctgggtgacagagcaagaccctgtcgcagaaaaaagaaaaaaaaaaaagtactctgggaggaatgtattgatctctggagaaagagggtactttggtgagaataataataattttatcataatcaagtatttgcaaagctatgaaccttttttgtattgactaaaatttgctattgcttggaatctattgtttatttttctttgtaatgtttgcttatacttttttaaaatcaatttgcagaagaagacattttgaataagagccttgatgcaaaagaaccaccgtctgacttgacaagatgaagacgtacccatttaatataactatgatgcacttaaattgaagctatgccacaggatagaaaatgaattacaacttaaatacatgttggaagtgtaacactgtttttcaaggtttaaaaaaattcctaatgccttttagccttctttaatatttttaggtaaggaaagtatgtttggattttttcctctttgtaggtatatgagattgaaatgtgaagtatttggacaacaaacgtcaagcaatgggaagccattttgatttcttgagtaatcttgtaagcattaagtgaatgacaaagtagtagtgtaacttatttcttatgttataacttcagtcaattaatataaggatagtttttgttgtatgttcactaaatggttaatataatagccattgaatatactaatctttcatcttagagaactatacaacttttattgtttcttaatggaacattctggctaaccagaaaaagtgagaaaagtagtaccttgggatgtgtagtcaagatgacaaattttaagactggaaaagctctaaacaggcttaatgattcttcaggtagaatgatcctgagaagtgatgtttgatggaataaagtgcatgtgatgattaagtgaagactggggcagaatgatttaaaaaaaggaaaaagatggaagatgagtagacacttgcaaggaacactgtcaaactataaatccattcagtgggttgtataacatttatatttagtctaatttagactttgataatttaatgctacttttatattttaacaaaaatataaattaaaattttcattagtctgttttgttgttgggtttttttgtgaggtactccctgttgggggaaaggaacaaggaacaaccatcagaatcccccagtccctacagaatagcctcacagtaacttgagaaaactgaacttggggttaaataacttgtcacacttgcagtctcctgcctcactccttcaggtgccctgcctagaaaaagacttgtgtctagcatccaagtgaacacatactattgccctctgtgaaccaggaggaatggaacaggcaatggaagggtgatagtacctacaataccctttgtagaccccatctcactaccatcaaaatcttgtccactagcccccaaaaaactggcaaggaaagaaggtggaggggaaatttatggaagtagatggcttaatagttatttcttttatcttgggctgcctttctctaagttggttgtcctgtcccagtgtgaagacccatctttttgtgagaaaagacaaaagaaagcacatgtaactaccttctttgcaatggaaaaggagaaagaaaaaatcttctcctaagttgctgttttcttttattagttaataaaacaaatcagggactatgcaggtctatggggaaacctttagtctgctttaagaaaactcagtatctgaaaatcttaacttagcatgtgatactgtcttatcagcatctgcagaagtgccaaagccactgctagacacttaatgtgtattatttcatttaattatattttaaatgtgcttccttggtaattcttaagctcgagaaagagtttgagaactgctgctaggaaatagagattcacatttaaccctgtggtacttttaagaagcaggtacgttgttgcatatatacttgggtagagattggtaactatctgatagggaagctcaagttggccacccaagtctgagaaacccttaattactgagaatcaaaagagcagaatgtctgtagacattttggatttgtaaaaatcacattgttgagttatacctgtgatgggctgaaagtttttggcattctttcctgttcttcatatgccagtaccataaacaaaaagtatctcagatctgtcactttcttctcctaaaccaatgtgatggcagctttttgccttcagccttttccctatccagtatctcctacatagttaccttttgatcttaaggaactgttttgattgggtcacttccttgcctaaaattccattgattgttcattgttaattctaaaatagagttcaaatttaaaggcatgtaagttcccctgtaacggatttcctctactcccccttccgctgtaatctcccatttttttactgaaatgcttcagtgagcatgggtctttagaggtcttgatatacaattttcctgaagcaggaataccttgctttcctctactagtttaccacaattacagctctcttttaagcctcagaaaaaaatctcacttccgtcttgaagtcttaatccacgctttttatatccatgtgcctactccttctctgaaatctcctatggtttatctttttattcatttaatatcccacgaattgattttattatatattttttatggttgcatgtggtctttctagttatagcaatatacacatacatgcataaatacatatacacctatgtaaatgtgtgttgggagtatgtattcacacacatacatataccccaaggccatgtgtcatctttatcaatatttaagttttggaattgttttgtttgcctcctatatcatggaataaatggtaaagagggctaatttattactctaagtggatttcttattacattaatatcagacatatagaatgtactttgttttactatttgtaagatacaaaggtatataaactgacatacatcagcttgaaacctgagataatgctaaaatgttctaattattttaaatgtttaaagaggacaaccatgtaatgttgctaaacatgaaaaatgtcatcaagtggaataaagaatagctgaagttaacatttgggggaaattgagctgaaaacaaaaatatgagtattttgataccttttctttaccatgagactcttgactatgaagtcaaatttatctaaaggaaaaacaggaattctggagacctgtgtaaaagcagactattatcttcctactgtgagagtactaaaattaaaatacgtttaatgacgttttcctcaatgtaaaagcattgaagtaaatgtttcttttatgttgcagatacatagttgctctagagatcacctttttctttatgcattgtgaatagcagtctgcatcctaagtttaaaatatttgagaatcctctatgggactctctgtaaatgttttaaatactgttgttttcaataaatattttatactatctggctctggaatttcctatataatctcaaaaagaactatgcccctgcaaatcataagatgatcacatgtaaagttatattaataacctgatcaacaaatttgagaggttcagtgattcaggtcaacatattttgttacttccattttaattactagatttacagtatatagtattttaaaatgaatttttaaggttatatctatactgtcagtttacacatctggagtctttatactaatgtattggcaatggccctaattaggtaatttttataaattacacctgaatagcttcttactcttcatgagtagcgtcatccacatctgctgctagaaagggtttaatgaacattaaataattttataaagccttagaaattctaaagccctatcacttatgtttactg

SEQ ID NO: 1045 - DNA, 298 bp, Homo sapiens
ctgggccaggtgtggtggctcacacctgtaatcctaggactttgggaggcgcaaggtgggcggatcacctgaggtcgggagtttgagaccagcctgactcacatggagaaagcccatctctactaaaaagacaaaattactcaggtgttgtggcgcatgcctgtaattccagctactcaggaggctgaggcaggagaatcgcttgaacctgggaggcggaggtcgtggtgagccaagatcgcgccattgcactctagcctgggcaacaagagcgaaactccgtctcaaaaaaaaaaaa

SEQ ID NO: 1046 - DNA, 10138 bp, Homo sapiens
tgggggttgggatgcagaggcatgaccccctttcttcccctgccccttcctgacatgagatgctctatgatagaggtagctggggcggggagtgaaacagaatgtgggttttcggggaggaagtgttggggtcacatgctgcttctcctgctttcttacataggtgcttcagcgaagagtcctgcgtctccatccctgaagtggagggctacgtggtcgtccttcagcctgacgccccccagatcctgctgagtggcactgctcattttgcccgcccagctgtggactttgagggaaccaacggcgtccctttgttccctgatcttcaaatcacctgctccatttctcaccaggtggaggccaaaaaggatgagagttggcagggcacaggtaaggacgacttcggggagtaacaccatccagagaaccagccagtgtctggagtcagagtgtgggagaactcctggggctggaagcagaaagcgactccatcctgtgtttgtttgactgaacaacttacctttaagaaggagagcaagtggaaaacacgtgggtggaaatgaattgttgcataatgatattcttgaaaatgatgctgacttccctctccctggccctggaaagggagggagagtggtgatgagggcatggttgggtctcagaacctccgtgggccctttggctctgacccagaccctactatccccaacccagtgacagacacacgcatgtcggatgagattgtgcacaacctggatggctgtgaaatttctctggtgggggatgacctggatcccgagcgggaaagcctgctcctggacacaacctctctgcagcagcgggggctggagctcaccaacacatctgcctacctcactattgctggtcagtggggcctgagggcctgtcctctgtgtgtgtgtgcccctcccaaaaagtaagggcctaggaagcccagagggtcctccttccaggtccagggatgtggacaagtgccgttttgcattttcctagcctggaagatcctctggctttgattgtccctagggaaggtgtgctgggtttaggctccgaatgcttctgtcttcctgctcctctccatagcctggctcacctccacttctggtcccactcctgtttccattcaggcttctcaccttcctctcctccttcggctcatctctgcccagctttctaaccctctagctgtctgtttgttaccggtcatctctgttgttcagctcactcatctcacgtgcacaccagagctttacaagaagtactcatctcttagtgaatagtgggagtgatgatttggtagtttccaaaggaagccaggagggagaatggagaagatggagataatcagttcccttctatttccactcctttccagggctcactgaggacttctgtattttcctctttctcatattccctcctgcttgccatctccctttctgtctttcaggatgtctttatctccttctttccattcctcctcagaacctacagagcaggaaatggagccttgatctctccatcctagttagtcagagtgggcagggatggaggggagcatccctcccttcgacctcaggtcgcacttctgcggagatggggctgacctgctctacagcttgtgtggcgtcagctggtgggagtccaggagagagggtcctgcccaggtcctgcctccactggcccctgccctgaggtgcttcctcatctccaggggtggagagcatcactgtgtatgaagagatcctgaggcaggctcgttatcggctgcgacacggagctgccctctacaccaggaagttccggctttcctgctcggaaatgaatggccgttactccagcaatgaattcatcgtggaggtacccagagagtctccttccttccacagttacccacccccagaaaggagctgaggtggcatggactcaaaatgttagttggtgggcatggacatggcagcgtggagggctgctggaccttgcagtgggtggaggagaaggagatgggggcagtagttaggagatggggctggggtctagagaagtggggaggacctgggagaagcgtgtgtgcccatggagccctccctctgcccaggtcaatgtcctgcacagcatgaaccgggttgcccaccccagccacgtgctcagctcccagcagttcctgcaccgtggtcaccagcccccgcctgagatggctggacacagcctagccagctcccacagaaactccagtacgtaagcctggtggggctgggcagggaggggcaggtggcaggtgagtgtgttgggacaggtatcctccccctccacctctgggagaggacaaggtaggtggagcaatgggttctgttccctgtggtacctgccttagttgacagctatggaccaatccctctctccctttggatcattcactttcccttgtgaagaacatgagccttgtgtcattgtagggatgcttatgcctgcagtcataaagtcagtgtgggtttaggcgtgtttgttatacctgatgatgcctccttccccagccccaagcaatatcaaattagccctggacctaggatcctctgtggtgaaactatcaagtatttactaagcacctactatgtactagcactgtcctaagatgatctaaatgatttataggatagatcagtccctatccccaaggagagaattggtactattacatgtaaaattatgtgctacgtatgcagtcacaagaatatttctaaaaaatatatgcaaatatgcaaagcgttacattcagatggagtgctgcccttcaaagctgcccttcaaagcaacctggccgtggtcccaaaggttcccggtcatggtcctttacgaatggtgcaattttattttcaacttttgagttgcgtaattgtagaaaaaccagaaaatatcaaatatttcttttaaagaagaaaaatcaggccaggcacagtggctcatgcctgtaatcccaacacactaggctgagtcaggaggctcacttgagtccaggagtttgagaccagcctgggcaacacagtgagactctgtctttacaaaaaataaaaaaaattagctgggcatggtggcaggtgcctgtagtcccagctacttgggaggctgaggtaggaggatctcttgggcctgtgaggccaaggctgcagtgagccatgatcacaccactgcactccagtctgggagacagagcaaggctctgtctcaaaggaaaaaaaaaaaaaaaaaagaaagaagaagacgaggaaaactcagccataattccgtcagagaggaaaccactgataatatgagtattctgttccagtcttttttctatgcttaatttttcctttttagaaagttaggattagcctattttgtaacctgatatttacacttcatattataaaacaagtattttcccacattattaaaaattgcaaatgatgctgatgttgttgaaagtgatttttggaaccccttcttagaattgctttcagagccaatttatgaggtgcatttatttttgttattttttggacataacttgcttttgaccctgttcagtgttactcaacttcatcacccagttttgccaaagttgaatctggatataattttaagtttttaaacattaaacccactctcaaaggccatagatcggtcacctttgaaaagagtcaaaaggttgtgtcacaggcttttgagaattgaaggcaattctcaaaggagtccactagtgctttctgggaagaaatttgtggtctctgaacactatgtgaaagtacagaacttatttcaatatatgtgatgggtaataataattataacaaacacagggtgctctcatcatgtgccaggcactgtgctcgggggattacgcttattaactcatttagccatcataaacaaccaatgaaatgggtaccagaattatcccctttacaggcaaggacacagaggcacagagagttcaagtgccttacccaagttcacgcagctagaaagtaagtggagccaggatttaaatccaggaggcatgattccagtctgtgcactaaccatggccctcacccttctccccagatgtttgatgctttaaaaaagattagtcttattactttagagttgcatataattagggggagcccctgaggggcttcccagggttttctgactgaggccagctcctctgatgcccccagggattcagtctggcttcctctccttgtgcaacggccaccacctacactgtctcttattttattttattttatttttctgggactggctcccttcttccttgctgtccctgaaaacaaccgcagaggcttttgggagggagagacagggtcttgttctgtcgcctaggctggagagcagtggtaatcctagctcactggagcctcgaactcctgagctcaagcaatcctcctgccttagccccctgaggagcagatgcatgccactatgcctggctatttttaagactttttatagagacaaggtctcactttgttgctcaggctggtcttgaactcctaggctcaagcggtcatcctggctcagcttcccggagtgctgggattacaggtgtgagccgccgcacttggacttgcagacgcctttttcagtgttctactgtgattcactatagcaagtaggtggaagtgaggattagcggggaatataaggcataaccaagctgcaaagattagagaagtttcacatagtatttagtcaatagagacatgttagcaagctaaacctatttatttcaaataaactcttgaggccagctataaatttttttccttcttgtgattccatagcactttctccagttctttcattggggatcattccactcaatcttttctggttggatactaggtcctgctactctgattaggctcaaggtagataggggtgctgcctggcctggtgagattctcgatccttactttctttggtataaggccccaggtgagagacttcttgttctaggagcccagcaccttctcccctgagtgtccagctgccctgcatgggctggtctggcgggcagcgtttctcacccctcagcccctggaggagtgtctgttcacggcaccctttcacctcccctcggtgaagcccagtctccccatcctttgttctgagctcatgtccaggctgatcaagcttccctcagatttcagttgagagcagcagttttcctttgcttcttctcttattttgacctgaataggacacagagttcgtagcttccctgagggcactggtgattggcatgcctgagctgacaggccattcacggcataaaaccctttccatatgccttttctgactccgcaaggtgctccctccctttcacctacaaatctcgagtggtgttgcagaactgtggtttcacaatatcaaaccattctaaacatgcagaagcagtgagaggtacgatctcctccagtggcacggaggcccattgctctaaatctcctaagtgcactagagaaagagagatgaatgtgaactggaaccagggtaaactggaacagtcaggggagattttgtggcacatgtagagtttgcatttggacctgaactgtaaaagggatttttggatgggtgtgagagagaatgggaatttgagaaccgggggtagataggtggttaagagtgtttatggttagagagaataaggttggttgagaagagcaagccggatgatgagggtattatgtatctactcatatcaaattttgatgactgccagaatcacctggggagctttaaaaactctcggcacctaaattataccctagaatgtctagggggtgggagccacgtgtcagtggtttttaaaaatcccatgtaatctttaaaagtttgggaataattttcctcttttgtttcctacaagtatctgaagctttgcagaaagagttacaaagcaataggacaaaaagaaaatgaatgaggaagtaaggaggaacaggtaatgatgaaataaggatccaatgaagccagggaataaagtcagctcataacatgcgtactatgagatgctatgcagttgctaccacgggccagaattttgaccctgagcttcttcaaagctaaagcaaaaggaaacctgagcagttctgagagccgtgataggagccaaacgctatttcatgaaaagccctgggagtgcggggggcagaaagaaatctctcccaaggctctttgcaaagagagcaccgtgtggggccatggacagggctttccactgtcctcgcaatcccatggaccatttgctaagtcaccccttaatgttggctctggaggtcattcaaggccagaattaactgctcagatctcatgtagcaagaaaagctgaacgcacttcttaaattcttgatttttatctgtagctgatttaaaaatcctcccatctccccgggctcctgactcatcttaaactaattaaccagacttgtttgcttgtagatagagtgtctgcattttgtctttcctgtggtcatttcttattgtcctggcaatcaacttgtcatttccttcattaggccaggagctcggagggacactgcattgattagggcgcaaaccagctttagctcgtcatcgttgtgtgcttagaggaagttcacctgctttggcctccactctgagggtggggtcaccaccccttctggagcctgggcttagccactgggcccatctgccagtgaaggcactgcccctggctctggtctgttgacgtggagacctgagagacactatttcctgcagatgggcaggagagacagctctgtcccctcctcccttatcccccgttcccaggaagttgagaaatactgatccagccagtcctgtcttcaccttggaaccagtgtcgagggagtgtgccccagcagagtccgttctaattggctggtggcctcaagtgggctgtgggtcaggatggggaccaacttggcagacagccatcagggtggcctcagggaggtgtgtggcctgcccaggcagggcattctccacacacctagttggccctggagtgcgtggcagctgagtgtgctggctgctggggagaggggcgctgcagcagggtgtgggtgtgagtgtgaggagctcctgggccatgcgcttccctacgctctgctctgtctgttgacacatgagtctcaggctgtaggtaatttgcggacggggctggaatgcgatgtgtgtatttttctaggggcttgcttgtgtgactgctggtctctgtgtgtgtttggggcacacatacatggaatagtccctcagcaacgggaccgcccagggaggagctgctgtgtatgcatggtgggcaggggtgtgcacccatgtggggagtagtgacccagctgcccgtaagggccctgggcctggaggtgcgtgtgtggggtctctgcctccacctgctgtccctggggctgcgggctttcctgcttttcttccttgtgcttcttcgagagctgtgtgtgtgtgtgcaggaggcaggcagggctgtgctcatggcggctcgctctgtggccctcacggcccacgtctgtagtgtctatgtcttccttcagggggttgcctggtctgcccagctggtggggagctgggtgatgctgcacatatggctctaccgtgccttgctggagacccccagacgcgttcctttactcccgcagtgtgagcaggcggccaggtggctggtgtgggccagcatgcaggctggcaaaggcctggctcgggtgtggggcgtggcaacctttgtgcagctgtgtgcccacacggtcttcctgagcatgtacctgtgcatgcacatctgctttgccgccatcagctctaaggtccgtgtgagagtgaacgcaccgttctgtgtctcagtgcccttgaaggtccatgcccctctgagcctgggcatcaaagtggggctgcagggccagaagcatgggagagccacgggggaggcaggtatgcctcagggggagatgttggggaagcaggaaccccagacgtcccggagccccaagcccaccaggagaagggaggtgtcacggagtgagctcagtccaggtgggtaagggaaggggctgctctgtgccccttggacttgtccccagcctcaggtgctagtgccctcttcctgcagccagcccaggcctggagcctgcatctcctcctgctcagccaagcccgtgtgggggcccctcctctccctcactgggcactggcacctctttcctaggctgagtggtctctggggaaggcacaggtggaatgacaggggcagattccagtccttgccctctgtcctctgcgaatagggctgttcatgacagtgttgggcagggagtctttttcctcctctgcccttgcctctctgtacacctgcctccctctgtgtttgttcctttgccttgcagcagctcccttcctcccctttcgtctcctgcccttcctggtgggctgtttctcttctggcttctccaggtgttcctctcttctcggccaccgtgtgttctgccctgggagtccttcagcccgggctgcctcttttcctacccagccccctgtccaagtgcccccaggtgtgcctagtcacgctctgctcacccccgcgctctctctgcagtgatacccagcgccgcaaccctcatcattgtggtgtgcgtgggcttcctggtgctcatggtcgtcctgggcctggtgcgcatccattcccttcaccgccgcgtctcaggggccggcgggcctccaggggcctccagtgaccccaaggacccagacctcttctgggatgactcagctctcaccatcattgtgaaccccatggaggtgagaggcctggggaagcggggttctgtagggtcaagactgtggagcacacacggtgaggactcctgaggaggggcaggcctgggtggaggctgttcgcagagctgcagtgagccggagggagagaggttcaggcagggaagggggtacacaggggttaaggggaccgagggaagtgtggtccctgaaagagaggctgggatgtgtgcaggccattgatcccttctcctctctgttcctgccctccagtcctaccagaatcggcagtcctgtgtgacgggggctgttgggggccagcaggaggatgaggacagcagtgactcggaggtggccgattcccccagcagcgacgagagacgcatcatcgagacccccccacaccgctactaaggcctacacctctccccacgcagagggggaattctgccctggtgaaacagacactccagacatgggagaaggactttctgggaacacagagaccaagagggagagaggcttcagaaccagtcctcctttcatttcaaaaccccagcgggccctctggagtccgccctgcccctcccccggccccccatccctcacttctgggctgtcatgctcctggtgtgccccttgcactggggctggctgggttggaaagtgggctggacttcagctgcctttctacccccaatggcagctgcccccttagcactcactgtgttggggagagggtgacgattgcaatggctggggctggggctgggggtgggattgaaggaaaccctctcctctccccttcccttctctctcctgtccatgggaaagcttttccccctctgcagggctccctcagctggaccatcgtccctgcttctcttatgatcgccccacctcatttccatttcagtctggggaccccatttctccctcctttccaacttccttcctttcttgtcctgtttcccttcctgcccttgcagtcctgaggtcctgcagccccggcccctcctccgtgacctggtgtggccaggctgcggggacgggaggggacgtgggggccccgggtgtacatatataatgtatattttttcaatgttgtcgtgagtgcagcccatgttcctgcgtgcagctcacggccttgtgtgtatgtgtgtgtgtgtgtgtgtgtgaggcatcgtcatgtcctggggcaggggcggggggttgggtgtggtgagggaggggacatatcctagggttttcaaataaaacaatcagaaaaaaaaaaaaa

SEQ ID NO: 1047 - DNA, 154 bp, Homo sapiens
gtagctgggactacaggcatgccccaccatgcccagctaatttttctatttttagtagagacagggtttcaccatgttggccaggatggtctcgatctcctgacctcgtgatctgcccaccttggcctcccaaagtgctgggattacaggcgtg

SEQ ID NO: 1048 - DNA, 288 bp, Homo sapiens
tgaagtgcttgatgttacattctatgttactcacagtttaattttttagtaatttttaatttatgtggaattgattttggtgtctgatttgagatacagatagacttttttccccagatgactagctattcatcttgacatcatttattaaatatttcatgctttctccactaatttgagaagcctctaaaagcattacatattaatatataaagactttaagtatgctgaaaagtttatgataaaattgactcatgctcattctacaaaatttgaaaaatgcagggg

SEQ ID NO: 1049 - DNA, 6385 bp, Homo sapiens
catccttcgaaaccagatccagcaggcctttgtggagcgggatatcctgacttttgcagaaaacccctttgttgtcagcatgtattgctcctttgaaacaaggcgccacttgtgcatggtcatggaatatgtggaaggtatctgacacggaaaacatgacacctgtacccaggaatcccttgctcatttgtgttgttgaagctgtctgtatttgtgccacataatggctgtatccacctaggaactgaagccaggcaatgaaatggctgtattcccagtcattatcttctgataattgcttgtaaagtgcctgctctactataacaaagagaaaattagcgctatctggaaaaaggttatcttttttaatagtttttaatcctaactacctcctctcaattggtcattaaagttggaatataggtgatgggatttttttctgcttatttttattacatatcataaaagtactcatcacaattagtcttcttacagaaagaaatatatattcttttcagtctatagtatgaaataaaatggaaaaggagatacattcaagaaaatgcagccagtcttcccgatttttagcttttttttctttctttaagaggtttatggactaccttttcaatgctccaagtaatcttatttccatcaattttatattaagtttctgagttcgagtgaccatgacttgttgacataaagttaataagatgaatagatcagtaacaatttcaaagcatctaatttaagctgttgtcattgaacagaatcccaaaactataaaactcaaagaaacattagatatccttttagtttaacctttgcatttcatagatgagcgaaataaagtccaagaaaggaagacttactagatagagtggtagataaaagacaaaaacgtagcttgccttattttcacccagtgtcctttctaccacaccaatattttgcttttttaacctttgttgtggttatcttaacaaaaacaattactaacatttatcacacatttaatatgtgatatgtgttgggcagtatcctaagttctttatatagattatctcatttaattctcgtaagaattctaacaaagatggtattattaccatcctcgtattacaggtgaaggaaccaagagtcgtttgcctaggatgtctcagctggtaagaggcagagctaggatttggactcaggtagcctgattctagaatccatgttttatgctggtgtattttaaattgttaccatgatcctaaaattatgctagccgttctttaaagtacagtttcacttcagagccaaacctcctctcttatgaatactacttcttaaataaaaatctgtattttctccatactgtttcttagttagaaacatgataggttaacacatagactccagttgtgactatgatatgctgtgtctatgggtagagatgatttcaccttgaaattctgcagtctaaactgattttctacattaagccttcatcctatagctactaactctttttcctgtgttacagggggagactgtgctactttaatgaaaaacatgggtcctctccctgttgatatggccagaatgtactttgctgagacggtcttggccttggaatatttacataattatggaattgtacacagggatttgaaaccagacaagtatgtacacaaatgaaatatatgtcttcttttgcccaatacaaagttctcgtatgtttataaagatgttttcttttagtcaatgtacatttttaaattattccataatgtccaaaatgagttgttttaacagtatatatggtaatttgtatgtaaaactttaaaagatatgcttattggaagttcaggaaactcatggaaaaaaggatacaatgcatatgtatatatatattttattatactttaagttctgggatacatgtgcagaacgtgcaggtttgttacataggtatacacatgccatggtggtgtatgctgcacccatcaatccgtcatctacattaggtatttatcctaatgttatcccttccctagttccccacccccaatgatgcttatattaataacttatcagcaacaagagaaaaagataatgataaagccagagttaatttttttaagtttttttttcaaatggtgcaaatgtgacaatagcttcatagaatgctgctagttgttttctgggtagtttctttatttggtgtcatacttagattaccttttcctactccaagatgaagtgcttgatgttacattctatgttactcacagtttaattttttagtaatttttaatttatgtggaattgattttggtgtctgatttgagatacagatagacttttttccccagatgactagctattcatcttgacatcatttattaaatatttcatgctttctccactaatttgagaagcctctaaaagcattacatattaatatataaagactttaagtatgctgaaaagtttatgataaaattgactcatgctcattctacaaaatttgaaaaatgcaggggaaaaaagagagaaaaaaattcatctgcagtattaccaaagacaactattaaaattttgggatatttccatccagtagctttttaaaaaatacctctattcttttaatttttaaattactgtaataccgtatatactatttaaactttttattttcccacttaaaatgaaaagttttaaatatatttaattgcagattctttgcatgggtaagaaatataggttttgtgcttaatgagtagaaatttaaattagagatgggagttgaaatctgaaacaatacaatatttttctgtttttctttattttatgcctcatttgaatcacaaatgggttgcttagttcctggtgtatgcccttttttttttattttcttattgtgaaaatggaaagggatcagagtttcatacttgaatttttctaagagtttcaaagtgttataaatgatattgtatgtggctgctccaacaaagattagctacaccttgtctctagccctcccttgtgaattacactcagctgctagatggaagtatttgacatctttatgtgactccatctctttccaggctgggttttgtaataagcttgatgcccatatattaaatagtcttagaaactgaggggggaagggaggaaatgaaaatagataaccagcttataaagtgattattgtgttacatgtccgtctgcctcatagcttgttggttacctccatggggcacataaagctgacagattttggattatctaaggtgggactaatgagcatgactaccaacctttacgagggtcatattgagaaggatgctagagagttcctggataaacaggtaagcttgggtgccatttagtttattgagaaatacaaagtatggtattgccagtgaagttcagaatcaacttgtgtgggccatcttcacattagtgctggtggtttagatgtctgtataaaccttacatttaataaagtgcaaattgctcccatttttctccctgggcctctttgaattgtctgctccctctacattcctcccccaacattatggtctattagcaagacgaatgatctaattgcacacaagtgagagtgtgagagagacaaatggaatactgtttttgtaaggaattcaggagtctcagtagagtacttgtgaaactcatgatgcattgtaccatcacgggtgctaaatccaagccacggcccatttccctttaagcatgcctcattaccatgtccccacaatctgttcattgtaaagttacttaaggtaaacacatctcaactgtcattgcttttatgaaatgacctgtgtgtgaatatattttggtcatatagatactaaaactctctctgacaatgacaaacttaaaaatgcattattattttaaatttaaggattataagtggttttaatattgtataataggtaaaactaccaaacagggtcagattctcaatttgaaagtaaacattacatataatttaacattagagcagaactgtaaacttcccgtctttggtaataattcttttcgttggtattttaaatatctttttataattggtgctcttaagttctttgtccatgtggttccatgtggttgagcaggtgcattctgggcaaaataattggtgactagccatcttgctcattttaattcatgtctaatattccaattattctaatattgcaattatcttttaggtctgtggcacacctgaatacattgcaccagaagtgattctgaggcagggttatggaaagccggtggactggtgggccatggggattatcctctatgaatttctggttggatgcgtgccattctttggggatactccagaggagctatttggacaagtcatcagtggtaaatatcatcaggagttatctttaggtcactgttgggaagcagctatttaatgtaaatctgttgagtgtcacagtttttactactaaaatgttaacctttatcaaacagttgagccaacaaaagaactcactcatcaaagcatataactgacattcttaatctcaagagagcaatttttgttgaaaattgatctgaagaaatgttgttaacatagaatttggaaatgtactagcaacaaaaccattttttatagtgtgctttttctgcaaaggaaattggtgtgggatttacaggcaatttaattgccgtccagtcttcctttccatgataggaaagttacaccagggaagaaaaggttaatgtgggtaacatttacataaatagggaaaatggctaatggcataatgaagaagttaacaaaaatgtaataaaccctaaaacaaatgtctaccaaataataaataatgagaatgggaaagaagcaagttgaatccacagattgttaatgatttcattggtagttgttatggcgtaatgttatttctgtaacagctgttcatctttcatttaaaattcaataacttttagatcttaacctgcaagctgaccctaactattgtatgtggcctgtggcaaaactaaatgataattaaatagggtgtatcactaccctacctgccgattttataaatttccctggaacatacatcagaaaggcctctcatcttgaaagtttgtcaggcatcactgacatctttatcagccacgtacggtctatttggactgtgtttacaaggtccagcagtggaagtaggggaaaaattcattttgcatatgaggggcccctttatcacggcattcttttctatctttgattttgcaagccttgcatatttgtaaactttaacaaagcagatttgtgagttgcctgcagtgtatgacccctttatacaatatctgagctgtttatggatttataactaggctgttttctgatatactaaggcctgaatggcaaagggaatcaactgtttaattaacacaagcagcaaatgctggctttgttcttgatgccttacggctcagatgcatattcatgttttattttccaaatcagatttaaactgcagcagaggaagctagaggcaggcacacacagaaataactcatgtttttattgcatttccgtacacacaagcacgcacacctatcttcaggcaaactccttcagaatgagaaagtattcttaatatttatgacagattttaaatacttccattactatgattactttgggtttttttttcttcttcagtcttagcactttgacctgtttgtttgtttgtttgtttgtttgtttctggaaatagttatttttacaaaattacttcttgcttcttagagctgaagaactctatggctgtggccaaattctcagttgaggaaattaagagagaaaaatctgaacctgagataatccctggatggatatattagccacctgaaatggaagtgtttagagtttctattattttaagtcttttaataactagagaggcaactttttggaagccaattctttgaaagaaaaatacatttaaaaagcaaattaaagatctgcttattgaaatattctcttcctaccttgtaaaaaatctatgctacttatgtcttgtaaaataatgcttctcaaacatgactgtgtttaggaatcgactgaagatcttgttgaaaggcagactctgatttagtaggtccggagtgggcctgaaattctgcctttctgacaaattcccaggtgatgtccatgttgctgggacctggaccctcttgtgaacaatatggttataaacaacttttcttccttctagatgagatcaactggcctgagaaggatgaggcacccccacctgatgcccaggatctgattaccttactcctcaggcagaatcccctggagaggctgggaacaggt

SEQ ID NO: 1050 - DNA, 331 bp, Homo sapiens
tgcatgggtaagaaatataggttttgtgcttaatgagtagaaatttaaattagagatgggagttgaaatctgaaacaatacaatatttttctgtttttctttattttatgcctcatttgaatcacaaatgggttgcttagttcctggtgtatgcccttttttttttattttcttattgtgaaaatggaaagggatcagagtttcatacttgaatttttctaagagtttcaaagtgttataaatgatattgtatgtggctgctccaacaaagattagctacaccttgtctctagccctcccttgtgaattacactcagctgctagatggaag

SEQ ID NO: 1051 - DNA, 412 bp, Homo sapiens
aaacactcagggactgcctcttcagctctcagctaagaatgactgagtaaaaactgtgacttcactgggagatgtgagagaattacaagcccaagtcaggagggcagctgcctgcacagttttacatttctccagacagtggacatcacgtatatttatgggctttcggagcagagtactctgtaatgcaattttagctcatctaattgagaaagaaaaatgaagactgtttcccaggcatgtctgcgtaagcgttccctgaatccatggtatttgtatcaatagaggaagtcatggaggtaaattgaatttatagacttgtgaagaataaatcaatttcccatggaaaaaccctaataccagagcctatacataagcttcctccttggctatttttatttgtgcttgctta

SEQ ID NO: 1052 - DNA, 412 bp, Homo sapiens
aaacactcagggactgcctcttcagctctcagctaagaatgactgagtaaaaactgtgacttcactgggagatgtgagagaattacaagcccaagtcaggagggcagctgcctgcacagttttacatttctccagacagtggacatcacgtatatttatgggctttcggagcagagtactctgtaatgcaattttagctcatctaattgagaaagaaaaatgaagactgtttcccaggcatgtctgtgtaagcgttccctgaatccatggtatttgtatcaatagaggaagtcatggaggtaaattgaatttatagacttgtgaagaataaatcaatttcccatggaaaaaccctaataccagagcctatacataagcttcctccttggctatttttatttgtgcttgctta

SEQ ID NO: 1053 - DNA, 447 bp, Homo sapiens
tgatgaatcccctaatgattttggtaaaaatcattaagttaaggtggatacacatcttgtcatatgatcaaatggtttcgcgaaaaatcaataatcagacaacaagatgtgcgaactcgatattttacacgactctctttaccaattctgccccgaattacacttaaaacgactcaacagcttaacgttggcttgccacgcattacttgactgtaaaactctcactcttaccgaacttggccgtaacctgccaaccaaagcgagaacaaaacataacatcaaacgaatcgaccgattgttaggtaatcgtcacctccacaaagagcgactcgctgtataccgttggcatgctagctttatctgttcgggcaatacgatgcccattgtacttgttgactggtctgatattcgtgagcaaaaacgacttatggtattgcgagcttcagt

SEQ ID NO: 1054 - DNA, 552 bp, Homo sapiens
ggattttcaaatacctgtatgaggatgttgatgatgttgatatctacaaggtaaacaatgggggtgttttatgcaaagataatttaaggtactcaattcatgcaagaatgtaaagaaaaattcaagtgtgcaagagtttaacccaagctgataagtcaggagtataaaaagaaatgaaaactgaaataagaaagtcttataactttcattaaattatctcactatgtaaatactttttctaaagagataaatgattactgaataaatgagctgtaccccagaataaattttactaatttagcctcgctactttccattatgatatcctagtagaaataaattttcgttgaataatctagcccttgggaactcaatagatacgtatctttttctctgtgaagtcacagctcatttaatgaaattggccaccaacgcccagttacatctttcatgcatttttaatgaaatgtaatttcttgagctagagattcaaagaatctcgttttgcatctaaaattatgttcttcaaagttttggtagctaaatcggaaa

SEQ ID NO: 1055 - DNA, 552 bp, Homo sapiens; identical to SEQ ID NO: 1054

SEQ ID NO: 1056 - DNA, 9519 bp, Homo sapiens
cactgccttgtctttccccctttgggcctctagaactgtttcaaaagtgcccatgggtgggaagcaaaaacaattaccttatgagaataagaagaaagttttttgggagcagtatagttcattttccttgctcatatttaattggaaaatcagagaagcggcattatatattcgcattggagttacagaactttctgttttgacagattgggttattcataggtatatcgtaaagcatttcttgatggtataatacaggccagtgtggtcttgtactaccccttagtgaagccttaaacgatggtcagtattttgggagttttaatttgactggatttgtagtcttctattcagtgtttttaaaaatattgtataattgactctttaattgaactgtatagattaagaaagcctttaaaaactaacgggtaaagtatctatttggcttttaatttgaaataatttcagtgactgttataaatagtgatatctttaaaaggtactttactggaatttgatggttttgtttttgcatttgcagttttctactctaaactgtagttcatttctgtggcttttcttatgtttagctttacagatgggaacctctactgcttagcctttctatacatctggtgcagcatattggctaatccactgtacataataactgttagcagtcccattcattcttcagtcctagaggtatcagcataatcaaagaatgatgcaaattaagttaattgtggtgttcctttatttttacagttgaaggcacagttaaatgaaacactcacaaaacttagaactgaacaaaatgaaagacagaaggtagctggtgatttgcataaggtaggcactgttcgtcctagagatgtagtatcatgagcctgtgttgtgtgttcaatcttaagcaaacttatgctgctaattctggatttgttgttttgcatcataatattaaccttttataaatttaagctgcttgttattagttagtattttggaatgaaacgttttggcttgtttttccaggattcttaattcacctcattatttcctcacatttctataattaattgctttataaagtacagagtaaaatttagttggagttattaaaatttggctgcatccatatattttttaaaattgggatttggctgtgtattcatttacaaagtatgtttctcttggtcttttggataaaacaaagatataaatttctattttttttagatgtttttccttcatttatttcttcatacaaatatatttttcctaatctcaatgcaaatgaatgatttttaggactgcatttctttgcattggtttgacaggttatttgtaattctgttttgagatctatttttaatagtagaattcacatattcttatatcaaagctgttttagagctatgatagtgtttatggatatatcatcattagcaaaacaagtgtcactttttggaattgcaagaacaagaggtacgcacttaaattttgatagtataaaatggaatcccagaaacccaacagtagtaatttatactcctctcaacatggtatgagaacatgtatttccctataccctcaccaatattagatactgtctaacatttaaatatttgatattctaatagattttaaaagttatctcattttaaaaaataatactccttttaaagagttgaaagaaatttttttttgattctatatgcttatagtttataattgttatgtaaaagtctaggaatccacaagtgttgtcaggttattttagtgtagacagaatgtgaatttgggtctgttttagaggacaaactttgatgcttaatacactgttgtggttgagcagtcagtttactttgatacgtgattttaatttttgacctctggatcaaaatataaacatggaatttagcctagcaatgtagtttcttagaaagtactttaaaaataccaaactggtgctcaaagttatataatagatataccatcttatttacagtagctaagatggcaatgataggtgacagttaactgccccatacctatacagtagaaatattgtgcaacatttgattggaaaagcacataaatatttgactaaaaaaagtttataacggctgggcatggtggctcacgcctgtaatcccagtactttgggaggccaaggtgggcggatcacctgaggtcaggagttcaagaccagcctggccaacatggtgaaacccccgtctctactaaaaatacaaaaattagccgggtgtggtggtgcgcacctgcagtctcagctactcaggaggctgaggcagaagaattgcttgaatccgggaggcagaggttgcagtgagccgagattacgctactgcactctagcctgggtgacagagaaagactgtctaaaaaaaaaaaaaaaaaaaaaagttaataacatactttgtaaaataggtaagtataaagcagtatgtatgttaaagctcacttatgtaatattttctataagcacataatatgtagagagggatctaaactaggggtggacaaatcccaaagcttttttagggtttgtgggtcacatatgatctctttagaatatttttgtctcctttttaacataaccctttattttattatatattttttgagatggagttttgctcttattgcccaggctggagtgcaatggcaccatcttggctcactgcaacctccgcctcccaggttcagttgattctccttcctcagcctccctagtagctgggattacaggcatgtgccaccacacctggctaattttgtatttttagtagagatggggtttctccatgttggtcaggctggtctcgaactcccgacctcaggtgatccgcccgccttggcctcccaaagtgctaggattacaggcgtgagccaccgcgcccagcaacatggccctttaaaaagtaaaaaatattcttagcttgtattctgtacaaaaacaggctttgggccagatttgactaacctgtaatctagactaatactaacctaaatatcaactatggttatttctgtttttaaatttctttgtatagtttctgcattacttaagcttttaaaaacagtgaacatatgttcttataatctggtggggggtgaagctattttcattttggagggaaaaacctgtgtcgtcttttgagaggagcttttatcttctacaaaatgaataaaattattcattttttatgtatttatcaactgtattacttagtagctaccatattgttttccttataggctcaacagtcactggagcttatccagtcaaaaatagtaaaagctgctggagacactactgttattgaaaatagtgatgtttccccagaaacggtatgtattttcttcatccccagatctctgagctagttaccttgtgacctgtgtaaagaacaaaaatgtataaggtccatctccgaaagtcatctttcttgaaaatatcctgtccctaaaatgtagtgttttcattgatgtttgatctcatttttgcttattgaggtatgttaattttaagggttgtgttgagaggtatggagcgggggtccccaattcctggactgtggacaggtaccagtcaatggctttttaggaaccaggccacacagcaggagatgagtggtgggtgaatgaccattgccgcctgagctctgcctcctgtcagatcagtggcagcattagattctcataggagtgcaaaccctattgtgaactgcatgctccttatgagaatctaatgcctgatgatctgaggtggaacagtttcatcctgaaaccatccccgcactcacccatctgtggaaaaattgtcttccacaaaactggtccctggtgccaaaacggttgggtattgctggcctagagtatagactctggagctagactgcctatgtttgaatcctggctctgccacttagtagccatgtgaatttgggcagatctttagccactttgtgctttagttgccccatctgtaaaaggcaatgataatagtacctatcctgtagggtttttgaaagaagtaaatgagttaatacataaaacacttaaaatagtaggtggtacttacaacagtgcctggcacttacttactaagagctcagtatatgttaactttttttactgtttggaatgtactttcttttgcggggcaaattttctttttctgaaagaaaaaatggatatatttctgatattcatagattctagattttttttccttttgtgtccaagtgacaacatttataacatagttttctttggtgccaactagtttgcaccactagttagcaaacagtatttctctatgtggtttttgttattgttgattttcatgtcattgttcagattttttaatgtttgtgtttaaatcagcaatataacattttctgttgtttggttttacatttcttttccttgtgtatggagtttatcatcacttccatcttctttttaggagtcttctgagaaggagacaatgtctgtaagtctaaatcagactgtaacacagttacagcagttgcttcaggcggtaaaccaacagctcacaaaggagaaagagcactaccaggtgttaggtaaggacaactgaaatattgctgtctatgggtaattgatgttatgtgtctgtgtaatgtgtatttacataaataaactcacttcactagaggaaatattccttctttatctctcagaacttccagatgacagccttaagctttcttggagctttagttctattttgtgcatatcttgaaggtcttgtagcttggaggggttatctgtgcctcctttgacctttgtatcaaacagactctcttgtaacttggctgcctgggtttttgtgtgttgccttaatacctgcaacggcttcgttaatttattctgttcttagtttagagtaagtatctgtgaccttttctcccccctcccttccttcctcctttcctccctcccaaaataaaatgaccataacattttaactgaggtaaggttgctaaactggaagtaaggtcatcacagtgtcttaaaattgaaagctggtttttattcaagtttgcttttgttaggtaatctaagaaattcgttcattagctcctgaagtgagatttttacttgaggatagctaaacccataattaaccaagtcatgttatgagcttttattgtctatattaccttggaaggctcagatttggtagcattttaaaatgacttgtattccagccggtgaatgcagtttttgtttttctggttgtagggtttttttttttttttctgttgctacctggattttacctgttttatgaataacttaagtcacactgcctagagtgtaattagagtattcagatatgcactgaatacttcagatattcttcttttgaagatattttctctaaaacaatcatgatatcctggagaccctgaggggcaactcatcactgaattatccctttcagaacccctgataatactgtgttgggctatacaaggcctcagggagagcttaggtatcctggaaaagttgggatggacttccattttgatcttacaggagcgttttgtctcactttagagtgatcatcctctggcctaccttgacacatgctctccttcaaaatgctaattcaggtcagttatctctaacatgactttccatataataagcccagctcattcttcaacatatcaacaaaagtaattaagcctcagctcaaatcttttatccttggtaagctgacttctccagtttcccaatgtaaaaattctgccacatttcctcgcttttccaaattaggaaataaccttgcttcctagggaaacttccatcgcttcttcccaggacttcagccttattctttccactggctccctctgttcagtcttgaaaacatgctcagatggcttattttaaccttgtacttccttcaggttaccacccttatttttttacttttttactatttagtattcttaagaaaatactctctatctacttatttattgttattgattactttatacactctagaatggcttttcttcctgctatttcaatgaaatcatttttgcaaaaatcattaatgatccctaattgctagatccaatataggcccttcttttgcatgtgatcagatactgaaagtacttaatgaaatatgtcaaaaatgctgacattagacctttgtcttataagggaagggtttcatttctagagagcttaaacaattaaaagattgcctattaccccttgcctttcgacctaagcgatattctctctttagcatctcatagatgttctttaatattttccttttcttcctaaatacatagtctgctcattttaagtcttgtgaactatttttggcttgtccattgccacatttgttttaattgtattacacttgagacatatgaatcattgataataacactttttctttttgatttgcagaattatagtaatttattaaaatatgtctgtataccctcacaacgcagttggcaggcagctcccctcctaactgatagcacaacattcttttgtcagctgataaacataagtccaagtttggcaagtgggtggttgacagtattatatcatgaatgataggctggattgttatgaaaatagaggcccaccaggcactctcgaacttcttcattccttaggctctacctggcattgacattgataattcttccttgtgtacttatgttttggttcccgtagctcttctttatacccgttaaatgtttgtgttaccctcaggtttttatccttagctatcatttttgctacatatattctccctcctgtatactctatttaaactgacacgagatgattacattgaaaatacacatttctcaatcattagaatgtaggtaatagcttaatatatctaatgtcaagaaacctttaaaaatatacacaagtacttatgaattgtttatgataatgctgcacatattcaataaagggagagttgtttttaaaaacaaatatgcaagaaataatatgcattgatgtagtttttctaaatcctgatacatagtacttagcgtttcttagagctgtaggggtaggtgtatttaactgatatctttaatttgtgaaaacttttcttttggaaatttttttccccattacctatttttcctccccccatcaaaaaaagaaaagggtaccatcctccgctttccatttgtggggagtgggagattgattaagatgccttttatatgaattgacagtattggcattttataatatacttttttgttcccagatatctactctttatgtttcacatttgcctggtttctaagttttctaggtgtatttctaaccaaatcagaaaactttattatcccaggttaccttatcttggaaccagtttatagaatcctgttgagggaggatgataatttaaatagctgatacttcatgagtatgcctgttagcataagcatgcttccaacatgtggcaactcctttaatcttcacaaccaccctgtgtgttaggtaggtaggtattattattaccatgttacaacagacccaaagagattctataacttgtccaaggtcatacggctaataaatgggcgagctggggtttaaatcaaggtaatttgggtacagggcttgtgttcttaatcagtgcttttcttctccctaattcaggcactgtgttcactgatcccttttgtcactgttttcttttctcctcattttgtctttttatttttttttggccagcctcttagaagttttgtcaatcaattctgactttttcctaaagttgatatttggtttgtcagtagcgtattggagaggcttacagtagtatccagaagaaatggaggtgaagctctgtgtgtactctctgtactccctttaacaaatagattcttaagtgtttctgaaagaaaaagtccttttgtagggctcctgaagtacaagagttaatgctctggagaaaaacttatcttatttctacactgaaccttagctatcatatggatcaggttttcattttctgtgtttacatagcactttagagtttaatgtactagtgatctttttagactttccgatcaactgttaatagccagtgataactttgctttttaattttccaattgcttctttcctctaaactttttatttcaacacataaagttgaaagaatagtacaacacccgtaaaccctccacctgcttcatctctttctatatgtctacatattttgttgttaaactaattgaaagtaacttttagtcattatgacattttatctctaagtactttagcacacatctccgaaaacaagacattgttttaccaatcagtggtaccattattacaaccaaaaagacaaaatagtagttatgtactatccaatattaaacgtttattcacattttgtcaattgtacccaaaatagctttttaactattttccccaaaccagaatccaaggcaaaatttaacatgttgtgttttgttaagtcctcttagtctctctaatggcttttgaagtttaatttctttagtcatcttatctgacttagaaaacttcatatgacctaaaaaaaaaaaaaaaaatctatttctgctcttttaaattatttattcactggggtaaggttgtattcaaccccttttcagtgctactcactcactttagctttacattctcttgagtaggactaataaaaatggattaccagtgttgttgttttaaatgttttctaacagaatttggctcacatttaaaagtatctacctaaaagcttgtttcctttgaatcctgagatttttctcagtttgattaccattagtgtgaattgctttgagtctatttgaaagggccatgctagatcaaatggaatatgtacttttggtgtttgacaaatgtcttctgattgccttctgttgctttgttttaaagtgaaattcattctttctgatcttttacagagtgaagtaattgggaaactgttcatttgaggataaaaaaggcattgtattatattttgccaaattaaagccttatttatgttttcaccctttctactttgtcagaaacactgaacagagttttgtcttttctaatccttgttagactactgatttaaagaaggaaaaaaaaaagccaactctgtagacaccttcagagtttagttttataataaaaactgtttgaataattagacctttacattcctgaagataaacatgtaatcttttatcttattttgctcaataaaattgttcagaagatcaaagtggtaaagacaatgtaaaatttaacattttaatactgatgttgtacactgttttacttaacattttgggaagtaactgcctctgacttcaactcaagaaaacacttttttgttgctaatgtaatcggtttttgtaatggcgtcagcaaataaaaggatgcttattattcaaacttgac

SEQ ID NO: 1057 - DNA, 32134 bp, Homo sapiens
agaaaaggacaagttactcgctgctgtgaaggaagatgctgctgctacaaaggatcggtgtaagcagttaacccaggtgaagacattcttatgtacgagggatatacttcccaaatcagaagcaacaaaagattttagaaattgtccataatcagtagtttaattatttgtaatttatgtccaacaaaagtaactttcctttagagttttgggagggtagatagagctgtctctctcttttgtgatattatagcctatagttgaattatttaaaataagagtacttacagatatcctagcttcagaataacaaaagcactctgtacagaagcatgggaatttgttttaattggatctgacctagatctgttctcaatagaaacacagaatttggtgtgatcttgtttaagtctgattaatggaataagtgtgaaactcttaacataggtaatttatttatggagcttcttgtgataagtataattttttgtcaagttcttcacatctcagaaattttactttgagaggttaatagtaaaaaataccagaaaagccaatctttaaaacatcatgaaactgagagaacagaattgaaactatagaaaatatggtttaattattcctgaagtgcttgtttctctttctagggattaaatgcagtagaatacatgatgtttatttatgagtcattcacctagccacttgatgacattgtaagagtgaatggctttgtttgaatataaatcctttatgtgaatttgaagtaaataaaaaaagtcaatggaaaaagttggcaagattaattaaagttgttaataaaattagaaactttaacatagttttttgtgactatatgactatataaaaaattaaaaattaggataactaatttgataattcattgagccgcatacttatgatgtgtatacttctaagtatgttatacaggagtataacaatttgtaaagatgaatgaacaaactcaggcagccataaattatgtaatatctcaaattttgtcatacaattgctttagagcaggaacatgattagtcctaatgatacctgcagctaactttaaaattgcttggctttcatgtactttgataattaatatttgttctaggagttcatagtaccggcaaaacaaaatgaaatccctcatttaagatttgacttagtggccgggcgcagtggctcatgcctgtaatcccagcactttgggaggctgaggcgggtgaatcatgaggtcaggagatcgagaccatcttggctaacagggtgaaaccccgtctctaataaaaatacaaaaaaaattagccgggcatggtggtgggtgcctgtagtctcaactactcgggaggctgaggcaggagaatggtgtgaatctgggaggcggagcttgtagtgagccgagatcacgccactgctctccagcctgggcgatggagtgagactccgtctcaaaaaaaaaaaaaaaaaaaaaaagatttgacttaggaagatgataaaactttgctttctgaatttgctttcccttgtttcaaactttgactctgctatagacatcttatccctatttttttcccttaggaaagagaattatttccttctaggccttttttccctgaaagagaacgtgtacctgggaatgatagagaatgaactgttgtgctttaaaatgttctttcgtgtaatcaagttagaatgtaggatttattctaggttcatagtctttaactcataataaactagaaagtgcatttgaattaagagtaaacaacagtggcaaagtgtttatgaagggaattggcgtgaagagcagatgagatgcagaagactgtttttaaaatcttttgaccttgctttttttaagcaagtacttaatgttttatcattcatgattattttactgatgttaaataacatcattgtttatcattgttgcaggcttatgatacttattaaataacaagtttttaaatttctgggatattcttttaggaaatgatgacagagaaagaaagaagcaatgtggttataacaaggatgaaagatcgaattggaacattagaaaaggaacataatgtatttcaaaacaaaatacatgtcagttatcaagagactcaacagatgcagatgaaggtatattttcattctttggaaacaagatgaaatggttgcattcactttattagcaaacttttaagtggctagtatgtacaaggccctttcttgggccatcaacatacagtggctagtgaagttcactctgcgtcctaagtaaaacaacttttctaggtggggatgaggtagggaggccggatgcagataaatatgatgatagagataagtattggcgactttagagcaatggtgatgggaggtaaggaagaaaaggatttgatagggaagactttttagaagtgatatgcagactgtgttaaatcttttaaatcaattaggcattatcaagtaagagagtaaagaaatgggcactgaggataagagttacttggtgtgatttcttagtccatctctggaggtgatagttcagtgggtatattttgggacccaggactgagctttttaatgagtgcactccaggtgttaccagtacagattgtctagagtaactgctctatgagaaatacagtaagagttgtggtatttggtaatgagggctggaatgaagaagggatattgagaagtagatagaggccccatcttaaagggccttgtatacctgaagactggggagccagtgaaggagtttaagcaacgcagcagtcgctggaattatactactattttaaattttcaccttggtagcagtggggaaagtggagcaagggatagttggaacactttgctagaattcaagtcaaagaacaagggcctgaaattagatgttgacaatgagagaatgagtttgagtatacaaagagttagttagatagggcttggtgttagtgtgaaggggagaggtgatagtgaagaatgacttccaaggttttggcctgagtgattttgtctgttgttgcttcctaccctttcacctgtcttctgtcagaaggctcagtttttacagtctgtcttttgtatatattttccattttcatgattctagttaggactagaccagtgaattttttttttcttatttttgaaaagattgaaatatctttattactgctaaagaggttattgaagaatatggcttgagtctgcttgcttggtggtcatgtaataccttccttaatttaactttcttgaccagtgactttttgaaattgttacttccatctgctggctgatccttcaatttggaaggtctgtcattacctcagatttaatatatgtctaaaactcacctattgataaggttgatatatatatatatatatatatatatatgtattttttttcaggccaatcatgagcaatgatgtttttaatattttgaggcattattatctttatgcttgaatcctgtgacttttctctgcctggcttaggctacaatttgttctgaaatcttaaagacactttatttctatggctaggtgccgtggctcatgtctgtaatcccagccgaggtgggaggatcacttgaacccaggaatttgagaacagcctgggcaacatagtgggaccccattctataaaaaaattaaaaagtttgccaggcatggtggcatgcccatggtcccaattactcaggaggctgaggtgggaggcttgagcctggaaggatgaggttgcagtgagccatgatcacactattgcactgcagcctgggtgacagggtgagaccctgtctcaaaaaacaaaaaactccaaacctctttatttctagttactcttgcattcaattcttagacatgtctttagtttattattacatactgggataattatggctgatattaataggtttgtcattttcattccgtcttgtatttggtaccagatttttttttggtaaaatattgctttgataatatcgctagtctgctaaaaattttaaaatattctttgctgctttcagagtcccagtgttttcctctgaaatgccactaatagcaaaaaagaagtgaatgatgctgttttcatgttcttaccctatccactgcttttagcatttgtttaactcattccttcatcttctcatcccccagcaatttgagttagtgaagaactgattttcctagcctcaagtgatcttttcttcttaattcctaattcctgttaatttgaaaattaggcagatacttgtagcagcatcttttgttgaaggtgaaaggtatttaagtgattcatcctgttttacttgattacttacagaggtcaggatatagattccatatgataacttctgtgaaaaatagaaatgtataccttaatttcccttaataagcaacagtttcttttgaaagaattattaataagattatttcatacaaaaacatgttcttatgagaatataagagtcagtgtgcctttatctttagattctttaatccaaaatttaaaaattagaagaagaaagttagagtggtggtcgccaggggctgcagggagaggaatgggagttattcgttaaaaggtgtagaaggtgttttacacaatgaagagagttatggagagatgaatggtggtcatgattacacagcattatggatatatttaataccagtgaactgtatacttgaaaatggttagaatggtacgttttatgttatatgtattttataatgtaaaaacttggaaaaaaaattaagaggtcagaatattttagcaagcaggtttttgtgttatctatatgattatggcccaatttgtaacttaatataaagtgtaccaaacatattttcagtttttaaactttggcttactaaagactttaagaatattgctaatgtataattgacataagatcaggacaagcttaattttgtatgaatctattcggtaggaaagaaatcctaaatcatatttagttctgaaacatcatctctaagcatgtttatcttgtatttcaaatatgatagcagctagcatctacttgtattcttgaatgtggtgacagtttgtatttgatttgcattcatcactaacaaaatataattcttttaaatttgtttatatttatttgagaagaatgattcaaacttcattctattgatgttttttatattctcattttaataaagtttattttaaaagttagctttgacagtctttgttttctaagttttatgtgtgtaaaataattttagtttcagcaagttcgtgagcagatggaggcagagatagctcacttgaagcaggaaaatggtatactgagagatgcagtcagcaacactacaaatcaactggaaagcaagtatgtttccaaataccttattttttaattgaatggcagagtattttcttgaatcatcaaaatattaatagcgtttgatagtaattggttagacttttgtgtttttacatttgtttctaaaatgagttacttttaaaaacaattctcttttgctttgtgaagaacttcttcagttatacatatgtaaactatgttatattaatgtcatactattatatacttatacaaatacattaatatatatcatatattacatatttatataaacatgtatgtgtatattgtatataaactatgtaataaatactagtaccaccaatggaatggtctacaagcttatgagtttataagttttaaaccatctgtcccctttcacagtagctcccaaacttcagtgttctgaagaacacctggcattctaattaaaaggtgtattcttgagtcctccccttaaaagattatgattcactgactctgaggtagagcccaggagtctacatattaagacactttcgggccgggtgtggtggttcatgcctgtaatcctggcactttgggaggccgaggcaggcggatcacctgaggtcaggagttcgagaccagcctggccaacgtggtgaaacccctgtctctactaaaaatacaaaaattagctgggcttggtggcacacacctgtaatctcagctactcgggagacaggagaatcgcttgaacctgggaggtagaggttgcagtgagcccagattgtgccactgtactccagcctgggtgacagagtcacactccgtctcaaaaaaaaaagacactttccttgtgatagtgattggctctgaggccatactttgagaaatagtaccttagagagactagtaataccggtacacagtaccctgactggctgatttttaatacgttttcagaagaccagtttgaaggtgacactatttatggtcatccatttttcttgatattttacagtgattttagaatttgaataactcattagaattatataggaattatacaactaaactttattgttagtagtcacttgtgttctgtttcagttgggctgtaaatggaactactagctcagctcagcaaaactaacaaagtatgttttgtttatttcttatatatatttgtaataacggaaggctcctaatccagttactgttttcaggcagtctgcagaactaaataaactacgccaggattatgctaggttggtgaatgagctgactgagaaaacaggaaagctacagcaagaggaagtccaaaagaagaatgctgagcaagcagctactcagttgaaggtgatatattctcacctttatttgtcatttcatgaataatataggcgtattagttcgttttcatactggtatgaagaactgcccgagactgggtaaatttttaaggaaagaggtttaattgactcacggttcaacatggctggggaggcctcaggaaacttacaatcatggcagaaggtgaagaagcagcaaagcatcttcttcacgaagcagcaggaaggagaaatgccgagcgagggggaagactcccttataaaaccattagatcttgtgagatctcactattacaagaacagcatgggggaaaccatgcctatgattcagttacctccacgtggtctctcccttgacacgtggagattatggggattacaattcgagatgaggtttgggtggggacacaatgcctaaccatatcagtaggtatttaatttgatgacttaaatgtgtatataggtttgaaaaatatagtttgaagcttaatgggacctgtagtctaaatgctatgccctgatgaaagaaaaagaagcatgtgccctattgaaagaattgaatataggcttgaatttgaagttaaagaccgtttgaagatatggtaaatgatgttagctgattgacagatataaattgtagaattttatcatatatatgggggttagggtctacagtatagggcagaaatcatgtagttaaaaattacccttaataccactttatcacccatagcttggatttttcagtaggtccagcagaacctagttttctttcagcactggaataggtagtttttcctttgcttcagcacaagactaagtagtgttccagtggcttgcactcgacccatgatgtacaaaaagtcacatactgtatctttagacgccagagtgtcacttggtccagtgagatgcttatactatgaagagatgcatggctttgctcaggctgactgagggaggagcagattcatttatctcattttatatgcattctgaagcatatgtacattgaatagaatgatgagtataattctctattcctgcttttattgaagaggaaatttgttgaaagtatagttcaatttgtgtaagttaaatgctacctcattataatagattcctacctaggtcattgatagaattgtactttgataccagttccagagtaggagttaaaaaggcttcaagagtaattgagtatggaaaatagtgtttttcttaagtcttgttgggagattgatataagtatcctttcttttatttaatattgatcttgctggtgggtttactactggcatagatacggaagtctgttctctgtggatatggataaataaatgacattaaagattatagtcatgattggagtgttgtgttataaaaatacctcaaaataagaatttttagctacttagatttagcaataaagacaccatcctgtcttcggaagcttatcagctaaaggaaggttagtgggaaacaggttattgctaagtggatcagatgtatatagtagtagctatcttgatagaaactcagcacaaatattgagtctgaaataatctccaaactgtaaaccctgtaatgttggaggataggatggctatggctgataaataaatggcttttagactgtgtgtatctgcttgtcttattgaaatgtaggagactagttgcaataagcagttttatgatacaacagtaaaggtagaggatgctttttttccctctttttcaaagtagaaattctgtgtttgtgctaatttatcctttctcccttttaaaataccaaggttcaactacaagaagctgagagaaggtgggaagaagttcagagctacatcaggaagagaacagcggaacatgaggcagcacagcaaggtaaggggaagaagtattcatgtaaactttgtatataattttgggtaaaatttcctctctcttccatctgtgaagaaagtataatttggcattttggttatagctcaataaaaatagcttttatactttcagaatatctttctttctttgacatttgttagggttttaaaataagttacctactagctttgcctgaagcattaaagttgcaggcaaaattatagtacatgataggttaatgggatcctggctgtgtgtgtttcttttctgtagttattctctttggttctttggttaattctttttttttttcccaagaaaatactcacttcttattttgaagagaaaaacagagcattaccatcccaggtagtttacttaaaactgcccatttaatacatgctaacgtttactcatttactcttaatttgatggatccatctgggagataatggagtacgtgttatgtgtattgtttatttctctactactccctttctcccatgaaacgcaagtatagcctgctacaggagcatgcaagaatggaagcaggagagattcaaagaaggttttctagaggagagaatgcctacacgaaagatgagtatgagtaactaggcaaagaaagagacctctgtaaaatgtaatgttttattacagatttacagagtaaatttgtggccaaagaaaatgaagtacagagtctgcatagtaagcttacagataccttggtatcaaaacaacagttggagcaaagactaatgcagttaatggaatcagagcagaaaagggtgaacaaagaagagtctctacaaatgcaggttcaggtattttttcttctttttttttttttaaaaaaatacaggtggtcacttattagatctgtgtgtctagaagagagactaaagtctaccttatcctaattctgaaatgatgatgaataattataactttgtcttttgagcacttgtcacaatatggtgtgtttgaaggtgtgctcacccacagtcttaggctctttgtgttagattaggaatagcacaaacatatctttaacttctgtcttataagctaactcagattgtctaatcattgtttaaaataatgccttttggaatctaagaatgccttaaaaaaaaaaaagaaaaagataaacaaatgtacctataatacattgtgttcatatacatggggttatttattagcatgctttttctctttttggttgctatttatgaaaggatattttggagcagaatgaggctttgaaagctcaaattcagcagttccattcccagatagcagcccaggtaatgatgctttcttattgcttatgattaataacttgcagccatttaaacactcacctgaatgtctgttgagtgccaattactggattaatagctgggagactagtcaatgaatcaacaaatgatgatcctgagtgctaaacacttgctaattatgtacggtgctgagggaaaacactaagaaagaaatccataccaactaattggatgaggggaaggttagagagcttttattatacaaaaatgtccccaatcctgtcacaaaacaaggagagagaattggccaaatcctatctagaatagtggcttatgtattacagatgttcattaaatatcagctagctctggaaaatcctaatatatcagcagggggaacagtatggtaaccatagatcacagattatatttgcaaaatgatcaattgaaaatttgtacctcagtttagtgactcagccttccaaagttttcaagtgatagtgtaagacctgttattctttgatgtgacatacatgtctttataaataatataaagaaaatcaaataaaaacaagtattgtgaattttgagcttcagtttttcaacttgaaaattctgagagttatttgtagcaaaaagtattggcttagaagtctgacatttctgtataaaaagtggtttttaacattaaaattttgtttttaaggttcggagaagttcagactcccaaagctttgaccatataaatatatttttcccagttgctttatctgtagaaattatagtctaaagtaattgaggaagaattaatgcaggaaagggtgctggtgtggatgtgtatgtatatgtgaattaccaactcagattgaattgtgatctttagttatcagctgagaagtagctctaaaaaatttatcaggagttaaatacatagagaatgctgtaagaatcttttaaatagtaaacatgaacatgggtattactaaactatattagtcatggaatggataattttattattaaaagttgttactaaggagaagaaacacaggatgacaaatggcctttctggctgtttttcctactcatttgttgcttgtcaattatttagtttccaggcctgtcaacttgttttattctaaatgtcttgtgatatgtaattcgtgactactggctgttggtgatcaaacttgctttcagaatgatagttactctttattgaacacttaccatgggccagatactttcataacaatttatatacattaacttctcttaaaatttaaagctgttatgattattgtatagctataaagctttctcttaaatacttttatgttgacactatttttctttcttagacctccgcttcagttctagcagaagaattacataaagtgtaagcctaccttttcacactcttataattgtgtagtcaccactaactgatacttgttagatgcgacacttatgattaactttatacctctgacgacctgttcagaaaatactctgaactagatttggagcaacttttgctttttttttttttttttcctttttcccattagtgagttgggtccctaaacattatatattctgcttttatttatgtttttattataacaagagttggggagactttcatttgagtgttagcaattatgtggaagaggtaattgtttagaaagtagtggaagtaaattagtttttgtgtcttataagtagttgtagttcttctgtgtccagctctgtggtagtatacccaaaacaaagttatatgctttttttgtgccgtataattttgcatggacactgatcacttgagttcggaagatctgaaatctggttttgacatagctagctttaacaaattaacctcttttatctcgagttttaaaacagggttatgtattttaaggagttatagtaatgtgtgtgacagttgttagtaaactgaaaggggctatagaaatggaaggtatatgagaactactgaagtaaggatgatgctttttaaggctttaaatccttttgatttgtgacttctgaatgtttattgaatgtacaaatgtctttccttctaaaggattgcagaaaaggataagcagataaaacagactgaagattctttagcaagtgaacgtgatcgtttaacaagtaaagaagaggaacttaaggtatagtaatttgtataaatggctgcaatattttacagaactgaaatttaaattactttgatgcacataatcagtaagtgtatatgaaaaatggaaaatagtctagaattcatttgaaataactgtttttctaaactacaaaattctctagctctctacgaggaaaaattcaaagggcttctctcatgtgatataatttacaataatttgataggaatatgctaaataacaggaattggtggtttctcttgattatttgggaaattttgtaagttgagacatttgcttaactcttttgtagaaaagatgctttacaaactttaaaatcagttgtattaagtattttaaatgctatttttccttgttctaggatatacagaatatgaatttcttattaaaagctgaagtgcagaaatttacaggccctggcaaatgagcaggtagatctttattgcttttgagcattgatctcagaatttcaatttgcgtattcttattttcattgatattgtgagccccaatttgattgtgtaagtaaaaaatataatggtttatcatctttggctgcatgatttgatgttactgtttttatgttgaaataaatgtttgatccagtgaattaatcacttcaagatatcacaggaggcagttaaaattatcttactatgctggtttgtttgagtcttttatttgagccatttaattcaaaaaggatatacctttttgttagtgtatatgaagaatggaaaatagtctagaataaaagaagtaaaaaatatcgaacagcaaaacatgttacagaaatatacagtattgctgtaacttcaaatatatggaaatacagctttttaatatgtaaaaattagtgaaaaaaatagttttgagcacttcctgtgaagtgatatcattttcttctcattccacacacaggctgctgctgcacatgaattggagaagatgcaacaaaggtgactaaagtattgtacatctagtcgttcatacatttatgtttaattataattgttgcagaaaatattgctgcttataactgatagttgtgcccataattcttgtagattttctgaatgtatgaagtattttaattttttttttcaccctcatagtgtttatgttaaagatgataaaataagattgctggaagagcaactacaacatgaaatttcaaacaaaatggaagaatttaaggtgtgtgattaagcttgtacactcaggtttcttagaacaaccttgtatacttttcagttgagtgattccagaaatactacgttttgtatgaagtcactctgaaacagtgtttctgtagtttattaggggacttatgcaaaccatgaattttatcatagactttccccctagattatctgttcttttagtggagcttggagatttatttttggcccccaatcttttctcagctgatagtttctatttgggactgtcttatttgtctccactgttgctgtagttctagtttctggtcatggccaaccaagtgctagggtgcatctctgtgtccagtgaaatttgaattatgtcagtgtataattcacctgtcactttgaggactgaaagctgagataaaggtttgattgttcaaaaacccattcaaatgattgctttattaccttttttcttaataaaacagtaaattgagactctttcttccagattctaaatgaccaaaacaaagcattaaaatcagaagttcagaagctacagactcttgtttctgaacaggtaaggcttttcctaaattacaaagtagaaatacttgttatataacaagatctggttcttcttatttaggtaccaaattactaattgagaaattttgcttaagcttagatatggctgttattgcctttctattcatcctgtatctaaattcaggaaattttttctccctgaggtgaagctaatgccaatctgctcaaaagcacattccagaaaaataaaaatgtgtaataggatgcataaaaataatttaagccattttgatacatttgactttcagaataaatgtcctgccttagacttggagcctcagctttttcttttagggagcatggtgtctttaaaggttgaaacttattactagcacttaaaagcagtgtgatgttgatcaaatagcttaacctttgtgacacctctcattccaagcctttcacatggagattatattatatttacaccataaagttgttagatttgaaaggagaagcttatgtatggtgcctagtctagtgctttgtttatgacaggtatctaaaccttaattcttttcccttagagtatttattttatccatctcatctccatcccctgccaccatcactattcattttatatttatagcaagacatcaaaactatatcagctttgaataagcatggttccataaattagagcccagtggtatctgttctctgcctattcctcagtgctgccttcgtactcttcttctacgcagctcttacaattacaatttattaataaaacacaaactcttgatgacacattagaataggaagtttgcgtttgttcctaatattaagtttttgaattgtacttttattggaagccgaaatgtaaagccattgcaaatgatagcacttctttagcaaatgcatgcgttctttcatttattttaaaattcacatttatgcagatattgagctggtgtaagtagctgtgcctctggaagtattttgttaacttgtcaagaaataatccatttattctacctccccgtatgatattaagtgcattattacatagtcttactacttactttgtatttgctttacccttgtaaactaaaggtaatagaggagacagtgctgaagggatgatatttagtttaaatggcatttaaggcttattcttttttttttttttcttcttgagacagagtcttcctctgttgcccaggctggagttcagtagcactatcttggctcactgtatcctccacctcccaggttaaagccattctcgtgcctcagtctcctgagtagctgggactacaggcatatgccaccatgctccgctgatttttgtatttttagcagagacggggttttgcaatattagccaggctggtcttgaactcctggccttaagtgatctgcctgcctcggcctcccaaagtgctgggattacagatgtgagccactgtgcccagctaaggcttatttttgtcttatttccttttctggtatagcttacaaaaaagatatgataccaattataagatttctctccccccaccctcccttaccatctctgaaataagaatgtatcttgtagtctctggttacagtttagttgtttagttggcaacatttttaatttttactgttaaatagcagtggtgagatataacattggtgacttggattagataaaatgtaatagatttttgtgtgtgtgttcttacttggaaaagcagagtatagtttctgtgtgttagttaccagagatttttgaaatgctgataaccagtgtatgaagttttaaactttaaaattaacttcatggaggtaaaacaaatgcttagaaacttctgaaactgtcctagaattcttatattctagtagtatccaggtgctggcgactcttatttaaacagaaaacttctgttctttgctaaaaatggtattttccatcattagataaaagtaaaaccaccagccttaaatttttcttttcctttaaaatcatgtaataccttgagaaatgccattgtaataccttatgtaaaattcccaatcatatttatgaaagttaatattattgctatcttattaagtcagccttttattataatgtttctacgtacttttagatgttttgttaaagtgacaacttttagtatgagatgtgcttttgttatgaagaataattcacaggataaaattttatagccacattttttgatttatttaaaagaattatttgataagggggaaactcattttgtgatactaatttaagatctgttgggtaattcttagaattgttcttctgactctgaaagctttttattaatagtctagaaagcatatgactgaggttttggttatagttgagacttctttcatcttggcagacaaagaatcatttctgtggcttttcctctagtcgtttttattgttgctgctagtgaaagaagagaaaagattggtataatcttaatttctgtcatttccacttttctttaacccctttctatcccacagtcagaattccaagtgacagttgagagattgaacagtttagttatgtaaaaatttcagtccttttaccccatggatttttattctggaggaaaagattgagcgtataaaagcagaaaccaataatggtgccaagttgttgtttcttcaggtgtaggaagcagaaagacaacaggtaccaagtaagttaacctgttgataccctaaaggagggaaggctgcatttggatttaggcttgcagatggtcagataatgcaaataaatcatttactaatatttcatttactcagaataagactttttttttttttttttttgctgtgggggagcacattttgacttttagtgaaggagcagcatgacattcttattccagtagatttttaagattcagtgatcaagattattaagtgaaaactataagaagtttcttctttttgccctactgccttgttaaattgtattgcagaatatattgtatatggtttagttttggaaatcatctaggggaggaaacagtaggattggattaaaccaataaagtatgaagtaaagtaaaaatgttggaggagatgcaaactaagctgagtcaggtttatgcaatagagtatttgatgagctgcagaccaagaatactttctaaactggaacttcattaaaaaaaattcatcaaatacttatttactagttgagtatatgctagttgcttacctacatgctgaggttgcagagatgaatgagacttgattcttgccctcctaatatggagatagatatgttaaacagaaagttatggtgaatgaagtttctgaactctatacaggtttagaggaagagataatgcattctattaatatttgaaggaggtggggaggtaacacagggaacaactaaacctcgttttgaaaaatgagcatgaatttgccaaagagctaagagacagttcaggctgagggaatacaatgttcaaagacatgacagtgtggcaagattggcatattcagagtattggtatattgcagaagtacaaaatacaggaaggatgtaaggagtagagaaagatttgctaagacctaattatgaagggctttgtatgctgtgtcaggaccatgaacctgatgcagcatgtgggtaagccactaaagagtgttgcaaggataaatgagcatttagcctaacattttagaaagaatactctggtaggtaggagtaactaaaggtacaatacagtaaatggttaaggtgcaggtaacttagacttaatagtgttatgtctttttgtgagatggcattcattgaaaatatagatggacaaaagccatcttcatgaatgatttaaaggcttaatgcatgatttgtttttcatagtataaacctgatttaatgtacttttgacaactcctatttcccttctcatgtttggattattttttcccattgggaagttttttcctgtgcctcctacaaaacaattcttatgaactagaagcagagagaagaattagggtattatgatatttgagatgagtaagctgagggccaaaacttaggcattaaagagaagggtttaatttcataaatatgtacagagtggaattttaggacttggatagggcagtggaaaaattaatatcatttgtaaaaaatgattgtaataagattgggaaaaacaaaaaaatgggaaaaaagtaagaaactagcaagattgggaaagaggtgcacagaagagaatgttctaggagaaagaccctaaatctttttggtcaggctgcttggctgtctgaagataagggaagataagggaatactgagggagaaatcccactttggacataagataaattttaacattggggacttgtgtgtgtaccagaggatgccaggagaagtttcaaaggggactcatcttacatgtcatgttctaatgctttataaatagaatgtattcctgttgcttttgcaatttacaatcagttttaaaacattttatatcttgatctggttggtagttacataatatctatctaccaaaattcactgagctgtgaacaggatttatgcacttgtctacgtaaatgttacaccttagtatagaaaaaaaatcaattaaaagagcccatgtttgtctgtctttctttctttcttcctttttttcctttctttccttcctttcctttccttttccttttccttttccttttcctttcctttcctttcctttcctttcctttcctttcctttcctttcctttcctttcctttcctttcctttcctttcctttccttctctctttctctctctttttctttctctttccttctcttttcttcttttctttctttttttttggacttgcgaggtcttagagtctggattctttgtatttgaagaattgaattaatgtaaaggaagtgaggcagattgtcttaaggttatcttttctagtgattaagatttttttcataagatactaattcattttgccagcccattttacactgctactttttctgtgtctcttgtgtagatgtatctctttgttttgtgttttctgaattttttaattatcaagtcttcagataagttattgtcctaaattttgtatctatttaataaccctaaacaattttcacaaaattacatttctcatctggttttacttcatgcaaatttggtaaagttaaactttttttggtgatttttattttagcctaataaggatgttgtggaacaaatggaaaaatggtaagagtttagttttctttttatattttgatgagttacttctaccaaattaactacattaattagagttttaaaattctctttaaactttgtaatggaagaaatgtagtatgctgttgatttgggattacattaccgtttgtgggtttcacgtgtggcagtaattttacttgttgaggctagcatataagaatgaattacttgagtacattttacttgtaaagaggaagtatcctcagaccatgatcaaagatccctagaagcctttctagaattaaaagtttataagaaatgatggacaaaagagttgatccatttaaaatgattagaaataatatcattaactgctgggcgtggtggctcacacctgtaatcccagcactttgggaggctgaggcgggtggatcacctgaggtcaggggtttgaaaccagcctggccaacatggcaaaccctgtctgtaccaaatgtacaaaattagccaggcatggtggtgcatgcctgtaatcccagctacttgggaggctgaggcaggagaatcacttgaacctgggaggcagaggttgcagtgagccgaaatcatgccattgcactccagcctgggcgacaagagtgaaactctgcctcaaaaaaaaaaaaaaaaaaaaaaaaaaagagccaggcatggtggctgatgctggtaatccccagcactttgggaggccaaggcgggtggatcatgaggtcaggagatcgagaccatcctggctaacatggtgaaaccccatctctactaaaaatacaaaaaattagccaggcgtggtggcgggcgcctgtagtcccagctactcgggagggtgaggcaggagaatggcatgaacccgggaggcggagcttgcagtgagctgagattgcaccactgcactccagcctgggcgacagagcgagtttctgtctcaaaaaaaaataataattataataataatatcattaactttgaaaaatagttaatacatgtgttacaaatttataatttcagcattcaagaaaaagatgagaagttaaagactgtggaagaattacttgaaactggacttattcaggtggcaactaaagaagaggagctgaatgtaaagcattttgtagttttgttttccttgtgattattcagtgacataaaaggatttctctgtaatttgtgtaaggtttttcccatagatcttaaacttaatagtacctctcacatttataaatttatataatgcttttttaattaaagtttttttagaagttaaaaatgcataacattgactgccttaatgaggtagatactattgttatagtttgtcagtttccccacttgcaccaaaattataaccaaatgataactagcagacttaattcatgaaatagtactggaggccagagaagagattgccattctattttatggttgtcattagctttacctaacttgattgggaaaaggttgcgggaagaagtaagttaaaagatgtatttgaatgtagggagaggagtagcttaactaacaagttgtatactgtatatttttgaggttgtccagacatgagtggaaatatatgtggatgtaattgaattaaaaatttgtttggatagctatagaagttacagaattatagacattacagaattatagacatggaaaaaagtgagagttttgggccttccagagtagaaaagaagcagctaaagaaatgagaaactaatgtattttgaagctagctatatttttcagagagtaaaatcatgttttgcttatgtgtctttgaaaaaggcaataagaacagaaaattcatctctgacaaaagaagttcaagacttaaaagctaagcaaaatgatcaggtaatgtaaatttttacaactgttctttgtctctgtgttttttgtttgtttgtttgttgtttttaaattaaaagaaacggggtcttgctcttttgcccaggctggagtgcagtggtacaatcataactcaccgtaacctcgaactcctgggctcaaccgataactcctccctcagtcttctaagtagctaagactgtaggctcatgccacaatgctcggcttttattttatttttttgtagagatagggtctcgacatgttgtccagactggtcacaaactcctggcctcaagtggtgctcccaccttagcttcctaaagtgttggaattataggcatgaggcactgtgcccagcccattctcttttaaacagtgggcaaactgttgcataaaaacaagtctgttgtttctcttcctccaggttggaatatgtcaattatagttttaatttatgaatgataatcagtaatagaggctgcaatttaatactgattgccaggtactgtgacaaatactccagatagggtgccattgcctcttactagagtgataaaaaggttctaagtatacaaatataaagtaagactctagtaaaagaggccgcctgaaattaggcagtttcttagttgtgttttctctatggttggaattattgattaaataattttaacatttatctaatgattttttcttttggcatatttataagtgaccttaaagctacctatgttcaaaatgctatttgttgtcattattatgacattaaaaaagtctcgaaagaatgcctgggcttttcccatttggattttgattgtattggaaaatctaaggataatgtgcatttctatttctgacccatttctattttgaacaaattactaagtaggatactttcctatttccaggtttcttttgcctctctagttgaagaacttaagaaagtgtaagtgataacattattataaactggtttttcttctttggtccattttttttttgtgtgtgcttagaaatctagttttattgtgcagttgggacagctgatgtatgtttaactttcactctataatttttcttaatggaataagagaacttagctgtgctttcccaaattcagtataattaaaaaaaaaaaaacaaaaaaaaactatttccagaggatgggagtcagtatagttgaatggaacttgattctcctctgtattcctcagggtacaaatcttatatttctgatgtacttctgaagcacttaactgacttcttgtgtgcataggcttcagctgtctgttaggaggagctttatgttcaccctggccattctacaaagacatgttgctattttatttaaaatgggaaagggttgatttggagagccatttcattatttggtgctatttttatatcttggtgggtcttggtgatttctaatcaaattatactgcatttctttattgaaggatccatgagaaagatggaaagatcaagtctgtagaagagcttctggaggcagaacttctcaaagttgctaacaaggagaaaactgttcaggtattgggagacagagaactgtgttttatgtttttgtttatcaactttagttaatatcatttaatttcgtgtgtttttgtctgtgcattgcattttatgtcaatttctgtgtttccattgtccaatcttgtctgttttgtcattgtcaaggatttgaaacaggaaataaaggctctaaaagaagaaataggaaatgtccagcttgaaaaggctcaacaggtaaaaatcccagagccatagcatgacagatttattagttgtgttatttatgagctatttgattttttttcttgttactcagaaaaaacttagtatgctgtaggtatattgggttatgtgcttttaattttattttttgcctgatttgagaaagtattcttgatattttaatctgtatatcttaaaaattttaactgttaatggttattttctagaacattttttgtgttaatgtttcattttagtttgccaattacaaatgaaacacgaaacagtttggcaatttttttaatccccctgcccccttctaaaagaaaactgcatggaccaaaatgttatttgaatatacattgctctatctctgccttagaacaaagtacaagtttcattgggatttcagacatagatgtgattactggaaattgatgagttttgctgattttaatctgataaggctttcttgaaaaaatagtgagatttcattgaagagatgattcattcatctcatagattcattcagcaatatttattgtcaaagcagtacttgtcaaagcactgtactcgtgattggtggatcactagctagtgattggagataatgtgttgaatgaaacaggtaggatgaaaagatcatacttttctaatatagattgagagttcaggaaagtcttctcctgaggaactgacatctaagccaagaatctgaagggcctgtgagaagagagtggaggataaaaggtattatcagactgtgtatgattaagaaaaaattaaaaaaggacatcatagagtactgttgagtagttggccttgaaaactgggatggagaagagctctgatacagtagggaggtgtgtggagagttaatattctaattttcagtactgtagaagtatgactggtctgagtgcagtggtgtttacaactgattgatcacaaccagttacagatttctttattccttctccatcccactgcttcacttgactagcctaaagaaaaaaagcatcacattagttagacttattattcataactattttccttgtccctcccccttattatttttagtttattaattttcctgttattggagtcaagaggaggtaaactcaaaacacatctcattttgtcatgaaaaattcagctagtttctttgtaatttgaagtgtacacattataaagacttataaagcttaataagttaaattgaaaggattattaattgatttttctgtcctttgtatttcagttatctatcacttccaaagttcaggagcttcagaacttgtaagtaccatttatctcatttccttttactatttctttttcatgagttaaatagaagtataatgaaaattatagcttcttgatttcaagtggtgttttagaaaatacgaaaatactgattatctcaaaactcctaagggccctaagtttcttatttggctttaacctattaagtttttttgtgggaaggaggtaggaagtcttttcatgatttataatctgaatataacctcaaattgagatgttgctctttgcctattttaatagccatgtgaaattggtatcttccacatccagatcaattgtagtaagttttccaaatttgtttgtattgacttaaacaaggtgatacagggtagaggtacagctaaactaacttactcatgtctggatattcagtgatagaatggttttccttaatcatcctatgcttcctgatttgattgtctccaaaatcttaaatgcctttttttttttttttttttttttgagatggaatctcgctctgtcgcccaggctggagtgcagtggcatgatctcggctcactgcaacctccacctcccgggttcaagtgattgtcttgcctcagcctcccgagtagctgggactacaggcgcgtaccaccacgcccggctaatttttttgtatttttagtagagacggggtttcaccgtgttagccaggatggtcttgatctcctgaccttgtgatccgcccgccttggcctcccaaagtgttgggattacaggcgtgagccactgcgcctggccttgtatgcctttatacttgataagttttagtttagttcaatcagctggtctgtgagtactacccaaaatatacttttttcagtgtctaagatttttgctttttatggtcatgtaacattttcatttagagttctgattaatttattatcagattaaaaggaaaagaggaacagatgaataccatgaaggctgttttggaagagaaagagaaagacctagccaatacagggaagtggttacaggtgagaaattaaaaacaataaaaaatagcctttttatacttgactatcaatttaatttacacctattctttttaaggatcttcaagaagaaaatgaatctttaaaagcacatgttcaggaagtagcacaacataacttgaaagaggtatagtataaacaaattaccaacatgttacataaggaatgataaatctttgtttaaggcattagaaagtaaagatgttaatatgttctgagtttctttgccagaaaaattatgttgtaccatagttttgttgttgtttaaataagttagcttttatttctggcaagtcatacttaactgcttaatctgtcaacctgagcctacaagcatttccttatctctaccttttcaaatagactcttagttcatccttaactatctgtttaaagtattagtctttaatcttttaataagtatgaaaaattgtttaataaaactcattctgtccttgctttataaatgacccaatcttaaatttactgcatataattatgtttttgtttttattggtgggtgattccatatatatgttttagcacctacaacataacatttaatgctaacagcattaaaaatatgattctgtttctcaggcctcttctgcatcacagtttgaagaacttgagattgtgtaagtatgctttaagaccacattttgaagagaaacaaacgtctcattattttccagggtgtgcttgaatataatgatgagtttcctgtacatcattaactttattgttaagtggaaattataattccagacgcaaataggctaagtctctgttgggtaaaataaaggttatttaaatgctttcagatacctggagactttatcctttccaaatccatcaaacccattttttcaattattctttctgcaaatataggctggttttaagttattttttaaaacaaaatatgcaattattatagagattaaacttatttcaaatgaaaattagtatttgaattagatgttagtaacatctctgaattaaccaaaagataatcttagccataatcttgataatgaattttaaacctttctgtaattttaatttatttatagggaaaatggaacttgtcatattatcctgtgctgaataggaaaactgaatctagtcagcataagaggtgtcagtttctgtagatattaatcttagaaaatgttttattctagagagtctgttgtcttaaggtacagcaggttacaatggtgggaaagggtatctggacctgatctttttggccccctttaaaattgcttttaacaaatttttcttggtgataccattactctttattgatatttgttttaaagaagtgccccgttttaaactgtcaagatattgaggatatttattaggttattatctttctaaaagggagattactctgttcttggaagattactcatttgtacaattattgtttgtcttttggctatggtgtaactgtcgaggtgcttatctcttatttgcttggaaagcttagggcctcatttctggcctgtttatagtagagatatgtagaccattaaagtaggtaattttaggtatatttctgccttacattttttttttttttgccattttcttttttaaattaatagattttattttttgtggtggagaactttttatatttataggaaaaagagaaataccaattctccctattaacatcttgcattagcatggtacatttgttacaagtgatgagccaatagcagtacattgttatcgttgttattaactgaagttcatagtttccattaggaaactatgtgggttttaacatgtataatgacatgtatctatcattacagtatcatacaaaacagttttactgccttaaaaatctcctgtgttctacctgtgtatccctccctcccttcctccacatcccggcagcaccccccggcaaccaatgatcttactgtcttcagagttttaccttttccagaatatcgtagttgaaatcatacagtatatggcttttctggtttggctcttttcttttctttttttttgggacagagtctttctctgtggcccaggctggagtacatggagtgcagggctgtgatcatggctcactgcagccaggacatcctgggctcaagcgatcctcccacctcagcctttcgagtagctgggactacaggcacatgccaccatgcctggctaattttttagaaacagagtctccctgtgttgcccaggctggtcttgatctcctgggcttgagtgatcctcccaccttggcctcccaaaatgctgggattacaggcatgagccaccatgctcacccttggattgccttcttttacttagcaatatgcatttgagtttttccctttttatacatttatctcactcttcatgtatgctgttttgtcatttttttcatatagatttataagcatcttgaaattctggatcaaggtgtggtaaaaataagtgttcagctcaacgaatacttgagactctattatgtgctttctggcattggggataccgaaatggataagatttcctatcctgaggaaacagttaaacacatcattttgatggtggtgttatgctagcggtctattgcttaggatgaccagggcaattgagattcacttgggctagatagagtaagatttacgtcagcattgggtaagggaaaaacagattaaattatccatagcatctcttcagtacaaaggttagacatattttgtaatttccagggtcaacaaattatgactaagattcttgggggcaaaactccttgcttttgaagtggtaatttttgcaacaatttgataaaatatagttttgttcttagtttttgttttagagtttcttcctagataaagccacatttgcttaagaaatgttaagtatgactgagtagaatgatcctagaaatatctttttaaacaaacttctaagttggtataatatgggggaaaaaaagctggtatgtattgtttctgccatcttttttcttaggggtgatattggagtctggttttccttttttatgtactttagttaatgcagatctttgtaaaaaattctaggttgaaagaaaaggaaaatgaattgaagaggttagaagccatgctaaaagagagggagagtgatctttctagcaaaacacagctgttacaggtgaatatggtgacttaaaattaattattttgtaaattattgtctttgcatgctttaaaataatttttaactgctgccaaaaaatagagtacagaatgagtctccctcccacccagatactaggtgtcattattggcatgttttttgagtaagtacccatgcataaaatgtgtgtatgtatgtatacttgtttattaaatactctgttgaactatactaacttgtatattttgctttcttcacaattaacagtgttttcaagatctttccatataaagcacatttctgccttaacttttaatagttttatgatattggatggttatatcatttattttatttttatttttgagacagagtcttgctgtgttgctcaggctggagtacagtggcgtgatctcggctcgctgcaacctcctcctcctgggttcaagccattctccttgccttagcctctagagtagctgggactacaggcatgcaccactatgcccagctaatttttgtattttttagtagagatggggtttcagcatgttggccagactggtctcgaactcctgacctcaggtgatcctcccacctcggcctcccaaagtgctgagattataggtgtgagccaccgcagccagcatatatcatttatataaccaattccagttgatggatacctagattatttagggctgttttttctgcacaaacagtgcagcagtgaatatccttgcacatgttttgaatacttttactagtgttatctgtatcctagaagtgaaattctggatcaaggcttatgtagcttttttgtttgttaaaagagatagttaaatagaaaatcaatatcttaccttcatgcagttagtattcaacttacttacagaagattgatttgaagtcatagcaaatgtgtagatgcctacattgtcttggattaatcttgctcacattacatgcttcaaggtttgagtctaccacattccttctccctctcatgtaggttcattttaaattttgttagacaatgctagatagacctgcaaaagtgttttcactaattgacactctcaccaactaagggccatttcaccttcttcctttccaacattgacaaggataaaaatttttgatattatacttgaaagatggtaagattatttttaatttgcatttgactgcgagagaagttaagcatttttcgtatgttcaagccatttttatatgaattgtcctttaatttttcccacactttttccactgagttgacgttttttttttttttactaatttgtaagatcctttttatgtaataagggaaattaaataaccttttgttattatatgaggtgatttattttccccattttttcttctgacttcatttgtgtttttcccctttttgggaaatttgaaacttttatgtactcaaatataagtaatttctagagttttaagtctctggaagaaaggtatctctctacgatcataaaaatgtattcggctgggtgtggtagttcacagtagtaatcccagcactttgggaggctgagacaggtggatctcttgaggtcaggggttcgagaccaaacatggccaacgtggtgaaaccccgactctactaaaaaaatacaaaaattagccgggcatggtggcaggtgcctgtagtcccagatactcgggaagctgagacaggagaatcacttgaacccgggaggcagaggctgcagtgagttaagatcacaccactgcactccagcctgggtaacacagcaagactgccatctttaaaaaaaaaaaattacattttcttctaatgtgtttataattctttttgtttgtttgtttgtttagcttatttagtgtaacttatttcagtaagctgtaacaataacattgtaaccattaaaaagagaaggctagccacattattaaataatccatcataacagtagtaattccgttccccagggggacatttgtcaatatctgaagacatttttggttgtcacagctggggcaggcgggctggggcatctagtggatgggtgccatggatgcttctaaatgtccagcagtgcataggataaaacccccacaacaaagaaaaatatgaaacccaaaatgttactagagttgaggttgatttgaaatgtcacttcatactaaattcttagagctatttcggtatatttctggattctattttgttccattgagacatgcaaactccgcagctagtactaatataaatactctaatttcatcatatgttttaataaagagcttattacaccctttaaaattattgctattttggaatttttctagcttgtatgatctgtttctagcttgtatgatctaagtttatgtggaaaaaatctgtttagatactgatgtttaatttttatttaattaggatgtacaagatgaaaacaaattgtttaagtcccaaattgagcagcttaaacaacaaaactaccaacaggtaggtattattagatgtcttgcctttcacttacgtggcaaaaaaattatataaccagtgacatatgagtatttttgccatttctgcattttcattgagaatgaagtatgttttatttatgtttatcaaattttatataaaagaaagcaacttgctatgtcatatccaaagtaaaacaaatctataaagtatacacaaataatattattgccggtattccagctctgttttgtattcatgtgtgttttctgatcctagaattcttagcaagtcagtttaaatactgtagaggttgggttaaagatatgtgtacacactcttatctcccctcttcccaaatgaaacattagtaactggagagaaactaacaaatgtatcataagcaatagtctactactatttaaaagaggttttcaagttataattctgcttggtaaatcaaaagtgtgtttttataaaagatgctacccaaaatagcctgtaaattaatttatgcatgtatatggatagacttgatagtattttgagaaacaaatgaattggagtccttgcaaacaagaagcttgagagattattgtcaccaaggaataaataccatatatgaagggctgtgtacctttgcatgttgatgtataaataactttgttaaacgtgaggaaacataacttgtcctagttttgcttttgatttctgttttttttttttttttttaacttggaagcttaacagttttatgtagtcaaatttgaattgtgcagtttgaaaatgtaaggtgtgcttccatgcacatagtgggaaattgataaatacttattaaatgaagagttcaagtacgttgcgacagtagagattggatttagcattccatacattttacagatttgtacatgtttttattaaaatcacttgattaaagtcagggttactggcatatgaaatatatactatttttacttttgttgttttcttaatttatatttgagaaaagcttcaatgtttttaagtctcctgaaaagttttgttctgaaataacatttaactcttttgataggcatcttcttttccccctcatgaagaattattaaaagtgtaagtaataagtttgagtcacagtttataaagtcgtaactatttttatgtggtaaaccattctcaaataagcaatttagtgtaactgcaaatggcacctgatttttacagttctatttggatatcttgaattgcagtttagagttgagtagtacctttggctaagatgctttttttatggtatttggatttgaatattttgttgagggagatgtttgtttttgtttttttaggcattcagaaaacatcaaatcaagttaaactatactttgcagggttttctaaatcaccttctattatgtcagttatcttactgggtcttctttcttctagatgtgattgtgtaattgaatgatgcaaattttgtcttagcttcatttttta

SEQ ID NO: 1058 - DNA, 1149 bp, Homo sapiens
ttatgaggcacttgagagtgtggttaagatcctgagctctggagtcagacttcccaaattccagtctggactctgccacttgcagctttgtggccttagataagttacttagcttcagtgactcagttttcccatggctaaaatgggaatgatcaagttttgagaattaaatgctagtgcatgttaggtgctataaatagcatataataactgctgaaaagtgtaaactattattgtaattattagtaagaaaatgtttaattattaattttttatcattgacctttaaatatacttgcttcagttatattttaaactttaaattattaacaatttgggccccatgctgtgtagcaggaggaactactgttataccacttaaatttttttcctagcttctttcttccaccagtctcaactttcattaataatagtttttctgtttgtcagatacttgtaatatttaacatcttttctgtgattataattttcatgttttagttttaattttatagtttaatggtgggtccagatctcaatgttagtacttttgtcatagcttctttattcatctcttggttagctgaagttgtttttcctgggattttgtcaaaaaattttcgaaattttggcaagttaacatgcttttcttgtatttgtactcaaataatagtttggtggggtataacattccagaatttcatttttttttccttgaaacattttatgcatttgttgtttcactgttctctttattcatattgctggtagaggtctgacgccagcctgcattttgcacccttttcatgtatttttgttaaactgcactctcacaataaaacattctttgaataatcaatcacgtgtttattatttactggatttttttcagtgtctgacctactctacacacatcaagggattcaatttctttggcattcagtaattgtactataatatggcttgacattgactgctctgttaaacttcccttggacacagtatgccttttcagtcattagattcaagttagcttttattactgggaagttatatataatgttcttgaaataagtaaaataatggagatcagttaaatacatatgggctctccactgcctaccttcgttgtcttttcatatctttaac

SEQ ID NO: 1059 - DNA, 574 bp, Homo sapiens
tggacttcgaagccactggtttaagctgggcatagtgggactgtgcccatatagttctgtgcctatagtcccagctacttggcaggtggcaggctgaagcaagaggattgtttgaggccaggagcttgaggccacagtgtgctatgatagcaccaaggaatcgccactgcacttcagcctgggcaacatagcaagaccttggtcccagctccctagtacccagaatgtttataacgactatgactgtcattcatgtggccacagccccattcactcagggcccagctctggggctcctcctaacccccaccctaaggtcatagatgaaatggatgggagactacatactcaaaagttctaagctggggagtgtgggaagctgaatgggaatggaagctgactcacacttccagattccttcttcagcctcaggagaggctcattttcccactgatttcaggacccatttccagaggaagccaaaccctggattacttccctccttgctgctccacctctattccaccagctcacctctacaagaggaggacctagggccagtccctggagaaaa

SEQ ID NO: 1060 - DNA, 254 bp, Homo sapiens
aggcgggcggatcacaaggtcaggagcttgagaccatcctggctgacacggtgaaaccccatctctactaaaaatacaaaaaattagccgggtatggtggcgggtgcctgtagtcccagctactcgggaggctgaggcaggagaatggcgtgaatccgggaggcggtgcttgcagtgagccaagatcgcgccactgcactccagcctaggcgacagagcaagactccgtctcaaaaaaaaaaaaaaaaaagaaa

SEQ ID NO: 1061 - DNA, 524 bp, Homo sapiens
ctcatgtataagctgtaaggagatattagtagtaaaataataaaaatattttccttggaagaactgtgggcagaccatatcaaaacagcaatttctggttttggaatgaaagatactattgattctattaatccaaatgccaacagttctctggttgagtaagaatgtgctccctaagagaaaactcacttggcatcatgtaagagctgctcattatgaatagaaagaaattacataatccaaagtgaaagcaagtcattctgcttttaattacagtgtataaaaattaaaacatgggccgagggtctagttggatatacttcttggcaacagacattttggaagcctgcaatgaaaaatacaacaaagatggctatgtgctggccgccccccagtgtcttggtggtttcccgtttagtgactgtattcagttattgtgaaatcacagaattttaaagcaggaaaaagacctcagaagtctcttcttacccattcgtcctccagatgagaaaataagcccacag

SEQ ID NO: 1062 - DNA, 3768 bp, Homo sapiens
agatcccaagatctccaaggatttggtggcatacccactccagcacacagaagcatgaggttcatgactctcctcttcctgacagctctggcaggagccctggtctgtgcctgtgagtatggctcttccccgacacccaaccatatagtcccctgaagactgggccctgccttcatttccccttcccctcctcgccagaggcagttcacccaagtctgtctctgtagcccactcctgcctcccactaggttctccacacagggactctatggtcagaggaagccaggagccctgtggccccagcctggctctccattgcctctcctctcagtctgtgattggcccactctgctccaaccactctggcattctttttcccctcaatgaaccaagccatttcccactgccaagacttttgcacatcctcttgtcttttcccctgcccattatttcacccacccacgtcaacctccttcctactcaatttccaagtgtccgccctgctagctctctgtgtccatgtatttcctcacagcaggcttgctgaagccccagaatcattttggcccctattttgcattttcttgcctcctgtatttttccttcctagcactatcacaaatgtaattaaataattgtttatgtaattatgttaattcctccaaatcccccattgactgtcagcttccccgagcaattacactgtctgtcttcctcacagctgtatctctagcctctaacaccatgtctggtgcataatgcgtgcttcattcatgcttttggaagaataaagaaatggagggaaggtccttctgaggtcattctatcaggtgacaatcagaacaactcctgccctgtcactagagcaggtgctgtggtcatgccctcgtggtcatgccccttcaactttcattatgaaacttggacatctaagacatagaagagagtcagagaatgattccatttccatagggatgttctgagtagcctaggtctagggaggatacagagagagggatttggttgagataccaaaaagcatttctagtgggccccttgtgaagcagagatttctctcctgtctgtccactgccacactcctgagattagaggcctgggaattctaggcagccctggctggatacagctcatgcaactgtgccctacttgacatgtcactgttccctcctttgcagatgatccagaggccgcctctgccccaggatcggggaaccgtgagtcctttctcttcctcctgccccagtcctgggtgggagggttaatgacttgggatatgagtggaggaagtcagagaagcagaaggggggtccggggaaggagagttgggaggccgacttttaggagacatggagaagggagacttcctgagagactcatgcactggagaaggacagagcatgggggaaagggtggccctgtctggaagtagaagtggagtaagaaaaatgggaaagaaaagaatacttttcttgagcaagaggaggaacttcacattagatgggttcagaggttttcatctgccccaccttcaccaacaatttcaattcaaaaacctttcacgtggtttcccatttctcatcacgaaactctcacctcctagcctgacattcagggtatccatgatctagatccagggtacttttcaaatataatttccctagactccactgcttgcattctccacatcaaacgttatacatttgtttcatcagacagcatgagtaactttctactacccaacgttcctcttcctgggtaccttttcaacccctacctgtccgtgctctaacaagcttcaagtcccagctgctctctgaagccctccctgcctggtgtgtatggtgcctctgtcccagtctctcctttcatccctccctcttctgggcttcccatatatagcagttttgtctcttttcctagactgtaagcccctgagagagagatctaattctcattcatttctacttccccagccatgtacacactctggataattaacggcagaaagataaactgtatttctgcacatcttcactgcactgcgagccccaaccacagcacacacctgcaccctccctgccttctcacataaagcccagagggaacaccgggcaccttggtgtcttctcagatgcccctggagcgtttcacaccaatgcaataacagaagttttgattttccagataaacaaatggattgtttacagctacagaagcccccttcagagactgccaaatttctgtcctcatccaccaacctgcctagaagagagaagctagtgccctctgcaaaacctccccacactagggggctggtataagggatgaaaactagggggagtctctttaaggtgatctttctgccaaaatgactttacttttccctgaaccataatctactctagaaaagggccctggaggagcaggaaaagtcttggaggcagcaggaaaaagcttgagggatgctaaagaacctaacacatcatgaaagtcaagctctagaggaattgggagagagggagctatcctcaagccagaccttgagggggtaaaagcaccacctgctccccgaccagggtggaaagagtgaaatagctattattcctctcactcccttacccttgcagcttgccatgaagcatcagcagctcaaaaggaaaatgcaggtgaagacccagggttagccagacaggcaccaaagccaaggaagcagagatccagccttctgggtaagcctctttcccaatgcctggtatagaattctgatgcatgaaacagcaagatatctgggggccagtctgccctcacaggcacaagcacagggacacagctacacccatattcctagggagggcttggggtgcacacctgcttctacatacagggtttctgggccataggttttgcagctaatactggcctaccaaccttcccatgacagagaagttggttccttcagcaaaaccacttcaccttaggggtgcccatggtgcctaggaagcgggggagctctcctacaaaggaagtagtttttctgcttctatgacctcttcttttctgaatccaccctagaaaaaggcctagacggagcaaaaaaagctgtggggggactcggaaaactaggaaaagatgcagtcgaagatctagaaagcgtgggtaaaggtgagtatatgtccccactcctccctcaggaccagcctcagtctccaccccttgcatgagatctgaaactgccacagcccccccattgaagacccctcactttgtgctttcaaatgtctccaattcctcatccagatttaaattgccattcttgtctgatattgatacttcctggggtctaacttgcttttttttttattgctcttgccccctgcccctgccaaggtggggaagagaggttggtctttggggctcctgtgaatctaacctccatccctctgacttctgtgtaagcacctccaggcctcccttccccttccccttcccctacctctccttccccaattccctggctctctttcccttccttttttcttcctacccctttaccccatttttttctgtggctgtcctaggagccgtccatgacgttaaagacgtccttgactcagtactatagctgtaaggagaagctgagaaatgatacccaggagcagcaggctttacgtcttcagcctaaaacctaaaaaaaaaaaaaaaaaaaaaaatttaaaacagctattaaactgaaagcatctgtaatac

SEQ ID NO: 1063 - DNA, 332 bp, Homo sapiens
caactcctcatccagatttaatattgctcattctgtctgatattgatacttcctggggtctaacttgcttttttttttattgctcttgccccctgcccctgccaaggtggggaagagaggttggtctttggggctcctgtgaatctaacctccatccctctgacttctgtgtaagcacctccaggcctcccttccccttccccttcccctacctctccttccccaattccctggctctctttcccttccttttttcttcctacccctttaccccatttttttctgtggctgtcctaggagccgtccatgacgttaaagacgtccttgactca

SEQ ID NO: 1064 - DNA, 3770 bp, Homo sapiens
agatcccaagatctccaaggatttggtggcatacccactccagcacacagaagcatgaggttcatgactctcctcttcctgacagctctggcaggagccctggtctgtgcctgtgagtatggctcttccccgacacccaaccatatagtcccctgaagactgggccctgccttcatttccccttcccctcctcgccagaggcagttcacccaagtctgtctctgtagcccactcctgcctcccactaggttctccacacagggactctatggtcagaggaagccaggagccctgtggccccagcctggctctccattgcctctcctctcagtctgtgattggcccactctgctccaaccactctggcattctttttcccctcaatgaaccaagccatttcccactgccaagacttttgcacatcctcttgtcttttcccctgcccattatttcacccacccacgtcaacctccttcctactcaatttccaagtgtccgccctgctagctctctgtgtccatgtatttcctcacagcaggcttgctgaagccccagaatcattttggcccctattttgcattttcttgcctcctgtatttttccttcctagcactatcacaaatgtaattaaataattgtttatgtaattatgttaattcctccaaatcccccattgactgtcagcttccccgagcaattacactgtctgtcttcctcacagctgtatctctagcctctaacaccatgtctggtgcataatgcgtgcttcattcatgcttttggaagaataaagaaatggagggaaggtccttctgaggtcattctatcaggtgacaatcagaacaactcctgccctgtcactagagcaggtgctgtggtcatgccctcgtggtcatgccccttcaactttcattatgaaacttggacatctaagacatagaagagagtcagagaatgattccatttccatagggatgttctgagtagcctaggtctagggaggataacagagagagggatttggttgagataccaaaaagcatttctagtgggccccttgtgaagcagagatttctctcctgtctgtccactgccacactcctgagattagaggcctgggaattctaggcagccctggctggatacagctcatgcaactgtgccctacttgacatggtcactgttccctcctttgcagatgatccagaggccgcctctgccccaggatcggggaaccgtgagtcctttctcttcctcctgccccagtcctgggtgggagggttaatgacttgggatatgagtggaggaagtcagagaagcagaaggggggtccggggaaggagagttgggaggccgacttttaggagacatggagaagggagacttcctgagagactcatgcactggagaaggacagagcatgggggaaagggtggccctgtctggaagtagaagtggagtaagaaaaatgggaaagaaaagaatacttttcttgagcaagaggaggaacttcacattagatgggttcagaggttttcatctgccccaccttcaccaacaatttcaattcaaaaacctttcacgtggtttcccatttctcatcacgaaactctcacctcctagcctgacattcagggtatccatgatctagatccagggtacttttcaaatataatttccctagactccactgcttgcattctccacatcaaacgttatacatttgtttcatcagacagcatgagtaactttctactacccaacgttcctcttcctgggtaccttttcaacccctacctgtccgtgctctaacaagcttcaagtcccagctgctctctgaagccctccctgcctggtgtgtatggtgcctctgtcccagtctctcctttcatccctccctcttctgggcttcccatatatagcagttttgtctcttttcctagactgtaagcccctgagagagagatctaattctcattcatttctacttccccagccatgtacacactctggataattaacggcagaaagataaactgtatttctgcacatcttcactgcactgcgagccccaaccacagcacacacctgcaccctccctgccttctcacataaagcccagagggaacaccgggcaccttggtgtcttctcagatgcccctggagcgtttcacaccaatgcaataacagaagttttgattttccagataaacaaatggattgtttacagctacagaagcccccttcagagactgccaaatttctgtcctcatccaccaacctgcctagaagagagaagctagtgccctctgcaaaacctccccacactagggggctggtataagggatgaaaactagggggagtctctttaaggtgatctttctgccaaaatgactttacttttccctgaaccataatctactctagaaaagggccctggaggagcaggaaaagtcttggaggcagcaggaaaaagcttgagggatgctaaagaacctaacacatcatgaaagtcaagctctagaggaattgggagagagggagctatcctcaagccagaccttgagggggtaaaagcaccacctgctccccgaccagggtggaaagagtgaaatagctattattcctctcactcccttacccttgcagcttgccatgaagcatcagcagctcaaaaggaaaatgcaggtgaagacccagggttagccagacaggcaccaaagccaaggaagcagagatccagccttctgggtaagcctctttcccaatgcctggtatagaattctgatgcatgaaacagcaagatatctgggggccagtctgccctcacaggcacaagcacagggacacagctacacccatattcctagggagggcttggggtgcacacctgcttctacatacagggtttctgggccataggttttgcagctaatactggcctaccaaccttcccatgacagagaagttggttccttcagcaaaaccacttcaccttaggggtgcccatggtgcctaggaagcgggggagctctcctacaaaggaagtagtttttctgcttctatgacctcttcttttctgaatccaccctagaaaaaggcctagacggagcaaaaaaagctgtggggggactcggaaaactaggaaaagatgcagtcgaagatctagaaagcgtgggtaaaggtgagtatatgtccccactcctccctcaggaccagcctcagtctccaccccttgcatgagatctgaaactgccacagcccccccattgaagacccctcactttgtgctttcaaatgtctccaattcctcatccagatttaaattgccattcttgtctgatattgatacttcctggggtctaacttgcttttttttttattgctcttgccccctgcccctgccaaggtggggaagagaggttggtctttggggctcctgtgaatctaacctccatccctctgacttctgtgtaagcacctccaggcctcccttccccttccccttcccctacctctccttccccaattccctggctctctttcccttccttttttcttcctacccctttaccccatttttttctgtggctgtcctaggagccgtccatgacgttaaagacgtccttgactcagtactatagctgtaaggagaagctgagaaatgatacccaggagcagcaggctttacgtcttcagcctaaaacctaaaaaaaaaaaaaaaaaaaaaaatttaaaacagctattaaactgaaagcatctgtaatac

SEQ ID NO: 1065 - DNA, 384 bp, Homo sapiens
ggagcaccttcacttattcaagaggagaccgtacacctggcagatagcagatctggacaaatggcccaaagcacaacttgctgttataggttagaacacctgtttttcttaggaaggaaaaggtctcgtttatttagcgcaaaacaggaaagaaacaaagattattgggagcacttcgtgtgttgatacagttgtctgaaccatgggagagcagcagcggtggctccaccgtgtgctgcctaccaagccgtggtccaaggcttcgtgtgtcagctcgttaaaaccccaaatggcccttgggaaagctgtgccatgcatcacaccttcacgtcctgtcctgtgggcagtgatgccgggtagggaggtgagctgaatgcacagtaa

SEQ ID NO: 1066 - DNA, 155 bp, Homo sapiens
ggccgggcgcggtggctcacgcctgtaatcccagctctcagggaggcaagaggcgggaggatagcttgagcccaggacttcgagacctgcctgggcaatatagcgagacccggttctccagaaaaaggaaaaaaaaaaaagaaagacaaaaaaaa

SEQ ID NO: 1067 - DNA, 2931 bp, Homo sapiens
ctccaaaaataaaccttggatttgtgtgctggggagaaatgagtatagataacatttaaaacgttttcctaaaccttagtattcatatggtagctgatggttcctctccccttcattactgttgcctgacgacggtccttgctgatgctgtgaactaacaaagttgtctttttgtttttaagggaacccaccctggcgtctggacagcaggttaggtttgggtggttttgagctagcactgctgtggggcaggggtggccgctccctggtgaagctaatgctgtggaagctggaatgttccttcctaaggagtgggatcatgcccctaccccagcagaggtatctcatcactcgctcatgtgcgagattctaaataaattttgttcttgggcatcttctactaggcctcctataaaatagatcttgctgtttttggtttgtgttaatggaacctcactttctagagataattctttagttttttatttaggaagttttcaaaatatacaaagcaggaatgtaaggaacccgcatcacctcaaattcagtgttacccacacttgaccatgcttgccccagctgtgccttttttctttccttgggtattttgttgctaaagtattttattattactgttttagagacagggcctcactcctgtcacccaggctggagtatggtggcacagtcacatctcactgcagcctcaacctcctgggctcaagccatccccccaccccagcctcctgagtagctgggactacaggcacacatcactgcgcccagctaatttttaaaaaatttttgtggagacaggttctcttcatgttgcccaggatggtcttgaattcctgggctccagcagtcctcctgtctcagcctcccaaagtgccagaattgcaggcatgagcctgggtgctagagcgaggccctgtctcaaaaaaaaaaaaaaaaaaaatcaatcaaggctttcttccgagttactgctcacagccctcttacccctttctcttgtgagtgggttgtaatgtccacccagaggggatttagacacggaagggaaggcaagcgtgggcaccatggctttagaaccataaggaagacatttccctctacagattctgtctttccacttgtaacagttaatgaggcactgacgttgctcttttccaccttaacaagacagtttacagtggttaaatagcaaaactccaggagcaattcagcctgaggccatagtgccctgcagcagcattgggctctgcttttgtttctgctttgtgctttgtggctcttcttcaagccagtgttgggtagtgcacagcctgagaggtgtggcctgataaaccctgaaattgaaagaagtatgcagatttgactcagcactcctggaagtgtctggatacagctcactgagagtgtggaggtgaaagtgcctgcaaaatattaacagttctctctcaatctattgatctcctcagttacatccagaaccttaaagccgcacagttgtcatcctccgcccgcagtctcaggcagggcgcatcaggggctgcactggtagctcccaggaggacttacccatgggtcaccgtcatagccaggtgtgtctactcagaggggacgcaatcctgcagcagtccccgtcaatgagaggccaccagcagacagtgcctgttggacccatgaagtccaccactaattatatactctgctttaggtagaatatttttattagctgtcaaactgtttttgtatttaagtttccaaaagtccaggtactttatgtaggccaatgtataaatatttcaagtctaacagtagcacagttatatgttaatacaactgactacacgaaaaatatgtaatagcatatgctatgtaatttttcaaatcactaggtattgatatgtgccttttttatattaccaagagattctctaaatatggaattagattaggattctctgctccacttaacacacatttttaaattagtactgatgattgagggatggacaatagcacaccaaaaaaaaaagagtttagtatgaaaaatttaaacctgttggttaagtcattcccattaatgtcattttgctgagggtgacttggtccttttgaattgctttggtgtacgggtatgttctgatttttcatgcaagctcctctgccattccaccgctctgaggagtaattgtagcacttcacatgtgctgtggttgtgatcacatggtgacatacatagcatgtgtgttcccagctgttgtgtgtttatgtgacatttgatgccaatacatatgtcttcaaggtatgcttgttccctcccagctcgtggaatatcaaaaaaattcattgctggaaaaattatttcatagacaaaaatgttaatgttctcttggggacttagagttgaaaatatttgtatagatttggttctcaagtccacagaatcgtatctgctgtggtctccctttggtgctcatctgggagccatgtgtatggaagattctgtcacaggcggctgggatgtgggcagatgctgttagcctccctctccacgtggtggtccatgcctgacgtgtcccctagttcaaggaagcgccatctttagcatgaaaacaattgcgttcccctaggaaatgaagaaaaaatgagctgaaatttccttatacatttgaatttgttcattttttaaagagacatttttgttgtctgctttgtggtacttataaaatttgttttccattgaaattgccatttataaatttgcagatatgtactaatttagatttttttaagtgttcaataaaataaggatatatttactgtgaatttttaaatgggctttttagctttctttccctctacttttagttttgatttatataagttaaagattcttttgcatattaatccctgaagcagctg

SEQ ID NO: 1068 - DNA, 184 bp, Homo sapiens
caatcatcatgacgctgaccagaagtcataatagttcaaaaaggagggtggcgctacgagtactgtgaagttgctgctcattcctggaaaatgcatgaatattcttccccttgcttttaatgtccaatcccttcattagagaaaccctgtgttttattttaacctcctcacctctcattattcg

SEQ ID NO: 1069 - DNA, 567 bp, Homo sapiens
gctatttgggaggctgaggcaggagaattgcttgaacccgggaagcggaggttgcagtgagcccaggtcgtgccactgcactccaacccttggtgacagagtgagactccatcgccaagaaaaaaaggaaagaaaagaaaaaaagacacttccactggtgtcatgacacttgacaatcatcatgacgctgaccagaagtcataaaagttcaaaaaggaaggtggcactaggagttctgtgaagttgctgctcattcctggaaaatgcatgaatattcttccccttgcttttaatgtccaatcccttcattagagaaaccctgtattttattttaacctcctcacctctcattagtcgagaagtgatttgtgagccatgcttctgcttctcaagtccacggccatcaagtaaagcttgcactgcttggtgctcaccttcagttttgtgtattgcctttgcagcaccgagcaagtaaagaccctatttttggaggaagtggctttgtttgatagcattgctatggctattaacatgcatattagctcatcccataattctaatgtttat

SEQ ID NO: 1070 - DNA, 590 bp, Homo sapiens
cgcctgtaatcccagctactcaggaggctgaggcaggagaattgcttgaacccgggaagcggaggttgcagtgagcccaggtcgtgccactgcactccaaccttggtgacagagtgagactccatcgccaagaaaaaaaggaaagaaaagaaaaaaagacacttccactggtgtcatgacacttgacaatcatcatgacgctgaccagaagtcataaaagttcaaaaaggaaggtggcactaggagttctgtgaagttgctgctcattcctggaaaatgcgtgaatattcttccccttgcttttaatgtccaatcccttcattagagaaaccctgtattttattttaacctcctcacctctcattagtcgagaagtgatttgtgagccatgcttctgcttctcaagtccacggccatcaagtaaagcttgcactgcttggtgctcaccttcagttttgtgtattgcctttgcagcaccgagcaagtaaagaccctatttttggaggaagtggctttgtttgatagcattgctatggctattaacatgcatattagctcatcccataattctaatgtttatatttatattt

SEQ ID NO: 1071 - DNA, 576 bp, Homo sapiens
gctatttgggaggctgaggcaggagaattgcttgaacccgggaagcgaaggttgcagtgagcccaggtcgtgccactgcactccaaccttggtgacagagtgagactccatcgccaagaaaaaaaggaaagaaaagaaaaaaagacacttccactggtgtcatgacacttgacaatcatcatgacgctgaccagaagtcataaaagttcaaaaaggaaggtggcactaggagttctgtgaagttgctgctcattcctggaaaatgcgtgaatattcttccccttgcttttaatgtccaatcccttcattagagaaaccctgtattttattttaacctcctcacctctcattagtcgagaagtgatttgtgagccatgcttctgcttctcaagtccacggccatcaagtaaagcttgcactgcttggtgctcaccttcagttttgtgtattgcctttgcagcaccgagcaagtaaagaccctatttttggaggaagtggctttgtttgatagcattgctatggctattaacatgcatattagctcatcccataattctaatgtttatatttatattt

SEQ ID NO: 1072 - DNA, 576 bp, Homo sapiens
gctatttgggaggctgaggcaggagaattgcttgaacccgggaagcggaggttgcagtgagcccaggtcgtgccactgcactccaaccttggtgacagagtgagactccatcgccaagaaaaaaaggaaagaaaagaaaaaaagacacttccactggtgtcatgacacttgacaatcatcatgacgctgaccagaagtcataaaagttcaaaaaggaaggtggcactaggagttctgtgaagttgctgctcattcctggaaaatgcatgaatattcttccccttgcttttaatgtccaatcccttcattagagaaaccctgtattttattttaacctcctcacctctcattagtcgagaagtgatttgtgagccatgcttctccttctcaagtccacggccatcaagtaaagcttgcactgcttggtgctcaccttcagttttgtgtattgcctttgcagcaccgaacaagtaaagaccccatttttggaggaagtggctttgtttgatagcattgctatggctattaacatgcatattagctcatcccataattctaatgtttatatttatattt

SEQ ID NO: 1073 - DNA, 2795 bp, Homo sapiens
gggcacggtggctcatgcctgtaatcccagcactttgggagcccgaggcaggtggatcatgaggtcaggagatcgagaccatcatggctaacacggtgaaaccccgtctctactaaaaaaatacaaaaaattagccgggcatggtggtgtgcacctgtagtcccagctactcaggaggctgaggcaggagaatggtgtgaacccgggaggcggagcttgcagtgagccaagattgtgccactgcactccagcctgggtgacagagcgcagaaaaaagaaagaaaagaaaaagaaagtgggccttcaatagttgtagctctatggattgtctcaagcctaaggtcttgtctcctgtcccctcggttttggtcattaaaacacaagtgaccgtgatcatcttaattagcaaacattgtgaggatagcttttgcttgctgatcagctttcccgttctgggtttctgttccttttttatttttttccttgaggtttctcatagattattggagctaggctaggtttgtaagcttttgttgtatttatctaccaattctaattgtttcgtattctgcatatctgatctaattatcaccagtaggagtagcctaggctagtttttaaaataaaatgtcttgagtgcccggatatgtgttatgaatgttattgttattatactagagatagcatcattatacatcctttggacaattaatcaatatacggctttcaatcaccttgcttatccattttgtgtggacataatttagattatttggatatttgcctttaatgcaaaaatgtgactttatttattcatttattcatttattttttgagacggagtctcgttctgtcacccaggctggagtgcagtggcctgatcttggctcactgcaagctctgcctcccgggttcatgccattctcctgcctcagcctcccaagtagctgggactacaggtgcccactgccacgcccagctaattttttgtatttatagtagagatgggatttcaccatgttagccaggatggtctcgatctcctgacctcgtgatccaccagcctcggcctcccaaagtgctgggattacaggcgtgagccaacgtgcccagccttgtcctaatatttttatctggcagatgctatacttaacacagcattggattcttaatgccatttgcaatctaaaataataacaccaaaccccagttttgaggtgaaattagtataaatgaaggtatatggaatatttgaaatataactgctaatttcagcttattattaattatatatagttattttaaagaagagctgagactaataatttatcatctcaactaagatgaaggatgttttaaattctgctaccaccaaagtaaagttttctgatttgccatcttcgactaggctcctccttgtcttcaaattatacccattatgatagtccccttgtggaaagggactggattttactttctctaaattgctaacatctagacagtggtgtaccacatttaaatagcattcagtaaatagataaatgcatgcattaataaaacattaatatgtctccgtttttggcaaatatctaatagaaatgtggaagataagaggaagaaatctaccctttggaacaaatataattggaaataatagtctttggatatatttatatggtaatcataaaatctcaggaattgtcttaaatgatttgcatagattaagtcagtaaatcctcacagcaactttgtgaagtgagttcctaatattcccattttataaatgaacagactgaagcagaattagtttaaataacttccctagggtcatttgtaatcaaacaatcaatgggcttgctacccgatgtgcatagaagccaataccatggcacgggcttgagaaaagagaagctgtattgctggttgactgtcaagagacaggagaaaatgctcaaatctgtctccctgagctgggggctgagttgggttttataggaatagggtaatgaagtgttatctgattgggtcttgtgatgagatgatgctgggaggcatgatctgactgaatcctgccatggggtaccacaagggctccatttgattggatcctggatcttgccatgcagtgtcccctttttaatccagtcccacttcttgggctgagcacttaagtcccgcccatcattgcaagtttggttcatttgggcatgttcaggttatgggaccttcagcctgggagtccatggcaactgaaaaactattcataacttttttacataaaagttgaagaaccagactggttttgtgtggttacacattcacttaataaatgactgagctggaatttgaactcaggcagtctggctcttgtctgactccagcgcccaatctcttagccaatatgcactattgcctgtgatagagatattatttttggttattgggataatgacagccaagggaatctatagagtattattccacaaaaataagtctaaatacggccaggtacggtggctcacgcctgtaatcccagcactttaggaggccgaggcgggtggatcatgaggtcaggagatcaagaccatcctggctaacactgtgaaaccctgtctctactaaaaatacaaaaaattagccgggtgtggtggtgggcacctgtagtctcagctacttgggaggctgaggcagaagaatggcgtgaacccaggaggcggagcttgcagtgagtggagatcgcgccactgcactccagcctgggcgacagagcgagactccgtctcaaaaaataataa

SEQ ID NO: 1074 - DNA, 308 bp, Homo sapiens
gtttttttttttgttgtttttttttttgagacggagtctcgctctgtcacccaggctgcagtgcagtggcgtgatctcggctcactgcaaactccgcctcccgggttcacatcattctcctgcctgagcctcccgagtagctgggactacaggtgcccgacaccacgcccggctaattttttgtatttttagtagagatgaggtttcaccgtgttagccatgatggtcttgatctcctgaccttgtgatccgcccgccttggcctcccaaagtgctgggattacaggcgtgagccaccgcacccagcc

SEQ ID NO: 1075 - DNA, 1635 bp, Homo sapiens
ttcatgccattctcctgcctcaccctcccgagtagctggggttacaggtgcccaccaccatgccctgctaattttttttgtatttttagtagagacggggtttcaccgtgttagccaggatggtctcgatctcctgacctcgtgatccgcccacctcagcctcccaaagtgctgggattacaggcgtgagccaccactcccggccacaggttactcagacattcttttatgaattacaagttagtttggtgtctactaaaatgcgtatgattttctgtaatgatttgttagtatagattattaaatttatatatatgtatatatgtatacttattaacttatccttgctttcctaggataaactgaaattgatcataattttttgatagacattattttttagagtagtttcacgttttaaaaaatttgaagagaaagtacaaagagtatatatacctcccttcctccccgtttctctataatttgtattttctataacactttgcgttagggtgatgcatgtgttacaattgatgaaccaacattgatacactattattaactgaaatccatactttagggttcagtctgtgttatagaattttatgggtgttgacaaatttataatgtcatgtatccactattgcagtatcagacaaaatattatggctgccttcaaagtcccttatgctccacctatccatccctccttccttctccaccaggatgctttctttaatattttgtggtacacagggtatttatatccatattcctaactggaaatgttctctaattttactttaccattctacgatttgttttgttatcaatggtatgctagcttctcaaatcgaggagtctttttctaatttattaaaagatgaaaatttactatttcttgaacactgttatttgggtataagatcacatggctctgatgtgtatcttgtggctctatttttaacaactaactctattttaaattattattgtgatatgggttggatttgtgtccctgcccaaatctcaggtggaattggaggaggggtctggtgggaggtaattggatcatgggggtggatttcccccttgctgttctgtgagagtgggtgagttctcatgagatctcatggtttaaacgtgtgtggcacttccctgttctctctctctctcctgccaccacgtgaagaagatccttgcttccccttcaccttctgccatgattgtaggtttcctgaggcctccctgtcatgcttcctgttaagcctgtggaagtgtgagttaattaaatctctttttttttttttgtaagttatccactctcaagtagttttttttttttcttttgagacggagtcttgctctgtcacccaggctggagtgcagtggcgtgatctcggctcactgcaaactccgcctcccgggttcacgccattctcctgcctcagcctcccgagtagctgggactacaggtgcccgacaccacgcccggccaattttttgtatttttagtagagacgaggtttcaccgtgttagccatgatggtctcgatcaggatcctgaccttgtgatctgcccgcctcggcctcccaaagtgctgggattacaggcgtgagccaccacgcccggcc

SEQ ID NO: 1076 - DNA, 678 bp, Homo sapiens
acatagttgaagtgaaagaaaagtatggtcaggggataagaaataatcagttgttctagttttcccagcgccactgtttccctttcccaagtctaatcatgcctgggaatacatcccctactttggcctaagcttgtttgagctggatttctcttgcttgctacagaaatgatccctcattacaaaaaacttatttctccttcttctcctcatagtaggaagggagtaaattggagcttgggcatgagaaatgtattttctctgaactaaatccccacctagctgtagaagcagaagataaatatgcccaagcatcatctcacctgttatatgtcaactagtgaactacttttctgatttttatagctttagccccattcctgattttaatatctgactcgaagttttccagagtatatttctagaacatcttaggcacctgaaaagagactgagatgttcaaattgaatactagatgacaacatggcaagttaaatgtgtctcttctcccctgaagtacacttcaggacttggggactgattgcacaaggggtacaaagaagaaggaagaaacaaaattgattagaaatctgtgtgattgagagtgtgggattaaggaggagccacaaatgggaagtaggtaagaagtatttgaaagggtaatagaacaaaaatgtg

SEQ ID NO: 1077 - DNA, 6640 bp, Homo sapiens
ctgtggctcagactcggccatggtgttcgtccatggcctgctctcggtgctcttctccacgcctctcaaaccactgctaggcagtgccgtcttcatcatgtctacgctcggcccctcaagttctgggagcgcgactacaagtgagtctcacaggaggcgggagcatgcccagcagggcaggaagggagaggtttggagcccaggctggaggccacccacagaggggcccacagcaggtatgggagggcttggtcacagtggggacacatgaggcggcagatccaatgcagggagagcctgcaccaggccaaggcttcaggctcacagcttggggatagtggggtctggggatgagcttagcctcccagcttcttggctgtgtgtcctgtgtgagtcccttcatgtacctgagcctcagtctcctcatctgcctgcataacggggctgtcctggatggcgttgaccttgtggcacagggagagcatgagcagggtgcaccctctcttcaccttcttggccaaccgccttgttgcactctctctgaacagcactaaacgtgtggatcattccaacacccgcctggtcacacagctggacaggaaccctggtgtgtacccagccatccaaggggctttagggcagggcctccctggggagggagcctcgctaacttgtcactttgtccatttgcccgtctgttctgggtcttaggcgctgatgacaacaacctcaactccatcttctatgagcacttgacacgttcgctgcagcacacactgtgtggggacctggtgctgggccgctggggcaactatggccctggtgactgcttcgtcctggcctctgactacctcaacgccctggtgcacctcatcgaggttggcaatggcctcgtcaccttccagctgcgtggccttgagttccggggtgagccgcaggaccaggctcgggtgggcaggcacagctcgggcctgatgtgggagctgtgttcaatagcacgtgcgaaggaggtccagtccagctctgtccaggctggcgggtggccttgggcaaggcactcctcctccctgggcctgcgtttcccagtctgagcaatgaggtggcagggtctcttggccaagccctgtgcctgccccaactttaggtcccagtgactctacaggtcactgcagtgagggcctgggcctggaggtctgagttctcacacccagcctgctctgtggtctcaggcttggcccatgggttgggcgccatgagtgagccagctccttcctctcaggaagacgtgtgtgttggatgcccgagagtgcagaggggccagaccgtgtcctgctccctcccgccctgcccttggatgctgggagttgggaggagaaaggcaggcgctctttcgtgaatcttggcatccaataaggttgactcccctggcgtccaagggggtgaatggcagcaggcctctgatgccatgttggtcactctcccaggacagggcaggtagggattgttctagcagcccctgactgcacacccctcctccacaggcacttactgccagcagcgcgaggtggaggctatcaccgagggtgtggaggaggacgagggctgttgctgctgtgaacctggccacctgccacgggtcctgtccttcaatgctgcctttgggcagcgctggctggcttgggaggtaacagccagcaagtacgtgctggagggctatagcattagtgacaataatgctgcctccatgctgcaggttttcgacctccgcaagatcctcatcacctactatgtcaaggtacggtgggcaggtgtggccgggcagcagggcccttgcgggtgagcgctcgctgaccagaggccccagtaccccctttctgggttgttgggagcctgttttgtccaagggaagctgaggcctcagagagtttaagtgtccccctgaggtgccactgccagacctcaggttgcaggggcctctgtgcccatatggctctgataggtgcccaggcaaggaaggcttgctttgggcagtgagtatggggcaggtgggcagttgcagaggccagcctttgaaaccaccagcccctgcccccagctcacccagcacagagcagtggtagagctaacagttgtcacgttaacgatcatcatgggagcagctgcttgagcagtaacatttaccacgggtgggcgctatgctgggcatctctcctgagctgggtggagtcccccaccctttgagaggggccctgctatctcacagatgtggaagttggcttgcagaggttccagaatctgaagaaaatggccaagccaggccttgaacccaggctggccctgagccacagagctttcctgccttagcctgggggctctgagccaggcctgaggatcttgagacctcttgggggtgggaggggttggtgaggcaatgtggggtacataaggagccctggaatgggggttctgatcagcctggaatgtttcttccctgtgtccctcagcttaccccttgagaagtgggggttattgcagttctctgagatggcagaaatgttgaggcttggccaagcgtggtggctcatgcctgtaatcccagcactttgggaggccaaggcaggtggatcacttgaggtcaagagtttgagactagcctggccaatgtggcgaaaccccatctctactaaaaatacaaaataattagccgggtgtgatggcgggcacctgtagtcccagctacttgggacgctgagacaggagaatcacttgaacctgggaggcagaggttgcagccagccgagatcgtgctactgcactccagcctgggcaacagagcaagactgtctcaaaaaaaaaaaaggaattttgaggcttgtggtgctcagaataagcgtactgggagtggggtggcctgctgatcacagtgcaggctcccacgtgccttcttaggatctaccctggtgctccctatgttgggctcggtgggtggcctactggggcccaggtgagcctgccacctaggttctctctggagtagtttcacgaggccctggctgtccttctccaaaggaaatcctgtccacaccacatatcagaggagctgtcatttgtcattccttctgccctcccagccactcctaggcaaggatttgtgagaccacccccctttcatcaagaaggaggctgtgtctagagagggccattcccagtcccaggtcaccgagaggtcttggcctgttccaccttccggtcccatcttgagagaggtgccttgcccaggttgccctgctgtgcctgttaggctagtggccagcaggttgagatgcacctggccgggtctcttgtcccatggggaagctgactggccacatctaaggctgcctcaaaggctgggcagaatttgagtctggaggaagtgcttggaggacctggggtggctccgctgaggatgtggactgagggtgaagcttggaaggacaagtcacggggctgccaggggtggggcggggggaggcgggtgtgctggggagcctggtgcatctggggaagtgtcccagctgcagggataggtcctttccagccttcgaggttggccagtcgaggcggagcccctcccgttagctttgcccttcccgtgggagttactgggctctcagacctgcttctgcagctgggaagggctacaagagcaggaaaaggcaccgtggcttgaggctgcacggagtctgggcagtgcttcccgggaagtaccttgggcagagcccagctcgcagtgagcgctcacaggcggagcggctgctggtattgccccccgtcttcattttcttcctaagatgaccgtgagtgttgtgtcagagaaaaggatggcactggtgaaggttaaccaagcacctgatatgtgccaggccagctcctctcccggtccctgaagcttttcttttttttatttttttttgaaacaaggtctcattctgtcacccaggctggagtgcagtggtgccatctgggttcactgcagtgtccacctcccaggttcaagtaatcctcctacctcagcctcccaggtagctgggactacaggcatgcaccaccatgcctggctaatttttgtattttttgtagagatggggtttcgccatgttgtccaggctggtcttgaactcctgggttcaagcgatcctcccacctccacctcccgaagttctgggattacaggtgtgagccaccctgtctggctgaagcttttcttttctgggtctttttagcagctctggtggtgcctggattgtagaggcgagctatgggcaagaaagtcagtctggagcgggtctgccctggcaaagggcctgccccattagctccatcttagggtggcacatggaatccccatcacctcactggctgccctgccggccttaacccgcccgtgcatcctggccatgccagctacctgtcttccaaagctcctgtacttttgcccaacagggccttttaacaagaggtccaggagcccccagctttgggtaccacatgtgcccgtggcttttttctgaggcgaggcctgatggctgtcatgcttcagctgcctaaagggacctgtgacccaggcactctgaggcaggcccactacttcagcctgcccttccggccccgagatctggatcccacaatgtcatgatggggaaggtccggggttcaggcggcagttcagtctgttctgccccactcgctccccgccccctgcccatgtgacatctggatgctcccgcgctcggggttatgtttgtgcaggaacaccagctcctgctgctacctggcccacgtgctgcacaggcactgaaggttcacctgagggccacaccatagtgtcggggccagccagaggcgggtgggggacagggttcagggcaggtggggccagctccaccttgatgacttggaagctgaggtggtaaatgttgagtgtgatgatcttgttctcgttgggggctgccatttgtttgagcctcaatttctcatacaaacggggcatattctagggcagaggcaggcagatgctgcttgtgagtgctagccccagcacaggacttcctgctctgtaagtgggtgcttcctggcggctttgtcactcctccctggtctaggggaaggagccaacttgcttggttgctcttgagagctgagatggctctaggagcggggcatcccagaaagcggacttcagctcagtcttggggaggagcctctgaacctccatgctttctcctccagtggccagggccgggaccccggcctgacgcctgcccctcctctcccagagcatcatctactacgtgagccgctcaccaaagctggaggtgtggctcagccatgagggcatcacggcagccctgaggcctgtgcgggtgcccggctatgccgactcggatcccaccttctcgctgagtgtggatgaggactatgacctccgcctgtctggcctctcgctgccctccttttgtgctgtgcacctcgagtggatccagtactgcgcctcccggcgcagccaggtcaggctccactacctgaggctgccacctggggctgtgggacctgggcttccctgctccccttctccccatttggtttcctctcactctgagcctcccttagcctgagccccagcccccactccaaggtccctgtcccaggtctgagctgggctctgggatgggggtccttatgccacagcccgtggaccaggattggaactccccgctggtcacgctgtgttttggcctgtgtgtgctgggccgccgggccctggggacagcctctcacagcatgtctgcaaggtgagtgctcgggtgtcccgcggggcctactgccgtccccaccccacctcttccacgaagagcactgtggtctctggccacagtggccacagaaactgcagtggcccttcctgttggggtacctcttctcccacgggcagggcacttcctggtcatgaccttgcctgctcctcagtgctctgtgagagacatgggcagagattggcctctttgtcaagatggggaaactgaggctcagcgtgaggaaaggcctctgcttggatcactctgaagccttacccctgggtcctcgacacccctctctcccctccctgtttttcctcccacttagcctggagcccttcctctacggcctgcacgccctgttcaagggggattttcgcatcacctccccacgtgacgagtgggtctttgccgacatggacctgcttcaccgcgttgtggcgcctggggttcgcatggccctcaagcttcaccaggttggggaggggtgtgcccagcagcatgggcaggtgggggatgaagcctctctccagggcaggggccactgacccctgttcccgtcttctctaccaggaccacttcacgtccccagatgaatatgaggagccagcagccctatacgatgccattgcggccaacgaggagcggctggtcatctcacatgagggtgacccagcatggcgcagcgccatcctcagcaacacgccctccctgctggcgctgcgccatgtcctggatgatgcctccgacgagtacaagatcatcatgctcaaccggcgccacctcagcttccgagtcatcaa

SEQ ID NO: 1078 - DNA, 8974 bp, Homo sapiens
agatccatgtttcttgagtttttcttaaacgacagaagattttgcttcccagactagcatccctctgtggctacaaccagcctgaaccgaggggtctgccctttagaagggcccagctcacgggctcactgtgcactcaggccctagccagcctgctgtacgtaggtgtttgcgatttcatcattggccttgttttaacagacagcagagcagagcacctgccataaagcaagcctcgatgtgctaagtgccatgtggagcccttgccctgctggggctcgctgctcccatttgagctgccacagatcagcccctccccccagggtctccgaggagtcaggaccgcacagcctgccctcctagggaaggacttcctcagggaaggcaggcatgtggaagccaggtgcagagtcctggcctctccacacaggtgccgcccaggtgatgtggtttgagaagctgtatgctggcctgcagtgcgtagagaagtacctcatctaccccgccgtggtgctcaacgccctcacggtggacgcccacacagtcgtcagccacccggacaagtactgcttctagtgaggaccaccccaccctcaacgatcccatcatccgctttcccttttgatccgtggggaaactgaggcctagagagggaatgaatcatgtctaaggttgtttagcaagctaaagcaggaccccagctcctgacacgccatcccaggaagtggttgcttcttcaaaggcaaatgtgttcccaccactccctttggaagagcagagactaagagtcacgggcccaaaagagcagggaccagcccagcagagcagaggccaggggttgctctccggccagagtaggcgagggatgggacacctatacccactgccccggtcccctaccaagcacccgatgcctgccccttgcccacagctgccgggcgctgctgatgaccgtggctgggctgaagctgctgcgctcagccttctgctgccccccacagcagtacctgacgttggccttcaccgtcctgctcttccactttgactacccgcgcctctcccagggctttctgcttgactacttcctcatgtccctgctttgcagcaaggtgagttggtggctgtggcccagaccccaggctgtccaatgggagcagagccaacttctgcctgggtgggaagagaatttcctgagggcctgtggccaccgctctgtatcagccccgtgggcctttgcagcagcctctcaaggaaggggttacttccaccctctacagagaggaagcaggctgaaggaggttgagggacttgcctcaggcttccagagaattggtggtcagccaggatttgaacccaggcctgtctgaccccacgaccacctcctcagaaatggttagggtaatcaggacctggccttatcctctggacgcagacctctgagttccacgctcttttgccaccctggatccagagcagtccgagctgagtttcagaagcccctagtgcctgggtgtgtataggtgctctgccggctgtggcattgccacggcttggggggctctttgaactaaggaaccatgctcctacactctactggaggccagcagtggtacctggaaccccaggcaggcctgagcctttttcttcctcacgtgggcattctgttcttgttttctggcctggcccaggatggcggtcatccacactgcgtaccctctgagggcagggcctgtggctgttctcaattttcagtactatagtctagcttcagcctcaccagtgacctagtggcgtgacctgaggaagtcatttatcttctctgtcttcactgaacctcaactttcccatctgtgaaaaggggccagcaataggaataagaagctcacagggtacttgtgtgaactaaatggccaccgccccctttgagctcaggcaggggttgctaatggcatcaggcgccttgagccatgtccagagcacaagggctggcagtgaccttgagtttggcccccgtgggccaagccagtgcgatgacccaagcctctgaatggggcctggcatccgggggcttccatgagtgaccctgcatgtcttttttcttctccctgttggccctgccagctgtgggacttgctgtacaagctgcgtttcgtgctgacctacatcgcgccctggcagatcacctggggctcggctttccacgcttttgcccagccgtttgccgtgccacgtatccagcctgtgtttgggtgggggtgtgcagggagggctgtggcctggggcagtggggggtggtggggggctgggaggtcctgttgcccgccgcctccttgactgtggctcagactcggccatgctgttcgtccaggccctgctctcggggctcttctccacgcctctcaacccactgctaggcagtgccgtcttcatcatgtcctacgctcggcccctcaagttctgggagcgcgactacaagtgagtctcacaggaggcgggagcatgcccagcagggcaggaagggagaggtttggagcccaggctggaggccacccacagaggggcccacagcaggtatgggagggcttgtcacagtggggacacatgaggcggcagatccaatgcagggagagcctgcaccaggccaaggcttcaggctcacagcttggggatagtggggtctggggatgagcttagcctcccagcttcttggctgtgtgtcctagtgtgagtcccttcatgtacctgagcctcagtctcctcatctgcctgcataacggggctgtcctggatggcgttgaccttgtggcacagggagagcatgagcagggtgcaccctctcttcaccttcttggccaaccgccttgttgcactctctctgaacagcactaaacgtgtggatcattccaacacccgcctggtcacacagctggacaggaaccctggtgtgtacccagccatccaaggggctttagggcagggcctccctggggagggagcctcgctaacttgtcactttgtccatttgcccgtctgttctgggtcttaggcgctgatgacaacaacctcaactccatcttctatgagcacttgacacgttcgctgcagcacacactgtgtggggacctggtgctgggccgctggggcaactatggccctggtgactgcttcgtcctggcctctgactacctcaacgccctggtgcacctcatcgaggttggcaatggcctcgtcaccttccagctgcgtggccttgagttccggggtgagccgcaggaccaggctcgggtgggcaggcacagctcgggcctgatgtgggagctgtgttcaatagcacgtgcgaaggaggtccagtccagctctgtccaggctggcgggtggccttgggcaaggcactcctcctccctgggcctgcgtttcccagtctgagcaatgaggtggcagggtctcttggccaagccctgtgcctgccccaactttaggtcccagtgactctacaggtcactgcagtgagggcctgggcctggaggtctgagttctcacacccagcctgctctgtggtctcaggcttggcccatgggttgggcgccatgagtgagccagctccttcctctcaggaagacgtgtgtgttggatgcccgagagtgcagaggggccagaccgtgtccctgctccctcccgccctgcccttggatgctgggagttgggaggagaaaggcaggcgctctttcgtgaatcttggcatccaataaggttgactcccctggcgtccaagggggtgaatggcagcaggcctctgatgccatgttggtcactctcccaggacagggcaggtagggattgttctagcagcccctgactgcacacccctcctccacaggcacttactgccagcagcgcgaggtggaggctatcaccgagggtgtggaggaggacgagggctgttgctgctgtgaacctggccacctgccacgggtcctgtccttcaatgctgcctttgggcagcgctggctggcttgggaggtaacagccagcaagtacgtgctggagggctatagcattagtgacaataatgctgcctccatgctgcaggttttcgacctccgcaagatcctcatcacctactatgtcaaggtacggtgggcaggtgtggccgggcagcagggcccttgcgggtgagcgctcgctgaccagaggccccagtaccccctttctgggttgttgggagcctgttttgtccaagggaagctgaggcctcagagagtttaagtgtcccctgaggtgccactgccagacctcaggttgcaggggcctctgtgcccatatggctctgataggtgcccaggcaaggaaggcttgctttgggcagtgagtatggggcaggtgggcagttgcagaggccagcctttgaaaccaccagcccctgcccccagctcacccagcacagagcagtggtagagctaacagttgtcacgttaacgatcatcatgggagcagctgcttgagcagtaacatttaccacgggtgggcgctatgctgggcatctctcctgagctgggtggagtcccccaccctttgagaggggccctgctatctcacagatgtggaagttggcttgcagaggttccagaatctgaagaaaatggccaagccaggccttgaacccaggctggccctgagccacagagctttcctgccttagcctgggggctctgagccaggcctgaggatcttgagacctcttgggggtgggagggggttggtgaggcaatgtggggtacataaggagccctggaatgggggttctgatcagcctggaatgtttcttccctgtgtccctcagcttaccccttgagaagtgggggttattgcagttctctgagatggcagaaatgttgaggcttggccaagcgtggtggctcatgcctgtaatcccagcactttgggaggccaaggcaggtggatcacttgaggtcaagagtttgagactagcctggccaatgtggcgaaaccccatctctactaaaaatacaaaataattagccgggtgtgatggcgggcacctgtagtcccagctacttgggacgctgagacaggagaatcacttgaacctgggaggcagaggttgcagccagccgagatcgtgctactgcactccagcctgggcaacagagcaagactgtctcaaaaaaaaaaaaggaattttgaggcttgtggtgctcagaataagcgtactgggagtggggtggcctgctgatcacagtgcaggctcccacgtgccttcttaggatctaccctggtgctccctatgttgggctcggtgggtggcctactggggcccaggtgagcctgccacctaggttctctctggagtagtttcacgaggccctggctgtccttctccaaaggaaatcctgtccacaccacatatcagaggagctgtcatttgtcattccttctgccctcccagccactcctaggcaaggatttgtgagaccacccccctttcatcaagaaggaggctgtgtctagagagggacattcccagtcccaggtcaccgagaggtcatggcctggtccaccttccggtcccatcttgagagaggtgcccttgcccaggttgccctgctgtgcctgctaggctagggccagcaggttgagatgcacctggccaggtctcttgtcccatggggaagctgactggccacatctaaggctgcctcaaaggctgggcagaatttgagtctggaggaagtgcttggaggacctggggtggctccgctgaggatgtggactgagggtgaagcttggaaggacaagtcagggctgccaggggtggggcggggggaggcgggtgtgctggggagcctggtgcatctggggaagtgtcccagctgcagggataggtcctttccagccttcgaggttggccagtcgaggcggagcccctcccgttagctttgcccttcccgtgggagttactgggctctcagacctgcttctgcagctgggaagggctacaagagcaggaaaaggcaccgtggcttgaggctgcacggagtctgggcagtgcttcccgggaagtaccttgggcagagcccagctcgcagtgagcgctcacaggcggagcggctgctggtattgccccccgtcttcattttcttcctaagatgaccgtgagtgttgtgtcagagaaaaggatggcactggtgaaggttaaccaagcacctgatatgtgccaggccagctcctctcccggtccctgaagcttttcttttttttatttttttttgaaacaaggtctcattctgtcacccaggctggagtgcagtggtgccatctgggttcactgcagtgtccacctcccaggttcaagtaatcctcctacctcagcctcccaggtagctgggactacaggcatgcaccaccatgcctggctaatttttgtattttttgtagagatggggtttcgccatgttgtccaggctggtcttgaactcctgggttcaagcgatcctcccacctccacctcccgaagttctgggattacaggtgtgagccaccctgtctggctgaagcttttcttttctgggtctttttagcagctctggtggtgcctggattgtagaggcgagctatgggcaagaaagtcagtctggagcgggtctgccctggcaaagggcctgccccattagctccatcttagggtggcacatggaatccccatcacctcactggctgccctgccggccttaacccgcccgtgcatcctggccatgccagctacctgtcttccaaagctcctgtacttttgcccaacagggccttttaacaagaggtccaggagcccccagctttgggtaccacatgtgcccgtggcttttttctgaggcgaggcctgatggctgtcatgcttcagctgcctaaagggacctgtgacccaggcactctgaggcaggcccactacttcagcctgcccttccggccccgagatctggatcccacaatgtcatgatggggaaggtccggggttcaggcggcagttcagtctgttctgccccactcgctccccgccccctgcccatgtgacatctggatgctcccgcgctcggggttatgtttgtgcaggaacaccagctcctgctgctacctggcccacgtgctgcacaggcactgaaggttcacctgagggccacaccatagtgtcggggccagccagaggcgggtgggggacagggttcagggcaggtggggccagctccaccttgatgacttggaagctgaggtggtaaatgttgagtgtgatgatcttgttctcgttgggggctgccatttgtttgagcctcaatttctcatacaaacggggcatattctagggcagaggcaggcagatgctgcttgtgagtgctagccccagcacaggacttcctgctctgtaagtgggtgcttcctggcggctttgtcactcctccctggtctaggggaaggagccaacttgcttggttgctcttgagagctgagatggctctaggagcggggcatcccagaaagcggacttcagctcagtcttggggaggagcctctgaacctccatgctttctcctccagtggccagggccgggaccccggcctgacgcctgcccctcctctcccagagcatcatctactacgtgagccgctcaccaaagctggaggtgtggctcagccatgagggcatcacggcagccctgaggcctgtgcgggtgcccggctatgccgactcggatcccaccttctcgctgagtgtggatgaggactatgacctccgcctgtctggcctctcgctgccctccttttgtgctgtgcacctcgagtggatccagtactgcgcctcccggcgcagccaggtcaggctccactacctgaggctgccacctggggctgtgggacctgggcttccctgctccccttctccccatttggtttcctctcactctgagcctcccttagcctgagccccagcccccactccaaggtccctgtcccaggtctgagctgggctctgggatgggggtccttatgccacagcccgtggaccaggattggaactccccgctggtcacgctgtgttttggcctgtgtgtgctgggccgccgggccctggggacagcctctcacagcatgtctgcaaggtgagtgctcgggtgtcccgcggggcctactgccgtccccaccccacctcttccacgaagagcactgtggtctctggccacagtggccacagaaactgcagtggcccttcctgttggggtacctcttctcccacgggcagggcacttcctggtcatgaccttgcctgctcctcagtgctctgtgagagacatgggcagagattggcctctttgtcaagatggggaaactgaggctcagcgtgaggaaaggcctctgcttggatcactctgaagccttacccctgggtcctcgacacccctctctcccctccctgtttttcctcccacttagcctggagcccttcctctacggcctgcacgccctgttcaagggggattttcgcatcacctccccacgtgacgagtgggtctttgccgacatggacctgcttcaccgcgttgtggcgcctggggttcgcatggccctcaagcttcaccaggttggggaggggtgtgcccagcagcatgggcaggtgggggatgaagcctctctccagggcaggggccactgacccctgttcccgtcttctctaccaggaccacttcacgtccccagatgaatatgaggagccagcagccctatacgatgccattgcggccaacgaggagcggctggtcatctcacatgagggtgacccagcatggcgcagcgccatcctcagcaacacgccctccctgctggcgctgcgccatgtcctggatgatgcctccgacgagtacaagatcatcatgctcaaccggcgccacctcagcttccgagtcatcaa

SEQ ID NO: 1079 - DNA, 10923 bp, Homo sapiens
gcttccccttcgtcttcctcctgggcctcctgccccaggtcaacacctgcctcatgtacctgctggagcaaatagatatgcacggcttcgggggcacaggtatgatgccacaggtggctcagggatggggcccgtgtggaggcaggagggccctcggattgggtccttggctccacccttgcggaaccttctcctgcgtctgtactgcagactcaaggtttctgccttctcccctctccttccctccccaggcaagtggtttatatctgagaatcttggaagctctaaaggccgcttggggcttggggcagcagagaacaatgggctgggggtgcctttccagggaggccagcctctgggagttgaggggaagcgcggctagggttgaggtggggtacctgcaagtgagagctgggctgtacttctcccttccacacagctgccaccagcccgctcacggcagtcttcagcctctcccgcagcctgctgctgccctgctctacggtttctgccttggggccatcaaggtaggggtggcttgcgaggtgggggcatgctgcagtgcgtaagggtggttggggcggggctgtgaactgggctcagcagtggcttctcacacgggggcagcccgggccccatgcttacctcacctcccctgaccagcatggattctctccgcagactccgtggccagagcagcacgtccctgtcctcttctcagtcttctgtggccttctggtggcactgtcctaccacctgagccggcagagcagcgaccccaccgtgctctggtgggtgtgctccgggtcgtgtgtttgtgtctgcccagtaggggtttgtggtctgtgcatgtgcccgtgactggggccggggggaaggaggggcggcctcctcctgactcttcctcacccccaggtctctgatccggagcaagctgttccctgagctggaggagcgcagcttggagacagcccgggccgagcccccggaccccttgccggacaagatgcgccagtcggtggtgagggggcggggggtgggggtctgtggggaggtggtgacaggtcctggggttcctgggaggggcatgtccagcttgggctgctgggcagctgagtgtctctcctggccgggcagctgaatgtctctcctggccctgcagcgtgaggtcttgcactccgacctggtgatgtgtgtggtgatcgccgtgctcaccttcgccatcagcgccagcaccgtctttattgccctgaaggtttgtgtggcatgggccgctgctgcctctcgctgtcttggcgggagcctgctcaatctgagtgccgtgggcagcccctccccggcctgtgccaggtggccctctgtggtcccttggcctgctcccatcagctgagtctctggcctctccctcctgcagtcggtgctgggtttcgtgttgtacgcactggctggggcgtgggcttcttcacacattacctgctgccacaactccgcaaacagctgccctggttctgcctgtcacagcccgtgctgaagccgctggagtacagccagtatgaagtgcgcggtgagtgcccacccctgatggccaggcctgggcagtggctcgggctgcagcctggctggtgggagctgtggtcctctcggctcaggagtgccagcagggggcactcgctgcccacactaccctttctgctccctccctgccctctgtgtccgtgttgcccggctgcgctctccaccgactcttctcctcgtgccctgctgtgcccttcccttgcctgtgttgccctggtcctgccctccttcctgtctgtgagaagacggaagaattagaaccccagggccctgaaggatctcttgtccagaattaaacactgatcaccagtggaccagagctgcctggagcacatcttcactgggctgcataatggtttttaaaaaatcctggagcctctattttagcatctcgatttgagatatgaagatccatgtttcttgagtttttcttaaacgacagaagattttgcttcccagactagcatccctctgtggctacaaccagcctgaaccgaggggtctgccctttagaagggcccagctcacgggctcactgtgcactcaggccctagccagcctgctgtacgtaggtgtttgcgatttcatcattggccttgttttaacagacagcagagcagagcacctgccataaagcaagcctcgatgtgctaagtgccatgtggagcccttgccctgctggggctcgctgctcccatttgagctgccacagatcagcccctccccccagggtctccgaggagtcaggaccgcacagcctgccctcctagggaaggacttcctcagggaaggcaggcatgtggaagccaggtgcagagtcctggcctctccacacaggtgccgcccaggtgatgtggtttgagaagctgtatgctggcctgcagtgcgtagagaagtacctcatctaccccgccgtggtgctcaacgccctcacggtggacgcccacacagtcgtcagccacccggacaagtactgcttctagtgaggaccaccccaccctcaacgatcccatcatccgctttcccttttgatccgtggggaaactgaggcctagagagggaatgaatcatgtctaaggttgtttagcaagctaaagcaggaccccagctcctgacacgccatcccaggaagtggttgcttcttcaaaggcaaatgtgttcccaccactccctttggaagagcagagactaagagtcacgggcccaaaagagcagggaccagcccagcagagcagaggccaggggttgctctccggccagagtaggcgagggatgggacacctatacccactgccccgcgtcccctaccaagcacccgatgcctgccccttgcccacagctgccgggcgctgctgatgaccgtggctgggctgaagctgtgcgctcagccttctgctgccccccacagcagtacctgacgttggccttcaccgtcctgctcttccactttgactacccgcgcctctcccagggctttctgcttgactacttcctcatgtccctctttgcagcaaggtgagttggtggctgtggcccagaccccaggctgtccaatgggagcagagccaacttctgcctgggtgggaagagaatttcctgacggtgtggccaccgctctgtagtcagccccgtgggcctttgcagcagcctctcaaggaaggggttacttccaccctctacagagaggaagcaggctgaaggaggttgagggacttgcctcaggcttccagagaattggtggtcagccaggatttgaacccaggcctgtctgaccccacgaccacctcctcagaaatggttagggtaatcaggacctggccttatcctctggacgcagacctctgagttccacgctcttttgccaccctggatccagagcagtccgagctgagtttcagaagcccctagtgcctgggtgtgtataggtgctctgccggcttgcattccacggcttggggggctctttgaactaaggaaccatgctcctacactctactggaggccagcagtggtacctggaacccaggcaggcctgagcctttttcttcctcacgtgggcattctgttcttgttttctggcctggcccaggatggcggtcatccacactgcgtaccctctgagggcagggctcgtggctgttctcaattttcagtactatagtctagcttcagcctcaccagtgacctagtggcgtgacctgaggaagtcatttatcttctctgtcttcactgaacctcaactttcccatctgtgaaaaggggccagcaataggaataagaagctcacagggtacttgtgtgaactaaatggccaccgccccctttgagctcaggcaggggttgctaatggcatcaggcgccttgagccatgtccagagcacaagggctggcagtgaccttgagtttggcccccgtggccaagccagtgcgatgacccaagcctctgaatggggcctggcatccgggggcttccatgagtgaccctgcatgtcttttttcttctccctgttggccctgccagctgtgggacttgctgtacaagctgcgtttcgtgctgacctacatcgcgccctggcagatcacctggggctcggctttccacgcttttgcccagccgtttgccgtgccacgtatccagcctgtgtttgggtgggggtgtgcagggagggctgtggcctggggcagtggggggtggtggggggctgggaggtcctgttgcccgccgcctccttgactgtggctcagactcggccatgctgttcgtccaggccctgctctcggggctcttctccacgcctctcaacccactgctaggcagtgccgtcttcatcatgtcctacgctcggcccctcaagttctgggagcgcgactacaagtgagtctcacaggaggcgggagcatgccccagcagggcaggaagggagaggtttggagcccaggctggagccacccacagaggggcccacagcaggtatgggagggcttggtcacagtggggacacatgaggcggcagatccaatgcagggagagcctgcaccaggccaaggcttcaggctcacagcttggggatagtggggtctggggatgagcttagcctcccagcttcttggctgtgtgtcctgtgtgagtcccttcatgtacctgagcctcagtctcctcatctgcctgcataacggggctgtcctggatggcgttgaccttgtggcacagggagagcatgagcaggtgcaccctctcttcaccttcttggccaaccgccttgttgcactctctctgaacagcactaaacgtgtggatcattccaacacccgcctggtcacacagctggacaggaaccctggtgtgtacccagccatccaaggggctttaagggcagggcctccctggggagggagcctcgctaacttgtcactttgtccatttgcccgtctgttctgggtcttaggcgctgatgacaacaacctcaactccatcttctatgagcacttgacacgttcgctgcagcacacactgtgtggggacctggtgctgggccgctgggcaactatggccctggtgactgcttcgtcctggcctctgactacctcaacgccctggtgcacctcatcgaggttggcaatggcctcgtcaccttccagctgcgtggccttgagttccggggtgagccgcaggaccaggctcgggtgggcaggcacagctcgggcctgatgtgggagctgtgttcaatagcacgtgcgaaggaggtccagtccagctctgtccaggctggcgggtggccttgggcaaggcactcctcctccctgggcctgcgtttcccagtctgagcaatgaggtggcagggtctcttggccaagccctgtgcctgccccaactttaggtcccagtgactctacaggtcactgcagtgagggcctgggcctggaggtctgagttctcacacccagcctgctctgtggtctcaggcttggcccatgggttgggcgccatgagtgagccagctccttcctctcaggaagacgtgtgtgttggatgcccgagagtgcagaggggccagaccgtgtccctgctccctcccgccctgcccttggatgctgggagttgggaggagaaaggcaggcgctctttcgtgaatcttggcatccaataaggttgactcccctggcgtccaagggggtgaatggcagcaggcctctgatgccatgttggtcactctcccaggacagggcaggtagggattgttctagcagcccctgactgcacacccctcctccacaggcacttactgccagcagcgcgaggtggaggctatcaccgagggtgtggaggaggacgagggctgttgctgctgtgaacctgccacctgccacgggtcctgtccttcaatgctggctttgggcagcgctggctggcttgggaggtaacagccagcaagtacgtgctggagggctatagcattagtgacaataatgctgcctccatgctgcaggttttcgacctccgcaagatcctcatcacctactatgtcaaggtacggtgggcaggtgtggccgggcagcagggccttgcgggtgagcgctcgctgaccagaggccccagtaccccctttctgggttgttgggagcctgttttgtccaagggaagctgaggcctcagagagtttaagtgtcccctgaggtgccactgccagacctcaggttgcagggcctctgtgcccatatggctctgataggtgcccaggcaaggaaggcttgctttgggcagtgagtatggggcaggtgggcagttgcagaggccagcctttgaaaccaccagcccctgcccccagctcacccagcacagagcagtggtagagctaacagttgtcacgttaacgatcatcatgggagcagctgcttgagcagtaacatttaccacgggtgggcgctatgctgggcatctctcctgagctgggtggagtcccccaccctttgagaggggccctgctatctcacagatgtggaagttggcttgcagaggttccagaatctgaagaaaatggccaagccaggccttgaacccaggctggcctgagccacagagctttcctgccttagcctgggggctctgagccaggcctgaggatcttgagacctcttgggggtgggagggggttggtgaggcaatgtggggtacataaggagccctggaatgggggttctgatcagcctggaatgtttcttccctgtgtccctcagcttaccccttgagaagtgggggttattgcagttctctgagatggcagaaatgttgaggcttggccaagcgtggtggctcatgcctgtaatcccagcactttgggaggccaaggcaggtggatcacttgaggtcaagagtttgagactagcctggccaatgtggcgaaaccccatctctactaaaaatacaaaataattagccgggtgtgatggcgggcacctgtagtcccagctacttgggacgctgagacaggagaatcacttgaacctgggaggcagaggttgcagccagccgagatcgtgctactgcactccagcctgggcaacagagcaagactgtctcaaaaaaaaaaaaggaattttgaggcttgtggtgctcagaataagcgtactgggagtggggtggcctgctgatcacagtgcaggctcccacgtgccttcttaggatctaccctggtgctccctatgttgggctcggtgggtggcctactggggcccaggtgagcctgccacctaggttctctctggagtagtttcacgaggccctggctgtccttctccaaaggaaatcctgtccacaccacatatcagaggagctgtcatttgtcattccttctgccctcccagccactcctaggcaaggatttgtgagaccacccccctttcatcaagaaggaggctgtgtctagagagggacattcccagtcccaggtcaccgagaggtcatggcctggtccaccttccggtcccatcttgagagaggtgcccttgcccaggttgccctgctgtgcctgctaggctagggccagcaggttgagatgcacctggccaggtctcttgtcccatggggaagctgactggccacatctaaggctgcctcaaaggctgggcagaatttgagtctggaggaagtgcttggaggacctggggtggctccgctgaggatgtggactgagggtgaagcttggaaggacaagtcagggctgccaggggtggggcggggggaggcgggtgtgctggggagcctggtgcatctggggaagtgtcccagctgcagggataggtcctttccagccttcgaggttggccagtcgaggcggagcccctcccgttagctttgcccttcccgtgggagttactgggctctcagacctgcttctgcagctgggaagggctacaagagcaggaaaaggcaccgtggcttgaggctgcacggagtctgggcagtgcttcccgggaagtaccttgggcagaacgctcgcagtgagcgctcacaggcggagcggctgctggtattgccccccgtcttcattttcttcctaagatgaccgtgagtgttgtgtcagagaaaaggatggcactggtgaaggttaaccaagcacctgatatgtgccaggccagctcctctcccggtccctgaagcttttcttttttttatttttttttgaaacaaggtctcattctgtcacccaggctggagtgcagtggtgccatctgggttcactgcagtgtccacctcccaggttcaagtaatcctcctacctcagcctcccaggtagctggactacaggcatgcaccaccatgcctggctaatttttgtattttttgtagagatggggtttcgccatgttgtccaggctggtcttgaactcctgggttcaagcgatcctcccacctccacctcccgaagttctgggattacaggtgtgagccaccctgtctggctgaagcttttcttttctgggtctttttagcagctctggtggtgcctggattgtagaggcgagctatgggcaagaaagtcagtctggagcgggtctgccctggcaaaggcgctgcccattagctccatcttagggtggcacatggaatccccatcacctcactggctgccctgccggccttaacccgcccgtgcatcctggccatgccagctacctgtcttccaaagctcctgtacttttgcccaacagggccttttaacaagaggtccaggagcccccagctttgggtaccacatgtgcccgtggcttttttctgaggcgaggcctgatggctgtcatgcttcagctgcctaaagggacctgtgacccaggcactctgaggcaggcccactacttcagcctgccttccggccccgagatctggatcccacaatgtcatgatggggaaggtccggggttcaggcggcagttcagtctgttctgccccactcgctccccgccccctgcccatgtgacatctggatgctcccgcgctcggggttatgtttgtgcaggaacaccagctcctgctgctacctggcccacgtgctgcacaggcactgaaggttcacctgagggccacaccatagtgtcggggccagccagaggcgggtgggggacagggttcagggcaggtggggccagctccaccttgatgacttggaagctgaggtggtaaatgttgagtgtgatgatcttgttctcgttgggggctgccatttgtttgagcctcaatttctcatacaaacggggcatattctagggcagaggcaggcagatgctgcttgtgagtgctagccccagcacaggacttcctgctctgtaagtgggtgcttcctggcggctttgtcactcctccctggtctaggggaaggagccaacttgcttggttgctcttgagagctgagatggctctaggagcggggcatcccagaaagcggacttcagctcagtcttggggaggagcctctgaacctccatgctttctcctccagtggccagggcgtggaccccgcctgacgcctgcccctcctctcccagagcatcatctactacgtgagccgctcaccaaagctggaggtgtggctcagccatgagggcatcacggcagccctgaggcctgtgcgggtgccggctatgccgacctcggatcccaccttctcgctgagtgtggatgaggactatgacctccgcctgtctggcctctcgctgccctccttttgtgctgtgcacctcgagtggatccagtactgcgcctcccagcgcaggtcaggctccactacctgaggctgccacctggcgctgtgggactgggcttccctgctccccttctccccatttggtttcctctcactctgagcctcccttagcctgagccccagcccccactccaaggtccctgtcccaggtctgagctgggctctgggatgggggtccttatgccacagcccgtggaccaggattggaactccccgctggtcacgctgtgttttggcctgtgtgtgctgggccgccgggccctgggacagcctctcacagcatgtctgcaaggtgagtgctcgggtgtccgcgggcctactgccgtccccaccccacctcttccacgaagagcactgtggtctctggccacagtgccacagaaactgcagtggcccttcctgttggggtacctcttctcccacgggcagggcacttcctggtcatgaccttgcctgctcctcagtgctctgtgagagacatgggcagagattggcctctttgtcaagatggggaaactgaggctcagcgtgaggaaaggcctctgcttggatcactctgaagccttacccctgggtcctcgacacccctctctcccctccctgtttttcctcccacttagcctggagcccttcctctacggcctgcacgccctgttcaagggggattttcgcatcacctccccacgtgacgagtgggtctttgccgacatggacctgcttcaccgcgttgtggcgcctggggttcgcatggccctcaagcttcaccaggttggggaggggtgtgccagcagcatgggcaggtgggggatgaagcctctctccagggcaggggcactgacccctgttcccgtcttctctaccaggaccacttcacgtccccagatgaatatgaggagccagcagccctatacgatgccattgcggccaacgaggagcggctggtcatctcacatgagggtgaccagcatggcgcagcgccatcctcagcaacacgccctccctgctggctgcgccatgtcctggatgatgcctccgacgagtacaagatcatcatgctcaaccggcgccacctcagcttccgagtcatcaa

SEQ ID NO: 1080 - DNA, 1135 bp, Homo sapiens
gggccgggcagcagcaggagctggtgttcctgcgcaaccgcaaccccgagcgtggcagcatccagaacgccaagcaggcgcttcgcaacatgatcaactcctcctgtgaccagccgctgggctaccccatctacgtgtcgcctctcaccacctcgctggctggcagccacccccagctacgggcactgtggggtggccccatcagcctgggtgccattgcccactggctcctgcgcacctgggagaggtgaggcctcgggaaggggtgacgtgtggcgcgggaggaagctgaggtgcagtacgtccctcctgggtctcagagggaggacgtgctggagccagggcttgaatcccgagagatgaccccctcccagagctgacctgcccctcctagatgtcaccttacccccagagctgacagtggcctttagtcatcaagcactgttgacaacgcaccctcaaaagactctgcaaagtaggtggcagcttcttagaggggaggatcctggggctcagaggtgttagatgacttgtcctggggctgaggactcatgcttgtgaggcctctggcctcagccgtgtccctcctgatcccttttctacctctccacccccaggcttcacaagggctgtggcgccggctgcaatagtggcgggaacgtggatgattcagactgtagtgggggcggtggcctgacctccctcagcaataacccccccgtggcacaccccacacctgagaacacggcaggtgagcaggcgaggctgggctgaacccgtggggtgaggagtgcagcccagctgaggcctctgctgtcttatctgtctcctacaggcaatgggtgaccaacccctcccaccaggccctaggcttgggggccgcggtcctcccttgagtggctctggtgatggtcggcccccacctctgctgcagtggcctccccctcggctccctggaccaccccctgcatcgcctatccccacagagggtccccggacctcacggccccctggcgcgggtctcctcagttctgagggccccagtggaaagtggagcctgggggcccggaagggcctgggaggatctgacggggagccagcctcagggagccccaaaggaggtacccccaaatct

SEQ ID NO: 1081 - DNA, 1886 bp, Homo sapiens
gggccgggcagcagcaggagctggtgttcctgcgcaaccgcaaccccgagcgtggcagcatccagaacgccaagcaggcgcttcgcaacatgatcaactcctcctgtgaccagccgctgggctaccccatctacgtgtcgcctctcaccacctcgctggctggcagccacccccagctacgggcactgtggggtggccccatcagcctgggtgccattgcccactggctcctgcgcacctgggagaggtgaggcctcgggaaggggtgacgtgtggcgcgggaggaagctgaggtgcagtacgtccctcctgggtctcagagggaggacgtgctggagccagggcttgaatcccgagagatgaccccctcccagagctgacctgcccctcctagatgtcaccttacccccagagctgacagtggcctttagtcatcaagcactgttgacaacgcaccctcaaaagactctgcaaagtaggtggcagcttcttagaggggaggatcctggggctcagaggtgttagatgacttgtcctggggctgaggactcatgcttgtgaggcctctggcctcagccgtgtccctcctgatcccttttctacctctccacccccaggcttcacaagggctgtggcgccggctgcaatagtggcgggaacgtggatgattcagactgtagtgggggcggtggcctgacctccctcagcaataacccccccgtggcacaccccacacctgagaacacggcaggtgagcaggcgaggctgggctgaacccgtgggtgaggagtgcagcccagctgaggcctctgctgtcttatctgtctcctacaggcaatggtgaccaacccctcccaccaggccctggctgggggccgcggtcctccctgagtggctctggtgatgggcggcccccacctctgctgcagtggcctccccctcggctcctggaccaccccctgcatcgcctatccccacagagggtccccggacctcacggccccctggcccgggtctcctcagttctgagggccccagtggaaagtggagcctggggggccggaaggggctgggaggatctgacggggagccagcctcagggagccccaaaggaggtacccccaaatctcaggtaaggcacctgtgggagggttgggtcccagaaggctaaggcctgctcacccgccaacctctcccccctcccccaggcgcctctagacctcagcctcagcctcagcctcagcctcagccccgatgtcagcactgaggcctcaccccccagagcttcccaggacattccttgcttggacagcagtgcccctgagagtggcacacctatgggtgccctgggcgactggcctgcccctattgaggagcgtgagagcccggcagcccagcccctgctggaacaccagtactgagctacctggcgcccactggaccacctcctaggattcagtaacggacctgctctgctgcctctctgctggaccacagaactgagtggctttggcctacatgtctgaaccctgacctttggctgccttggccagagtaccaaaactgagtgacccagacctctgaccttgacccctgatctctctcatccccagtccagggcctgggctccccagatggaggcagtctaacctcccagccaggcccttagagcccaaaccaatgggctggtcccacttggagcccttggccaagaccaacttaagacctgggcctgcaatgcctgcaagtgtggcccaccctggcctggacctggggccttaattttgggaaaggtggtttttttttttccctttttttttttttttttttttttttttttttgtgcttcggagacatcagaattaataacactatttttgattttg

SEQ ID NO: 1082 - DNA, 353 bp, Homo sapiens
cgtcgcaaagttataggtgttcacatcttcagaggacaagggtctggcatgggcacagtcccagagctgggcctttagggcaagatccatcttccccactgccccactggaaggtgaggcaagacgggcacgccctgactaggctgtccctgcaggacgcggggagtgctggagaacatcttcggcgtgggcctgagcagccttgtggccttcctgggctacctgctgctgctcaacggcttcttcactgacatctgggtcttccagttctgcctggtcatcgcctcctgccagtactccttgctgaaggtcaggccgggctctctgtgtttccttccccacccgacttttcc

SEQ ID NO: 1083 - DNA, 1847 bp, Homo sapiens
  SITE (1691): n equals a,t,g, or c
gagctggtgttcctgcgcaaccgcaaccccgagcgtggcagcatccagaacgccaagcaggcgttcgcaacatgatcaactcctcctgtgaccagccgctgggtaccccatctacgtgtcgcctctcaccacctcgctggctggcagcacccccagctacgggcactgtggggtggccccatcagcctgggtgccattgcccactggctcctgcgcacctgggagaggtgaggcctcgggaaggggtgacgtgtggcgcgggaggaagctgaggtgcagtacgtccctcctgggtctcagagggaggacgtgctggagccagggcttgaatcccgagagatgaccccctcccagagctgacctgcccctcctagatgtcaccttacccccagagctgacagtggcctttagtcatcaagcactgttgacaacgcaccctcaaaagactctgcaaagtaggtggcagcttcttagaggggaggatcctggggctcagaggtgttagatgacttgtcctggggctgaggactcatgcttgtgaggcctcttcgtcagccgtgtccctcctgatcccttttctacctctccacccccaggcttcacaagggctgtggcgccggctgcaatagtggcgggaacgtggatgattcagactgtagtgggggcggtggctgacctccctcagcaataacccccccgtggcacaccccacacctgagaacacggcaggtgagcaggcgaggctgggctgaacccgtgggtgaggagtgcagcccagctgaggcctctgctgtcttatctgtctcctacaggcaatggtgaccaacccctcccaccaggccctggctggggccgcggtcctccctgagtggctctggtgatgggcggcccccacctctgctgcagtggcctccccctcggctccctggaccaccccctgcatcgcctatccccacagagggtccccggacctcacggccccctggcccgggtctcctcagttctgagggccccagtggaaagtggagcctggggggccggaaggggctgggaggatctgacggggagccagcctcagggagccccaaaggaggtacccccaaatctcaggtaaggcacctgtgggagggttgggtcccagaaggctaaggcctgctcacccgccaacctctcccccctcccccaggcgcctctagacctcagcctcagcctcagcctcagcctcagccccgatgtcagcactgaggcctcaccccccagagcttcccaggacattccttgcttggacagcagtgcccctgagagtgcacacctatgggtgccctggcgactggcctgcccctattgaggagcgtgagagcccggcagcccagcccctgctggaacaccagtactgagctacctggcgcccactggaccacctcctaggattcagtaacggacctgctctgctgcctctctgctggaccacagaactgagtggctttggcctacatgtctgaaccctgacctttggctgccttggccagagtaccaaaactgagtgacccagacctctgaccttgacccctgatctctctcatccccagtccagggcctgggctccccagatgagcagtcagcctcccagccagccctaagagccaaaccatgggctggtcccacttggagcttggccaggaccacctcancccctgggctcactgcctgcaggtgtgccccttgcctgacctggggcctgaattgtgggaagggtggtttctttcgtgccttttttttctgttcttttttttttttttttttgtgcttcggagacatcagaattaataacactatttttgattttg

SEQ ID NO: 1084 - DNA, 354 bp, Homo sapiens
catttatgttgtctaggccagtgctactcaaaaatggtccacaacaaggtaagatgcttatgccagaatgtgaaacactgaactactatcttcatgcagaaagccttgctccaaaaggtaaaactattagctgaactaagtaataaatagtgtgcttagtgatatagttggtttacatttagttgaagttcttaatctcactgtggactagtaatgaatgaacagtcctcagataggcagtcaagttcgcagacattctgagtagcagtgaggtctggcaacatggctcatcttagccacagttcaattagaataggtgtgaccaggcacagtggctcacgcctgtaatctagc

SEQ ID NO: 1085 - DNA, 254 bp, Homo sapiens
ccttttcccaaaaaaaaaaaaaaaaaaaagagttctgaaatagtaatgtggagagaggaattaggtctgtttgagagatcacagacaattcataggaaaggaaacatatgagttaggcttcaaaaaagtagtggttgtgttgctagagagaaagagtcaaagggaaaaaatacaggagtaaatttatagaagttaaccacacaggtatatttgagcatgtttagaaatccatataatcctggtgaattggtgtt

SEQ ID NO: 1086 - DNA, 441 bp, Homo sapiens
aactcccacttatgagtgagaacacacggtgtttagttttctgttcctgtgttagtttgctgagaatgatggtttccagcttcatccatgtccctgcaaaggacatgaactcattcttttttatggctccatagtattccatggtgtatatgtgccacattttctttatccagtctatcattgatgggcatttgggttggttccaagtctctgctattgtaaatagtgctgcaataaacatatgtgtgcatgtgtctttatagcagaatgatttataagcctttgggtatatacccagtaatgggattgctgggtcaaatggtatttctgattctggatccttcaggaatcaccacacggtccttccaaaatggttgaactaatttacactcccaccaacagtgtaaaagtgctcctatttctccacagccttgccagcat

SEQ ID NO: 1087 - DNA, 481 bp, Homo sapiens
gggaaattccctggccactggggtaatgtttcaaagaggaatggaaccactttcgctgcataaaagagtccacgctgggagccgggcagcaggtggcaatgagacccacccagctcccatgcctttgacaaggcagatctcacacccacagacttctgctggcagaaagctgcaagggccggctgggtcccacagtgcaagactgccacacactgcaagacttcccccgcaagacagaaaccgcagctcttaggccacaccccttctagtttggcccacgaagcaggggcacctggctcctgtgtccatgccagaagcatgctttatgcttaagattaggttgcaaatctcgcttgggagcttctttcagcctgtggccatctcctgagttagctagcagattttcacgtgggcgtctgtgagttggattaggagtgtcttccttctgcccctcctggcgcctgggcgggcatgcaaagca

SEQ ID NO: 1088 - DNA, 481 bp, Homo sapiens
gggaaattccctggccactggggtaatgtttcagagaggaatggaaccactttcgctgcataaaagagtccacgctgggagccgggcagcaggtggcaatgagacccacccagctcccatgcctttgacaaggcagatctcacacccacagacttctgctggcagaaagctgcaagggccggctgggtcccacagtgcaagactgccacacactgcaagacttcccccgcaagacagaaaccgcagctcttaggccacaccccttctagtttggcccacgaagcaggggcacctggctcctgtgtccatgccagaagcatgctttatgcttaagattaggttgcaaatctcgcttgggagcttctttcagcctgtggccatctcctgagttagctagcagattttcacgtgggcgtctgtgagttggattaggagtgtcttccttctgcccctcctggcgcctgggcgggcatgcaaagca

SEQ ID NO: 1089 - DNA, 253 bp, Homo sapiens
cttactaatatggtatgccttctgttggtacctatgactcttaattaatttttggtcctgttgagatttctggtcaagagaaattccatccccccaacctcctccttgagctgtttttcctatcctagcctctcaggcacagatctagccatttcccctgacttttagactgttatgcaaggcgactacatttagagctggtcactctgcattttgtacacattgaattaaagatatagcataatacattctg

SEQ ID NO: 1090 - DNA, 253 bp, Homo sapiens; identical to SEQ ID NO: 1089

SEQ ID NO: 1091 - DNA, 4063 bp, Homo sapiens
ctttgagtgaatgtggccatagagtttctccctctctttttcttccccctcttccttttttgaaaaaagaaaaaaaaggaagaaaaaagataatttgatttttaaaaaaaatctctctccctgagctctccccaagtttctttaaaacaaatcaacaacaacacaattggagcagtgccttagctagaatgaattatgccagtatgctgtggctctttccctgactctctcctctgacttgtttaaggctgcggtttccgaggccctctccagccaaggaaaagctacacaaaaagcctggatcactcatcgaaccacccctgaagccagtgaaggctctctcgcctcgccctctagcgttcgtctggagtagcgccaccccggcttcctggggacacagggttggcaccatggggcccaccagcgtcccgctggtcaaggcccaccgcagctcggtctctgactacgtcaactatgatatcatcgtccggcattacaactacacgggaaagctgaatatcagcgcggacaaggagaacagcattaaactgacctcggtggtgttcattctcatctgctgctttatcatcctggagaacatctttgtcttgctgaccatttggaaaaccaagaaattccaccgacccatgtactattttattggcaatctggccctctcagacctgttggcaggagtagcctacacagctaacctgctcttgtctggggccaccacctacaagctcactcccgcccagtggtttctgcgggaagggagtatgtttgtggccctgtcagcctccgtgttcagtctcctcgccatcgccattgagcgctatatcacaatgctgaaaatgaaactccacaacgggagcaataacttccgcctcttcctgctaatcagcgcctgctgggtcatctccctcatcctgggtggcctgcctatcatgggctggaactgcatcagtgcgctgtccagctgctccaccgtgctgccgctctaccacaagcactatatcctcttctgcaccacggtcttcactctgcttctgctctccatcgtcattctgtactgcagaatctactccttggtcaggactcggagccgccgcctgacgttccgcaagaacatttccaaggccagccgcagctctgagaagtcgctggcgctgctcaagaccgtaattatcgtcctgagcgtcttcatcgcctgctgggcaccgctcttcatcctgctcctgctggatgtgggctgcaaggtgaagacctgtgacatcctcttcagagcggagtacttcctggtgttagctgtgctcaactccggcaccaaccccatcatttacactctgaccaacaaggagatgcgtcgggccttcatccggatcatgtcctgctgcaagtgcccgagcggagactctgctggcaaattcaagcgacccatcatcgccggcatggaattcagccgcagcaaatcggacaattcctcccacccccagaaagacgaaggggacaacccagagaccattatgtcttctggaaacgtcaactcttcttcctagaactggaagctgtccacccaccggaagcgctctttacttggtcgctggccaccccagtgtttggaaaaaaatctctgggcttcgactgctgccagggaggagctgctgcaagccagagggaggaagggggagaatacgaacagcctggtggtgtcgggtgttggtgggtagagttagttcctgtgaacaatgcactgggaagggtggagatcaggtcccggcctggaatatattttctacccccctggagctttgattttgcactgagccaaaggtctagcattgtcaagctcctaaagggttcatttggcccctcctcaaagactaatgtccccatgtgaaagcgtctctttgtctggagctttgaggagatgttttccttcactttagtttcaaacccaagtgagtgtgtgcacttctgcttctttagggatgccctgtacatcccacaccccaccctcccttcccttcatacccctcctcaacgttcttttactttatactttaactacctgagagttatcagagctggggttgtggaatgatcgatcatctatagcaaataggctatgttgagtacgtaggctgtgggaagatgaagatggtttggaggtgtaaaacaatgtccttcgctgaggccaaagtttccatgtaagcgggatccgttttttggaatttggttgaagtcactttgatttctttaaaaaacatcttttcaatgaaatgtgttaccatttcatatccattgaagccgaaatctgcataaggaagcccactttatctaaatgatattagccaggatccttggtgtcctaggagaaacagacaagcaaaacaaagtgaaaaccgaatggattaacttttgcaaaccaagggagatttcttagcaaatgagtctaacaaatatgacatctgtctttggcacttttgttgatgtttatttcagaatgttgtgtgattcatttcaagcaacaacatggttgtattttgttgtgttaaaagtacttttcttgatttttgaatgtatttgtttcagcagaagtcattttattggatttttctaacccgtgttaacaccattgaatgtgtatttcttaagaaaataccaccctcttgtgcccttaaaagcattactttaactggtagggaacgccagaaacttttcagtccagctattcattagatagtaattgaagatatgtataaatattacaaagaataaaaatatattactgtctctttagtatggttttcagtgcaattaaaccgagagatgtcttgtttttttaaaaagaatagtatttaataggtttctgacttttgtggatcattttgcacatagctttatcaacttttaaacattaataaactgatttttttaaagatccctttgtgaagagcattcttaaaaataattattgagtcatctactggattgtgtagctctttggaatcaaagtgaaggacaaatttctattattctttaaaggatttttaccttaactagggtgtgaaaaaagtgtggtttgtttagaaaccactctatctttttcaggaagagaaacttcaataagttaacactgaagagtagtaaagaatgagataaaaaccaccaaccttctgaataccacattggctagtaagtagaattgtttgagttttaaactgcatttaagccaaataaattaaatgcaataattctgtcatcaaatatgggcttttaaagaaattatacacaaaaatgtggttgtaaatctagtttaaatgatgagactcaatcatcattcaaaacccatcaaaaaagcatacattcttggcctttcaccaacatgttggggaagtggggatatggatatgggtattaaatcatgtgttttttttttttttttttcaggacactgtcttggcttctcccagcctatcttctgaaccacatagaagtatacagtatcagtgaagcagctagctgtaaaatgtgggctgagtagcataacacttttatctgaaaaccttcaattcatagtatctgaaagcattaatattctcagtcattaatttttccaactacaaaatgaaggcactttgcaagcatcacagacttattgtaatagttaattcttgtttttgattattgtcatcttttgggggattaaagtgttttggcatgttgggctctctaatcttttcgctactttcagaatttgtgctttcaagtgtcattgtatatgcacaggacacagttgggacatgaagataaacctcacctaatagagtagatgtcatttctgggtaaggttaactgtgggaaacagaaatgtgttcactaaggaaaccttaggtcacaacctccagtttcctgaaggaaatgccaaaaatgctccaaagacaaaaggctggaaacaaactggaatgtctctctccatctgtctgctaaggcggaaggaatgatttcatgttacattcacttcctagactttcattacagagtcaagcataatggaaaa

SEQ ID NO: 1092 - DNA, 3381 bp, Homo sapiens
cctgttggcaggagtagcctacacagctaacctgctcttgtctggggccaccacctacaagctcactcccgcccagtggtttctgcgggaagggagtatgtttgtggccctgtcagcctccgtgttcagtctcctcgccatcgccattgagcgctatatcacaatgctgaaaatgaaactccacaacgggagcaataacttccgcctcttcctgctaatcagcgcctgctgggtcatctccctcatcctgggtggcctgcctatcatgggctggaactgcatcagtgcgctgtccagctgctccaccgtgctgccgctctaccacaagcactatatcctcttctgcaccacggtcttcactctgcttctgctctccatcgtcattctgtactgcagaatctactccttggtcaggactcggagccgccgcctgacgttccgcaagaacatttccaaggccagccgcagctctgagaagtcgctggcgctgctcaagaccgtaattatcgtcctgagcgtcttcatcgcctgctgggcaccgctcttcatcctgctcctgctggatgtgggctgcaaggtgaagacctgtgacatcctcttcagagcggagtacttcctggtgttagctgtgctcaactccggcaccaaccccatcatttacactctgaccaacaaggagatgcgtcgggccttcatccggatcatgtcctgctgcaagtgcccgagcggagactctgctggcaaattcaagcgacccatcatcgccggcatggaattcagccgcagcaaatcggacaattcctcccacccccagaaagacgaaggggacaacccagagaccattatgtcttctggaaacgtcaactcttcttcctagaactggaagctgtccacccaccggaagcgctctttacttggtcgctggccaccccagtgtttggaaaaaaatctctgggcttcgactgctgccagggaggagctgctgcaagccagagggaggaagggggagaatacgaacagcctggtggtgtcgggtgttggtgggtagagttagttcctgtgaacaatgcactgggaagggtggagatcaggtcccggcctggaatatattttctacccccctggagctttgattttgcactgagccaaaggtctagcattgtcaagctcctaaagggttcatttggcccctcctcaaagactaatgtccccatgtgaaagcgtctctttgtctggagctttgaggagatgttttccttcactttagtttcaaacccaagtgagtgtgtgcacttctgcttctttagggatgccctgtacatcccacaccccaccctcccttcccttcatacccctcctcaacgttcttttactttatactttaactacctgagagttatcagagctggggttgtggaatgatcgatcatctatagcaaataggctatgttgagtacgtaggctgtgggaagatgaagatggtttggaggtgtaaaacaatgtccttcgctgaggccaaagtttccatgtaagcgggatccgttttttggaatttggttgaagtcactttgatttctttaaaaaacatcttttcaatgaaatgtgttaccatttcatatccattgaagccgaaatctgcataaggaagcccactttatctaaatgatattagccaggatccttggtgtcctaggagaaacagacaagcaaaacaaagtgaaaaccgaatggattaacttttgcaaaccaagggagatttcttagcaaatgagtctaacaaatatgacatctgtctttggcacttttgttgatgtttatttcagaatgttgtgtgattcatttcaagcaacaacatggttgtattttgttgtgttaaaagtacttttcttgatttttgaatgtatttgtttcagcagaagtcattttattggatttttctaacccgtgttaacaccattgaatgtgtatttcttaagaaaataccaccctcttgtgcccttaaaagcattactttaactggtagggaacgccagaaacttttcagtccagctattcattagatagtaattgaagatatgtataaatattacaaagaataaaaatatattactgtctctttagtatggttttcagtgcaattaaaccgagagatgtcttgtttttttaaaaagaatagtatttaataggtttctgacttttgtggatcattttgcacatagctttatcaacttttaaacattaataaactgatttttttaaagatccctttgtgaagagcattcttaaaaataattattgagtcatctactggattgtgtagctctttggaatcaaagtgaaggacaaatttctattattctttaaaggatttttaccttaactagggtgtgaaaaaagtgtggtttgtttagaaaccactctatctttttcaggaagagaaacttcaataagttaacactgaagagtagtaaagaatgagataaaaaccaccaaccttctgaataccacattggctagtaagtagaattgtttgagttttaaactgcatttaagccaaataaattaaatgcaataattctgtcatcaaatatgggcttttaaagaaattatacacaaaaatgtggttgtaaatctagtttaaatgatgagactcaatcatcattcaaaacccatcaaaaaagcatacattcttggcctttcaccaacatgttggggaagtggggatatggatatgggtattaaatcatgtgttttttttttttttttttcaggacactgtcttggcttctcccagcctatcttctgaaccacatagaagtatacagtatcagtgaagcagctagctgtaaaatgtgggctgagtagcataacacttttatctgaaaaccttcaattcatagtatctgaaagcattaatattctcagtcattaatttttccaactacaaaatgaaggcactttgcaagcatcacagacttattgtaatagttaattcttgtttttgattattgtcatcttttgggggattaaagtgttttggcatgttgggctctctaatcttttcgctactttcagaatttgtgctttcaagtgtcattgtatatgcacaggacacagttgggacatgaagataaacctcacctaatagagtagatgtcatttctgggtaaggttaactgtgggaaacagaaatgtgttcactaaggaaaccttaggtcacaacctccagtttcctgaaggaaatgccaaaaatgctccaaagacaaaaggctggaaacaaactggaatgtctctctccatctgtctgctaaggcggaaggaatgatttcatgttacattcacttcctagactttcattacagagtcaagcataatggaaaa

SEQ ID NO: 1093 - DNA, 589 bp, Homo sapiens
aaaatagtcaggaaagttatgaagtaacatcatataatactttatccccaacaatattaaatgtgattacaattttacagaatattcaaatcaaaatgttatataagacaaattattattcttgcttttacatctccttagaaggagaaacattcaattgttttaaaaatgttctatttatttttcagaaatgaggtgttgccttcttgcccaggctagtatgcagtggcacaatcatagctcactgcagccttgaattcttgggctcaagtgatcttcctgccccaagcctcccaagtagctgggaccacaggcacgtgccaccatgcctggctgatttttttttttttttaatgttttgtagagacaggatctcagtatgttgcgcaggctggtctttaattcctgggctcaagtgatcctcccatagatttgtctgtgttttctctaaataggttataaataccttgagggaggaatcacaaataactaaaagaaacttttgtagagactatcagagtattatttccttgtggacacagtaaatgtatgatgatgagaaatcataataaactacaacattttctcc

SEQ ID NO: 1094 - DNA, 589 bp, Homo sapiens; identical to SEQ ID NO: 1093

SEQ ID NO: 1095 - DNA, 2407 bp, Homo sapiens
agcccagctacttcgagatccccacgaaggagaccccgcagccgtcgcagccccccgaggtgccggcacacgagatgcccacgaaggatgcagaggcaggtgggggcggagcggcccctgtggtgcagagccacgcctccttcaccatcgagtttgatgactgcagccctggcaagatgaagatcaaggaccatatcaccaagttttccctgcgccagcggcggcccccgggcaaggaggccacacctggcgagatggtgtcggctgagaccaaggtggccgactggctggtgcagaatgacccgagcctgctgcaccgggttggccctggggatgaccgccacagcaccaagagcgacctgcctgtccacacccgcaccctgaagggtgagtgcccagctggcggccgtgccagtcccgggacaggcaggggaccggactttggctgggtctgcactgttgccatgcagaggggcccattcagctgggttgacttcccatttttcagttaattgcctaagagccacctgcctggtcaggagtccggtcctgcgtcttcccgttgcacttctttgccctgtgtgggggggccctgagggctggggtgctttgtcaactcagctaaggcatggggtgatgaggctgcctgagatcgacagctgtttcctttctctcggcctgacaaggtggggtcccctgtctcccccaggccacaagcacgaggacggcacgcagagtgactcagaggaccccctggccaaggcggcctcggccgccggggtgcccttggaggccagcggggagcaggtgcggctgcagaggcagatcaagcgggacccccaggagctactacataaccagcaggcctttgtcatcgagttcttcgacgaggacacgccccgaaagaagcgctcccagtccttcacgcacagcccgtccggggaccccaaggccgacaagcgccgtggcccaacgccggccgatagggaccgccccagtgtcccagccccagtccaggcagggggccgcagctcggggccacagagggccggctcgctcaagcgggagaagacagaggaacggctgggcagcccctcgcccgcctcccgaacccctgcccgccccttcggaagcgtggggcgccgctcccgcctggcccaggacttcatggcccagtgtctgcgggagagctccccggccacccggcccagccccgagaaggttcctccggtgctgcccgctcccctgacaccccatgggaccagccccgtgggccccccgaccccaccgcccgcccccacggacccccagctgaccaaggcacggaaacaggaggaggacgacagcctcagtgacgcagggacatacaccatcgagaccgaggcgcaggacacggaggtggaggaggcccggaagatgatcgaccaggtgcagcccagcggcgagtgagagccctcgtggggaacggggggtggaggcgatgccgggggtggcgagtgagagccctcgtggggaacggggggtggaggcgatgccgggggtggcgagtgagagccctcgtggggaacggggggtggaggtgatgccgggggtggcgagtgagagccctcgtggggaaccgggggtggaggcgatgccgggggtggcgagtgagagcactcgtggggaacggggggtggaggcgatgccgggggtggcgagtgagagccctcgtggggaacggggggtggaggtgatgccgggggtggcgagtgagagccctcgtggggaaccgggggtggaggtgatgccgggggtggcgagtgagagccctcgtggggaacgggggggtggaggcgatgccgggggtggcgagtgagagccctcgtggggaatcgggggtggaggcgatgccgggggtggcgagtgagagtactcgtggggaacggggggtggaggcgatgccgggggtggaggtgggcggacgttgtcctgctccggcccagccctggctcctgcctctggcccagctgggcaggagggagcctggtatgctgcccacagccccgcccctccccttcccagggctgggtccgtatcccatccgcatgtcctgctgacagccaggctgcatgtcccggccaccagccactctggccaaccaggtccctgctctccctgtggcctgggggtggccggtgtcagtggagggttgggaggtgggcttctctgaccctcggtgcctgggaccatttcctcttggcaggtctttggggtgttggagtcccctgaactctccagggcatcttcggccacctttcgcccagtcatcagaggggacagagatgagtctgatgacgggggcgtggcccagcggatggcgctactgcaggagtttgcctcccggccactgggtgcggccccccag

SEQ ID NO: 1096 - DNA, 427 bp, Homo sapiens
caggagcccccaggaggggcccacgtggagcaggggtcggcgctcaccaagggcccccggggagccaactcccgcctctttcttcattggggaccagaatggggacgctgtgttatctaggaaaccgcttgcggctccaggggatggggagggcctagggcagacagcccagcccagccccccagcacgggatggcgtctatgtcagtgccaatgggagaatggtcatccagctacggcctggacggtccccagaacccgacggccctgccccagcctttctccggcaagagagcttcactaaggagccagccagtggtcccccagcgcccggcaagcccccccacatctccagccacccgcttctacaggacctggccgctacccgggccgcacgcatggacttccactcccaggacacccacctg

SEQ ID NO: 1097 - DNA, 4949 bp, Homo sapiens
gacgtttgtgaatgacatgcgcatcccggaccagaagtacgtcacgctgaagctcaacgatgtcatccgcttcggctacgatatcctgcccctgagcgtccctcctcctgggcttcttctcagtccccaggaccacagtcaccctgttactccagaagcagggctgtcactgctggggttgctgggtaacagagcaccaaggatgaccctagggctgggctccacctgctgatggagcaccccaaggaatgccagtccctgcagcccggccccccgtggacaccctggccacgggtacctgctgcttgcccacccacccagcctgaggtcacatggggcctggggaactggtgaccactccctaggaccccgagtcctggcccgaccttgggactgtctgagcacatgggtgggcatggctgtgcctccccgggaagaaagaggcccctcctctgcctgcctcgatgggcccttgagctggcacacctgttgctgggcgtggacttcagcgctgggctcctggctcttctgctctgtgttcgccttaacacgtgtccacattccaacatgtatgtgctggagcgtgtgcagcaccgagtcccggaggaggcactcaaggttagtgctggccaagcccgggtggctcagccacgagggctcagccccccatcctccccaccatgctcccgctgccatctccccagcaaacactcaccaggcctctggggcgccctgttcaggctgcgggtgccatgagtcaggccagcctgtcctgccctgccagatggcccagtccggcaggtgggaaggtagtcattacccccagcctgctgcagtgacaggtggcgggggcaccgggacgcgggtgccactgttgtggatgcagcagcatccgggctctgggaggggcctgggaggagccgggctgcatggtcagcctgctggagctcctgggctttcggagctgcatcgctgggcactggcggatttagctgtggctcacagaacaaatggctcattgggtgagctgggtggccagagcccaggaagctgctggggtcaccctgcaggagagtgcagcggggctgaggcgggggccagcagcctccccgggagcagagggccccgttcagagggccaggagggtatagagcccctgagccccccagcatctttttgggagtgtctctcaggttaagtagctttggggtctcataaggggctttagattctctgacattacagttatttggagtcttcgaagctgaagggattaagagtctctagacagagtgtttagggtctctgaggctggggaatttggtctctctgtgagtgagatatttagggttccttaggctcgggggatttgaggatctacgtgttagaggatttggcgttcctctgggtgaagggatttgaggtctctgaagctgaggtgctttggggtctcatgcccaggggattaagttcgctccaggttaacggatttgagtccttcaaggtggcaggatttggggtcacttcaggctgagaggatttgttgcttcttagggtgaggggatctgaggtctcctgggctgaaatctgaaggtcttaggctgagggtttataagggttttacgctgcacgaccaaggccccccgagttcctgtcagtctctccgatctcctcccgcactgcccgccctggccgggtgccctctcggagcccctcaggaggtaacagctgcccccagcacattgatgaggccgccagcagggggtggccagaggcaggaaggaagggtgctggaggccgacggtggcagccttcaggggtgggcatccttgcgtgccctttccccggtgtgctggcgacacgcacagccggggcccctgtggggggcgtgagggtcctaggtgggaacggcgtctcctcgccctcacttgttcatgtgggagttgtggagcacagattcagggccctgttcagagctccccgggagccctttggggccagggcgcttagcccgttcctcggatgatctccgagcagcctggggtcccccagcctgcaaggggcagggcctaagggagtcaggttctgtctgatggcacaagcggccctgctgcccatcccagggcccccactctgatgatcgcagcctgctctgtcctgccccacccaagcaggcccctgctttccctggaagctgcccctccccaggcttgagctggaccccgagccgtgttacctgggcaggctgaggctctgtctgctcttttggggagcattagggagagcttgtgacatgcaaagtcatagctgggccctctggatggagaggagaggctgggcccaccctggtgggttcctcctgaggctgggcccagtacctcaccccgcctggcctgcccacagcatgaaaagtacaccagccagctgcaggtgagcgtgaagggtttggcgcccaagaggagcgaggcactgccggaacacacaccatactgcgaggcctcgaaccccaggccggagaagggggaccggagaccaggaacaggtaggcccaggcagtgcggatggggtgagcacacagggccactgccaggccctctgccccgcacctgcctctctgcaccccttaaccctctgcatgcatataccatgtacacccatacccctcaccctttgcacacacctacccctgcacatgcacacccctcacccattgtgcacacctacccttgcacacccacattcctcacccattgcacacacctacccgtgcatgcctgcacccctcacttctgtacacacctacccatgcatgcctgcatcttcgttatacacaccctactcatgcacacccacaccactcacccctgtgcacacctacccatacatgcccatagctctcactgctgtgcacagacctatcatgcccacccatactgctcacccctgtgcactcacacccccacccctgtacacacatctacctgtgcacacccacatccctcacctcttaccccacacacacagctagccatgcacacccacactgctcacccctgtgcacacctacctgtgcacacctgcaccccttgagcccacagttcttgtggggttggtgggccaccagctgggcaccctctgtccccagtggtgagaggcaggtgatgggggggtgaggctatgctccctagtatcaggcatttggactggattctgcagaccgagccagcagggctcaggggttggtggtttctgatgaaacctgatttgtgcctttggcagtcagtgcagcgggtaggcagaagtctgggaggaggacagctgcacgagggtccgcgtgggtccggtgggcacaaagggaagggaaggagcgagagtgagaaagtgcctggtggggtgtggaggggtcggggtggggtatccaagcctgaggccccagacttgagttctggttagacaggggtgtatccggggatcaggctctcggctcccacctcggtccaggaggggtcaccctgccacccccagctttggccccatgtctgctgtgttctgctgtcagcccacacatctgtgttgtacagccgcagctgccggtgtctggttgggatgcaggtccgcccagaatggaagaccgctggggactgggaagctttccagaaagccatctgagctccccagagcacctgtcagtgtccagactgtgaaacacatgcagctggtgacagccagtgtggggctgtcccggaggtcatgacaggtgcagccagctgggcagcctggctccttggctccgttagagcgagggcagcacattgtggggaccaaggaggggttcagggccggcagcagatggggactgcctggtagcagatgcccctgcctcagcagcccctgggtgtgtccctgggtcaagagggagtccccagggaggggtaaggcgtgtgtgacacatctcaggggccctgcatccccagcgcagtgtgcacatggttccctatgggtaactggccccagcgcagtgtgcacatggttcctgacgggtgactggccccagaccctctggccccccagcagtgtaagcagctgggggccatgacgcagaggccccctgggcttccgcaaggatggaaagagcttgggtggagggcccaggaaggagactgtgggcatgagggccagcgccctgacctgagggcactggacactgcttctgttcactgctgccatcaggaagggctgggctgccggcttctcagagggagtcaggagtgagattctatctgaaatatacaatttccctcctggtcattaaggcaaacaaactaaaatgccgcagggaccatgtagattgcagtggctgcccacccccagggccacccatttgtggcctgaaccatttaccagccttggaggtggctggacccaggtgtgggctccccctggcctcctgccctctgttggatgcgctctggggtcgggaaggccggggcagggttgcaggacggaggtgggtggcccccaccatgccccaggggatgagcctctgagtacatcagaggggagagaggaggggccaggcagggaggaggggccaggcaggcagggagcctctaagcacttgtgggaggaggtggggccaggcagggaggggccagtgagccacctcggaactcaaggtagtcaacattccccacagaggcggggccctgggctgccacagggccaagctgggaggtgatgccagggcctgccccagagtccagcctctcctgggctgccagttctctgcttttcacactgggggccccagcaacacagggtctgacctctcgctccctccacagaggcagcctcttaccgcacacccctgtatgggcagccctcctggtggggtgaggacgatggtagcacgctgcctgacgcccagcgccagggagagccctacccag

SEQ ID NO: 1098 - DNA, 816 bp, Homo sapiens
atcaactatgtgaatagtttgtcgacctgctagagaaattaaggagacctgggagtgtcatggtactataactacactggtgatgtcaaacagtatcacactggtactcactgctgagatgctttaagacaacagcgctagaatgtatgctggtatttacctggacttcccctcccattacggtgttaatctctgtttaacatatcattgtttacaaaactcctatattttgttttgtttgggcctaactccctgagttaagcagggaaggcccatttgatcccgttttacagacgaggagacagaggttcagagtggttgagttgcccaagaaacttgagctaatcattttcagctgggacaaggacccagctatcgtaattcctaatccaggatttggatacccttacattttgctgtctgcattttaaaagtgccttccttagatgacatctttctaatccccacccttggcttggtaatgctttactccctccaaatgttgtgagtagtctctttttgtattcctttctcaacccacacttaatttcctctgtgtttcttttcttggtctcagtgaagttattgccagtggactgtgagagaaaaacagatgaggtgagtttgagtttctctggtttttattattcttcctgaggatattagcctccatcaggaggtaaacttccccagaaaaagaataggatcattttcagggagtgcttcctgtaatgtaccagagtcacattgtgttctgtgatgttcttgtcaggctcaattgtggcagtgaaggaatacttgaaatagaattgacct

SEQ ID NO: 1099 - DNA, 977 bp, Homo sapiens
taactttctgtaagacttctcagtgctgttagttttgtcttttaattagaaaaaagttccatggtttctatttcttggtccttcacatctctaaatgaatcagacccacaagtgaatggcacatttgttccctggccttctctgatctggacacactcaggctccacttgagtgagcccagacaggtaccctccaggtcctagctacagatgcgctccgtgggcagacggcattcagcacctgccagcgagggcttcagacgcagatatccctatttgtaaccattcagaccttcatcagagcatcagaaagcaggggctgggccatctcaatgcaggctttgtggagctaagatttcatggggcacccttggcctttctggagggtggacacaggaacaagcaggtggggacgtgtttcttggctttggtgaggctcttgctgaaagtcttattctttgcatggctccaggcttaccgagatcacagacgggcatttgaatttcagattcatgttctttcccttttcggtcgttgaagacggtgacactttgtgtttttctttctgcctttgtgctgctgaaaacgtggggacaggctgggagtgggtgtgttgtcttaatcaggccgtctcgttgtctggtaccgtctgtcctcctgtttcctttaggtggtagcagcctctgctgagtggtttgtgtgagttcgcactgaatcctaccacaatccttactcagatgagggctctgagattccacctaacgggagacgagatggcagctgctgacattctgccctgtctgcaagctctcctagctcttccagctctcccatctctgcaaactccgacagcagttgctcttcctctgaggaagctgagcgactgcatcatcccccgaccacgtcgcctctgctcagccctcttaatggccgtcattccaagggaaaggcaggagccaggagcctctgggatgcagc

SEQ ID NO: 1100 - DNA, 549 bp, Homo sapiens
gtcctggccatggccggcctgtcggacctggaactgcggcgggagctgcaggccctgggcttccagccaggacccatcaccgacaccacccgggatgtctaccgcaacaagctgcgccgcctgcggggcgaggcccggctgcgcgacgaggagcggctgcgggaggaggcccggccgcggggcgaggagcggttacgggaagaggcccggttacgcgaggatgcgccgctgcgcgcccggcccgccgcggcctctccgcgggcggagccctggctctcccagccggcctcgggctcggcctacgcgacccctggggcctacggtgatatccggccctccgcggcttcctgggtagggagccgcggcctcgcctatcctgcccgcccggcgcaactcaggcgccgcgcctcggtccggggcagctccgaggaggacgaggacgcccggacgcccgacagggccacgcagggcccgggtctcgcggcccgccgctggtgggcagcgtctcccgccccggcgcggctgccttcctccctcctcggtcccgac

SEQ ID NO: 1101 - DNA, 5530 bp, Homo sapiens
gcctcgccggcgcctccatcccggatccttgctgcagcgtcagcgccgccgcccgtgcctttcctcttcctcctcctcctccttggcatccgcctcttcttcctcctgcgtcctcccccgctgcctccgctgctcccgacgcggagcccggagcccgcgccgagcccctggcctcgcggtgccatgctgccccggcggcggcgctgaaggatggcgacgccgctgcctccgccctccccgcggcacctgcggctgctgcggctgctgctctccggcctcgtcctcggcgccgccctgcgtggagccgccgccggccacccgggtgagcgagcgcgctgggcgcaggccgcggggcgccccggggccgggatcgccgggcggggaccgggttgccgggcgccgccgccctcgtcctgcccaggcccgcaggccctgcaggcctggtccgctggtggcgggggccccgcctcgcccacgatggaataaacaggcctggccggagggcgcagcgcggagcctccaaaaggccgcgccggatggggcttctgccggttcccagaggcgtaccttacattcatggcttcttccgccgggagcgcgtctggctcaggcctccgcgccgcggccatctggctctgggcgggcccgccgggagtctgcctgtgtgcgtctctgtgtctccgtgttcggggctcctgcgggtgtggggctggccctgagtgcccgccggcttcgctgccggtgcgcgtcccggggtcggggcctcagtgctgctctgcctgtcctcacgccttgggtggcgctgggcaccggccttgtgcgccatggtgggcgctgaagttctgggggcacttatggcgcaggctcggggtgctgttctagcttcaataggagggagactgttgcagcctcagagcctccgcctgcatcccctgccctcgagggcactggcattctgtctttgggactgagggctgcaggtggactccggaggagggtgataagcccagggtcctgggacaccctctcacctgcacagatgggtcctgagggtccagagagcagagctccctgcaggaacccaggatgcaaagctgacgtttttctggggggactgaactgggagactttgcgactgcattcgtacagtactcctggcagccctgcagaagaggtgctgtgagcccgttttacaggcaaggaatccgaggcatggagaagttaagtggattgtggcacagctgaggcgctgtcctgggcagcctggttctgtgtgtgtggcctcaaggggccagagtgaggccggcttcctcctgggctcagtgcccctggatgggaggtgggcatgaacaggagaggcttccgagaatcagagtgtgctcagccaggaaaggcggaggccacctattcaggaaacggggctgcagctgctgtgctgagcccgggtgggtggcaggtgccagtcctcagttcaccggcctctgcagcttcgtgtctgcctcaccgggagacctggcagggccctccctaggcaactcctcccattcccagtgcccagtgcttggaagggagggccctcatgcagcccagacgttggcgggtggaggggggtgtgccagccaccgtccagctgctcttgttcctgcgacctcttttcaggaggaggaagtgggggatggaggctcctgggctggggaaaagggctaggaggggcctggaacccagaccctagagccagctttgtacctcaggcccctgcctttggcgtggtggacggtggggtatcagcacaggagcggggactgcctcactccccaggtgccaagttggcgggtgggcccaggtggacctgctggcacaggtttaatgtttaacgtgcccaagtcccggcccactgatactggaggctgctgccccaggttgtggagggtgtgcggtgcctggcgttggctcctgtgcccacctgccactgcggctgctggaactgccttgaaggaaggcggacagcctgagggccctgagtgtcaggttaccaaggaaaccaaaccagccaaccaaggtctggagaaggatgatgccccgtgtggcccccgtggccctgcctgcagtgtgcagtgtggggctgggcagagaggaagagtcctggttagccagaggtgccaccgcagactccccaggcagggttgatggccctgctggggttcccctggctccactggcttgctgtgactggggacattccttagctttgaggcaactcagctatatcccagaggggaaactgaggcagagggccattgccccctcgccccgttctccagcaccaggataagactgattagccacatgtgtcagctggcaccgtggcctgggcccctcatcagcgagatgaaagtgtggttaggaactagggaactagggcctggcctgccatccccagcactgccaacctcggcctcctgaggccctcgggtgccacctggcccctgactgcagcccctggtgtggtggctttgggagtgacctgcctgggttctgtgtctgaggccagtgaggtcagcagactccatcttaggtgtcctcggtgcctgggggacaagccagaggctggaggagcagcatcccttccaggctgcacacttgtcagtgccgggttctggggagagccgcacgggaaggagaggtcgctggcggcatcgtttgctgctccccagagacagacctgggcccttccctctgggactcccaatctggacggggttcctggcttgctgtggggcatgttgaggccggaggctgggcttgtggggctgcacggccctgcccaggagaactcagcactgcctggacggcgagactcagcttctgagctgagggctctatcaggcctggaagtggaccctggggaggggtggggcagggtagttctgataagtcctaggactgttcgcttccgggttctgagccctggcgtcagggaggaagggcatgtccagaacaatggccagaaccaggcccggccagctcggggggtgacgggggcgggtggctggggcagcgctgccgtgtgcaggggccgagccctgcggggccgtgagccggccctgccttctgcttccttcccagatgtagccgcctgtcccgggagcctggactgtgccctgaagaggcgggcaaggtgtcctcctggtgcacatgcctgtgggccctgccttcagcccttccaggaggaccagcaagggctctgtgtgcccaggatgcgccggcctccaggtacgagagcaaagggggaagtcgatggggggatgtccctgcatgaacctctccctgtaagaagcggccggctgggcgcggtggctcatgcctgtaatcccagcactgtgggaggcccaggctgttggatctcatgaggtcaggagttcaagaccagcctggccaacatggtgaaaccccgtctctactaaaaatacaaagtagccgggtgtggtggcacacacctgtagtcccagctactcaggaggctgaggcaggagaattgctttaacccgggaggcggagcttgcagtgagccgattcaccactgcactccagcctgggcgacagtgcgagactctgtctcaaaaaaaaaaaaaaaaaaaaagaaggccgggagcagtggctcacgcctgtaatcccagcactttgggaggccgaggcgggcacatcataaggtcaggagatcgagaccatcctggctaacacggtgaaaccccatctgtactaaaaatacaaaaacaaaattagccgggcgtggcggcgggcgcctgtagtcccagctactcgggaagctaaggcaggagaatggcgtgaacccgggaggcagagcttgcagtgagccgagatcgcgccactgcactccagcctgggcggcagagcgagactccgcctcaaaaaaaaaaaagcagcagcctgcagcctcaatgcccaggcctgtgccaggtggtcttggggcccctggaccttgtggggtgttgggtccaaggcctgggagatcctcattcactctccacgaagcctcccatcctttccaaatggaggtgggcccaggcctggggcagtcaggccctcccaggagaagggctgcacgatgtgaaatgctgggatggccacgggagaggaagggcccattctccccgggcctgggctctgcagggtctgcccagaagccctccaggcccccacttccccgtccccaggcagcttgctcttttccaccactcactgtcctgtccgcctgttggcaaatgttgaagggtgccagcactggctgggtgctggggatgccccgctcgccagcctgagccgcatctgtcgggatggccagtcactgagtgacttcaggtgtggtgagggctttgctcagaggtgctgggggtgggagcagcagcggcttcctggaggaggtgttgagaggagcaccgagaagtggctgtaagggtctgtgtggatgcacctcctgccaacctgggagcgtccacccagactgtgcagcccacagtgggtaccggtggagccctgccaccagccccacccctgacagctgcccccgttctcccaatgacctggggaggggtcccgggtgcttggcttccttcggcttccccccactccttggggagtccctgcccctctacccgagaaggtgcttggaggtggggaagcagaaggggctgtgctggccagccctttatggacatgggttggggcgagagaccccactccttcctccccgtgcccggtctttggacgtttccctagcgcctcctcccttgccctgcctccactttccgggaagcactgcccctcacaggaagcgcccgcgctgtcaccatggcaatctgggagggagagggcctccaggcgtgtacccagtcctcaggctcctgggaggaacctgccagaagcggggaggccgggcctggggctacctcctggacggacccctccacctgatggcccctcaccctccccaggcgggggccggccccagcccagactggaagatgagattgacttcctggcccaggagcttgcccggaaggagtctggacactcaactccgcccctacccaaggaccgacagcggctcccggagcctggtgagacccccgcttcccctgccccacggccctgtccctagcccagtgctctcattctaacctgtcctctctcgcagccaccctgggcttctcggcacgggggcaggggctggagctgggcctcccctccactccaggaacccccacgcccacgccccacacctccatgggctcccctgtgtcatccgacccggtgcacatgtcgcccctggagccccggggagggcaaggcgacggcctcgcccttggtaggtcttggtcgggggtgggcaggggcagcagggcgccctgcagaaggccgccctcacacgccccctcctgcagtgctgatcctggcgttctgtgtggccggtgcagccgccctctccgtagcctccctctgctggtgcagg

SEQ ID NO: 1102 - DNA, 290 bp, Homo sapiens
gccaaagctgcagtcggggccggggccgttctgtgttcctgtatttgcttttcccgcgagtgggggtgcccctgcctctgtgggcacacctgtgccttcctgtgcacctgcccagctcgtgagcacctgtctgcgtgcgcccggcgctcctgtgtctctgtgcgctcgcgaggctaggcccacacaggtcctctgccccatcgcgggtgcgggtgaggggctcggagtcctaccgggaagaggccagaagggagcgcatcctggagaagcccacccgcggcccaaaccca

SEQ ID NO: 1103 - DNA, 138 bp, Homo sapiens
tataagtgtgagccactgtgccctgtgaaattggctcctttttatgtgaggtgcaaacctctgcatcccactggcctggtctgagcacctcagaagtcctgggtgctgctgaagttgccaatatttgaaattatattg

SEQ ID NO: 1104 - DNA, 638 bp, Homo sapiens
catttggtctccccaaatggagtcttctctgccctcccttcctggtctctggctatgaagaagggaagttatgttttaaagaatctaaagcacagtacagttctcctttcccctaatttcagcctctgaaatatatcagcctccagctgctgccccaggacacttctgggctcttatttaagaggactcctccagcctggaatgcagggcagtacacatgtccttgtctttcttcctgctgtgctggccctcagggtaccgttctgcctggatacagaagaagaggttctccctgggacagaggctaacaagccctgtccagcgaaggggtggcctccaggttttctggttggtgcagagctggcaagggtggaaatggagggagtgaggcccttcccatctggctccagggacttgtgctcctctgtttgggacaaagactttaccttgtcaatgcagctttatctaaactgtagtctgtggatggcggtatccccctagattcctacaactgcttgaccctttttctcttggtttttgaagctatgacaagagcctgatttcgtgtccatctcagtgaacatttttgtaaatagtggagagaggaaaatcgtgaagttcagccaattgcacttgaa

SEQ ID NO: 1105 - DNA, 762 bp, Homo sapiens
ggccacggagaggcaccgctggagcagtacaccgcacaccacagggtggctgcactttttgggtggtggggtggggatgggggcaggtatgatcaatcatccaaaccagggcatttttaagagtaaaaggaggctctactgataacatgctgcaacaacagatgtgactaggaacggccggtgacatggggagggcctatcaccctattcttgggggctgcttcttcacagtgatcatgaagcctagcagcaaatcccacctccccacacgcacacggccagcctggagcccacagaagggtcctcctgcagccagtggagcttggtccagcctccagtccacccctaacaggcttaaggatagaaacgacacataacaccgggaaaagccatgctgtcaagcatctcagaatctcaaccccagaggcagtctttagggactggggtgggctcaggaagctgtattatttcaaaggacgcagtgtttccacagctcagcccagagctgctggagttcacacggcccaccagaacctgctgacttcaaaatcatcaccaccaaggggccaggaggtggcgctgtggggcaacagaaaacagaaaacagctgctccttgaacttggattcccagcagctcccccaagcgcccacaggggctgcattcctccctgctggacacctgtaactacaacattaaaacagggcgcaagcaaggaacacaaacactgggaaagctgtgcctttaaaaaaaaaaaaaaaaa

SEQ ID NO: 1106 - DNA, 2720 bp, Homo sapiens
gccaggtagttctctggattggagaatggtacaaactgttacatccacttgggagtacagcaatgaaaaagatgacacttgccttttagaggctattaaatgaccaatgatgtagtaagtgataagggcccagcctagtctaggaggcagctgctttttcctctttattaatagtcagggaaaccaagctacaattagagacttgcccacgttcagactttgtaacactttttcaagccagtggctcctcccaaacggccgaggtttccccacccattctcctgacctgcccagccctgtggttgctgtccagggagctaaggctctccccaaacaaacttgaagatctcacagacctaatagacacggcctttcctctctgcctctggctttatgtctctttcatcctcctctgcctttcccctgcccttgatcccttctgcaggtcttggctggtttcaggaaacgggtcccatcccatggactcccactctggggagcctgcgctcctgccctgtgggacctgtgacatggttttccgctcctcagctctgttagccacccatactcagcgcttctgcattggccacccgacccaagagatgacatttggagcacaggcatcagttgccactgaaccccagcgggccgcggtaagggcctccatggccatgggtggggattcaaaggagccaggacctttatgattcctcatcctactacaccctatccccaggttgtgccacaagaacaccagggcgtgccacaagaaccccagggcctcccagaccagcaggccagtagatctgctctaaagaggttaacagaggaggtagagctacctaccttcccccagggctcaaaacgttgagcgtcttccccaaacctgtagatcatacttgggacagattctgcccacgcagagatcgcggatcgctgttacctccaggtgcagtggctgcggctatccctacaggaaatgcggccctggataacagaggtccccagggtgttcgcggggccctggacacgttccgaggcgcggcctcagagtcccatgtccgaggcggtgggaagccccagcgagcggctgcgggcgctgttcaggactcgcgcgaggcgcgtggcggagatggaagcgcagagccgggccctgcagctacgcggcgagggtgaaggagatgggggacggggaccaaggacctcctctgccctcgccgtttggcttaagcttgctcgggccggttctgactcggcccgcattccctcagaactgagccgacgcctccaagttgtggcctgtacgcggggcgggatgtcccgcctcttcggcctggagcaggagattcgagaactacaagctgaggccgggaggacgcggggagctctagaggtgttgggggcccgcattcaggagctgcaggcggagccagggtgagacccgactaagcggatccccggaacatgcggctccggggtgggaggggcgggctggctgcagccccggggcctctgatgcgttaccgtctccctgcgcgtcgcctgccaccccaggaacccgctgagctcccggcgagaggcagaactttattctccagtgcaaaaggccaacccgggaactctggctgccgaaatccggtgagagccggggccggagatgggcatagggcgaagcgctgagcagttctggaaagacggccttcctgttccccactccctagggcgctgcgggaggcctacattcgagacgggggccgggaccccggcgtgctgggccagatatggcagttgcaggtggaggcgtctgcactggagctgcagcggtcgcagacccgcagaggtgaacaggagggcctctcgccagcggtggtcagtcctgggaggagaaaagaactcgagggagggcctgtggctgtggatggcatgtgagctgacaagtccagccttatccgaagagccttagcgctggagagctgctcacagccggacgcggccagtcaccagaggtcaaaggtgacaggtcacacttgttcatcgcaggaagggcaggtgccacctcaggggagcttccagtagtggaggctgaaaaccggcgcttggaggcagaaatcttggccttgcaaatgcagaggggtcgggcacccttgggtcagtgagcaccccaaccctatcccatcccacttatctctccccagcaggcctggctcaggcagacagtgcatggggaacaagacccgtgtttgtgactcccctagttcatgtctgcacgtgtgtatccctgtatccacagggctccgccaacccatttgtgggcccaactcttgggggaggggtatctcagctaattacctgctttgtccaacttaggggcaccctaactcttctgctcctagggccccaggatctgcgactcctgggggatgccagcctacaaccgaaggggaggagagatcccccactcctcccgccaccggtggcaccaccgctgccaccacttccaggcttctcggaggttcagttcttgggtggggcaaaggctgtgaggacacggggtgggttgggggaacaggttggaggcagctctgctctgagcagttgggggaacatgagcagctacaaggctttctggaggagtcagctctcttccccacagccacagcttcctggaacaatgaccagaaacctgggcctggactcacacttcctcctgcccacatcgg

SEQ ID NO: 1107 - DNA, 1068 bp, Homo sapiens
accaccctcatcatcagtatctttggtctgtgagctgcaggtctggcaggggctagcatgggctagggcaccacagccaaaggcttgggtctcacttggactatttgaccaagatcagcgggtgctaagtggccgctggcgcctcccacttcgggcccttcctctggaccccagccttagccttgggcagctgaatgggattcctcaggtgagtgtggtgcgcagggattgggcatacagcaaagtacaagtgcaataccatttcatctctccccaggcaggtcaggctgagctctttctgcggctggtgaatgcaagagatgcagctgtacagacactggcagagatcaatccagcaagtgtccatgagtaccagtacccacctccggtgagggcccagctgcagctagggacaccacagctacacataccggtgtggctggtatggctaacggccagcctttattgaccactgtgtgccagtcattaccaatgctttcttgtttgatcctcacatctctatgaagtcctactatgtaacagataaggaaatcaaagcaggagcaggttaacttggttcacagtaagtgagactctaaggaagcctaactaactccaaaacctgtgtgcttaacctttacatttttgctcaaaacctgccttctcctgttccacaggtgtccagcacatcttcactggaagccagcttcctcacccccgcagttggctttgctgatcccccacctcgtacagaagagcccctcagtggagtcaaggatagagatgagggtttgggccctcaccacagttctgacttgcccccagtgagtttctgaacccaagtgaatgtggagatgagcatctgaacatgcacaggactggggcctatttccagacctacaggtttactactccatgttctgacattgggtctagaagcatctagcagttgagtacagaaaaccagttccaaccacagctttaccacctcccgttaagtccttaacttttctgtacctcttctgtttttgtaaaacagattaaggattaaatgagtttgtcaggtat

SEQ ID NO: 1108 - DNA, 202 bp, Homo sapiens
ccgggcgcagtgccttacgcctgtaatcccagcactttgggaggccaaggcgggcagatcacgaggtcaggagatcaagaccatcctggctaacatggtgaaaccccgtctctactaaaaaatacaaaaaatgagccaagcgtggtggtgggcacctgtagtctcagctacttgggaggctgaggcaggagaatggcgtgaa

SEQ ID NO: 1109 - DNA, 6191 bp, Homo sapiens
aaaagaaattattaaatatatttgttcatttgtttaagcatatcaaaatttgtggttataagcatagttggtccattgatcatggcagcgagaatgagagttgataaaagaggaaaagtaaaatattagaagggtgtggaatccagtcaattcgcagagtaattagttacaatctggatagagggctcattacatcatcaattcaaatcaagagcccaaacattgtgaaagtgatctctgctataagatggatacatgctccaggttttcaaggaaaaaatgctggcctgaaaaggtccactacgttagaaggatttcggtttgtattgtcagtatgcctatgcttctgctacagaacaaaacaccataaaacttagtggcttaagttttctctgaatagtttcccctattctgtgggactcttctggtctggtctgttttgtctttgtgctgaatgttcaaggctgaatggtcaatgtctggtagttggacggttgcttggcctagggaggcttcaactaggatggcctgaatctgctccaggtgatggctcatcctccagtaggttagctcaggctttccacacgtggaagcctaaggattccaaaaacctgcaagggagaacaagccccagtatgtcacatttgctattgtcccattggccaaaacaattctaatgaaaaactcagaatcagtgttggagaggattactcaagaagatgtgaacaaattggggactgttactttaataacctattgcagtttgttcagtttgattcattgtatttttcaggtatatatttttgaggtattgtttaaaggcttataaataattttcatgttaaatttataggtctagtcgttggcatttgaaatgtttaagagaagcaggcacagaaaatttcaatgtgatttgagatgtctaaggaaatttaattaatcaagttctaagtagtattaaatatttaagaaggatttggcctgttacatttatgagttaacacatgaatcaaagaacaagcaaaagtgattgtttttattttctacaaatattatcagagtaatgaatggacttatgagctttgttaagttgaatttaaaagcttgagaaaaactaggatttagattttgcaactcaatttaagggactaaaaatcaaaacacattactgtgaaaaagttttccacacgcagaaaccccgcttgagatttagtaaatctcagttgacacatttattcaatagtttattcaaatcatatttatggccaggcaaatggctcacacctgtaatcccagcaatgtgggaggccgaggcaggtggatcactggaggccaggagtttgagacaagcctgactaacatggcaaaaccatgtctttactaaaaatacaaaaattagctgggtgtggtggggcacacttgtaatcccagctactcagatggttgaggcatgaaaataacttgaactggagaagcagaggttgcagtgagctgagattgtgccactgaactatagcctgggtgacagagcaagagtctgtctcaaaaaccaaccaaacaaacaaacaaccatatgaaccatatgtattaatcatctacagtgtatgtattaatctaggcactgggagtatggttgtcttagtctgtcttctgttacctaacagaatactatatgctggataatttataaagaaaaaaaaacttacttagttcatgaatatggaggctgagaagtccaagaacatggcactggcgtctggtgagggcctccttgctgtgtcacaacatggcaaagggcatcacatgacaagtggtcaagcatgtgcatgtcagctcaggtctttctttcccttcttatcttcctcttcttataaagccaccagtcccatcatgggggtgggggcccacactgatgaccttatctaatcctaattatgtcctaaaggttccacttccaatcaacatttgaatttggggattaagtttccaagacatgaaatttaggggacacattcaaaccacagcaatgttaggaaatgactcccagtcccttccttcattcagacttaacaccagcagcgcacatattggaaaaaacaattcaaacaaacggcatgatttcagataatggagacacaaatatcagtcaatcagagactaattcctaatcccattttcctcattgtgaagggtattctgtctcctctcccattttccaggaatgggatcagtgggcatttcctttttcccatagccaaagacaccaccaagtgctccatttcctacctgactgattcttgataccagtctactgcttctttcataatcagtcagtgaatccaaaactgttgtttggctatcaactgtctcctttagacacttctcgagggcgcttctgtcagggaagagaagtgaagagaaaagtaagaatccagagcacaggcaataaacaaagcaacccaaagttgataagcattcagcaagcattcactgaacacctcacattcagctaagtgtgaatggtgagaaagcaacacaggagggaggaagccaggctccttgccatcaggggggatcaatcttgtagacaaggcaaaattacatttcacccaagacacctatattttttacattttaagatttctaaaatgggacttcatcttacaatcatgacaccttcgactggatgaaatacagtaactacaacacaaagcagcattgtgccctgagaggtgtgcaaagcctacagcaattaggacactggaccaaggtcagggtgcatattagaatcacctgggaaacttttaaaactaccttatgcccagatcccactccagaccaactgaatcagtatgaaagagtggggttgagcattttggcattggtactttttttttttttcagacggtgttttacttgccacccaggctggagtgcagtggcatgatctcagctcactgcagcctctgcctcctgggttcaagtgattctcctgcctcagtctcccgagtagctgggactacaggtgcctgccaccacgcctggctaattttttgtgtttttaatagagatgggatttcaccatgttgactgggctggtctcgaactcctgacctcaggtgatccacccaccttggcctcccaaagtgctgggattacaggcatgagccaccacgcctggccagcaatggtagtttttaaagcaccccgtgagatcctaatatgtagccagagttgagaaccaggatagtaatttcaaatgagagtacacattccctgaggttacctgaagactttccatggggcatgctgacacgaatactttggtagaggtcagcacactagggcttatggacgaaagctgctgcctgtttctgtaccccccagggagctaagatggtttttacattttttaatggttgggggaaaaatcaaaagggaagtaatatttggggacacatgaaattcaaatataagtgtccataattaaagttttattggagcatagccataatcttttgtttacatattgtctatggctgctacaaggttggagttaaagagttgggataggaccatatggctggcaaagcctgaaatatttactatctgacactttacagaaaaaatttgcggaggctggcttgaagagaatgaatcttcagaatctcaacattttatgtcctattccagaaactgacctgcctgtaaaggtacagctgttaaggtgtcaggtgtgggtggaggctcatcccctttcccatgcttttttcatagttgtcctcccactttcagaagaaaggtaggcctctcaccaacactggggtatgaaaaaaaaccctaggcaccagacaaaagaataatcccaaatactggtgtctgatggggactctgaccactgggtaaccatatgtatctatatatcgatatatatgtgcatttgtgtgtgtgtaatatatagtaaatcaggtgagttccaaatattgccttaccaaacctgaaggagaacccaatcaagttgtcagctggcaaattattgaaagtatttggctgagtgtagtggtgcatgcttgtagtcccagctacttgggagactgagatggaaggacctcttgaggccaagagtacaagtccagcttgggcaacctaatgagaccacatccctaaaaaaaaaaaaaaaaattagtgacggatggctatgtgatttttggcatataacttagaaagggttcaaagaattgagtaacatagtgataaaaaattaatgtcataattatttatggaaacaaggtactttaaggcttacatctaaaatatgttaaaatgctgagtattgtctcataggaataagcaatattcacagatacgtgaactaattaggaagaaaaagcccattaatttcattaatgccagcagggggcaaaggccttgagcgttttggacagtgagaagccccattgccccagatctgggagatcctctcccggccggtggaatatgcaagggaaaggccatgtgagtctagattccatggtgttaatgccaggcagaggcagactttaacagacaaggaaatgaagatgatgatgggttcaggaggaagaggataaaaagtttaccgggccgggcgcggtggctcacgcctgtaatcccagcactttgggaggctgaggcgggtggatcacaaggtcagcagttcgagaccagcctgaccaacatggtgaaaccccgtctctactaaaaatacaaaaaaattagctgggcttagtggcgggcgcctgtaatgccagcgacttgggagcctgaggcaggagaattgcttgaaaccggaaggcggaggttgcagtgagccgagattgcacctctgcactctagcctgggcaatgagagcaaaactccatctcaaaaaaaaaaaaaaaaaaaagtgcagtttaccaaaggcaaatgtggccggagcatgtaggatgaactagggaagaggaggctcgaagccccggactggccatgaggctggcaggaacctagaagagggtaaacgcgtgcccgacttggtatcgtcctggagggtccagagagaagaggatgcaggcagcatacgttttaagggatgagtcgtcggaactggatgctaatcagatataatcagctgacgacattccttctgtggagtaagccacttgggaagacagtcttgggtgcggaggggacccagcgggacgagaccaggtgcctgctggtctcccaggttcgcgcaggaaggctgggaatttccttgcctcctccccaccgcaccatcctccacccccggcccggagctgtctctacctggagagaaaaaacggaaaggccgagaaatcagagccagagggcagagtgaaaggggtggggatgggagaggatacaaaggggttaggacgaagaaaacggacttcctagagtcccgacttgagggcttgacttcaagaagagaagagaagtctgaaacgggggcgagagcaaaggcagggggttggggtggtcggggtgggggcggcgattataatcgacttttatggcttgacggccagggcagaaattaaatttgggggccggctaaggctagagagtaaggtgacggctcgccccgcgggtttggagctgtgcgctgggggccaagggagcagcgggaggagcgcatgcctggggcgcacgggccgggaggggcgggaggagagcccagtccccagctcaggttactctcctaggcatggtccccaccagagccggggctggaagctggaaatccgagtagagctgactcggacttagctgcccaagggaaagcctccgggcggtcctcgctgcgcccctagtccggggccccgacccctcccggacactgcttgggccatgcgggcgccgcgttgccggccactcgtcgtcccggggtcccaactggggccgctcctgctgttctagagcttgctggccccggcgcgcctctcttgcagctcctgtactactcgaggggaccacgtcgtcccggaggcgcggccaccgagaggatgctgcggccgcggggcggcgggggcgggcgtttcagggctactcacccgagctgggaaggcaggaagtctgtgctggctgggggttggtctcagagggactctggggcttggacacaaaaatcgcggcgcactggggaggacacc

SEQ ID NO: 1110 - DNA, 6194 bp, Homo sapiens
aaaagaaattattaaatatatttgttcatttgtttaagcatatcaaaatttgtggttataagcatagttggtccattgatcatggcagcaagaatgagagttgataaaagaggaaaagtaaaatattagaagggtgtggaatccagtcaattcgcagagtaattagttacaatctggatagagggctcattacatcatcaattcaaatcaagagcccaaacattgtgaaagtgatctctgctataagatggatacatgctccaggttttcaaggaaaaaatgctggcctgaaaaggtccactacgttagaaggatttcggtttgtattgtcagtatgcctatgcttctgctacagaacaaaacaccataaaacttagtggcttaagttttctctgaatagtttcccctattctgtgggactcttctggtctggtctgttttgtctttgtgctgaatgttcaaggctgaatggtcaatgtctggtagttggacggttgcttggcctagggaggcttcaactaggatggcctgaatctgctccaggtgatggctcatcctccagtaggttagctcaggctttccacacgtggaagcctaaggattccaaaaacctgcaagggagaacaagccccagtatgtcacatttgctattgtcccattggccaaaacaattctaatgaaaaactcagaatcagtgttggagaggattactcaagaagatgtgaacaaattggggactgttactttaataacctattgcagtttgttcagtttgattcattgtatttttcaggtatatatttttgaggtattgtttaaaggcttataaataattttcatgttaaatttataggtctagtcgttggcatttgaaatgtttaagagaagcaggcacagaaaatttcaatgtgatttgagatgtctaaggaaatttaattaatcaagttctaagtagtattaaatatttaagaaggatttggcctgttacatttatgagttaacacatgaatcaaagaacaagcaaaagtgattgtttttattttctacaaatattatcagagtaatgaatggacttatgagctttgttaagttgaatttaaaagcttgagaaaaactaggatttagattttgcaactcaatttaagggactaaaaatcaaaacacattactgtgaaaaagttttccacacgcagaaaccccgcttgagatttagtaaatctcagttgacacatttattcaatagtttattcaaatcatatttatggccaggcaaatggctcacacctgtaatcccagcaatgtgggaggccgaggcaggtggatcactggaggccaggagtttgagacaagcctgactaacatggcaaaaccatgtctttactaaaaatacaaaaattagctgggtgtggtggggcacacttgtaatcccagctactcagatggttgaggcatgaaaataacttgaactggagaagcagaggttgcagtgagctgagattgtgccactgaactaactatagcctgggtgacagagcaagagtctgtctcaaaaaccaaccaaacaaacaaacaaccatatgaaccatatgtattaatcatctacagtgtatgtattaatctaggcactgggagtatggttgtcttagtctgtcttctgttacctaacagaatactatatgctggataatttataaagaaaaaaaaacttacttagttcatgaatatggaggctgagaagtccaagaacatggcactggcgtctggtgagggcctccttgctgtgtcacaacatggcaaagggcatcacatgacaagtggtcaagcatgtgcatgtcagctcaggtctttctttcccttcttatcttcctcttcttataaagccaccagttccatcatgggggtgggggcccacactgatgaccttatctaatcctaattatgtcctaaaggttccacttccaatcaacatttgaatttggggattaagtttccaagacatgaaatttaggggacacattcaaaccatagcaatgttaggaaatgactcccagtcccttccttcattcagacttaacaccagcagcgcacatattggaaaaaacaattcaaacaaacggcatgatttcagataatggagacacaaatatcagtcaatcagagactaattcctaatcccattttcctcattgtgaagggtattctgtctcctctcccattttccaggaatgggatcagtgggcatttcctttttcccatagccaaagacaccaccaagtgctccatttcctacctgactgattcttgataccagtctactgcttctttcataatcagtcagtgaatccaaaactgttgtttggctatcaactgtctcctttagacacttctcgagggcgcttctgtcagggaagagaagtgaagagaaaagtaagaatccagagcacatgcaataaacaaagcaacccaaagttgataagcattcagcaagcattcactgaacacctcacattcagctaagtgtgaatggtgagaaagcaacacaggagggaggaagccaggctccttgccatcaggggggatcaatcttgtagacaaggcaaaattacatttcacccaagacacctatattttttacattttaagatttctaaaatgggacttcatcttacaatcatgacaccttcgactggatgaaatacagtaactacaacacaaagcagcattgtgccctgagaggtgtgcaaagcctacagcaattaggacactggaccaaggtcagggtgcatattagaatcacctgggaaacttttaaaactaccttatgcccagatcccactccagaccaactgaatcagtatgaaagagtggggttgagcattttggcattggtactttttttttttttcagacggtgttttacttgccacccaggctggagtgcagtggcatgatctcagctcactgcagcctctgcctcctgggttcaagtgattctcctgcctcagtctcccgagtagctgggactacaggtgcctgccaccacgcctggctaattttttgtgtttttaatagagatgggatttcaccatgttgactgggctggtctcgaactcctgacctcaggtgatccacccaccttggcctcccaaagtgctgggattacaggcatgagccaccacgcctggccagcaatggtagtttttaaagcaccccgtgagatcctaatatgtagccagagttgagaaccaggatagtaatttcaaatgagagtacacattccctgaggttacctgaagactttccatggggcatgctgacacgaatactttggtagaggtcagcacactagggcttatggacgaaagctgctgcctgtttctgtaccccccagggagctaagatggtttttacattttttaatggttgggggaaaaatcaaaagggaagtaatatttggggacacatgaaattcaaatataagtgtccataattaaagttttattggagcatagccataatcttttgtttacatattgtctatggctgctacaaggttggagttaaagagttgggataggaccatatggctggcaaagcctgaaatatttactatctgacactttacagaaaaaatttgcagaggctggcttgaagagaatgaatcttcagaatctcaacattttatgtcctattccagaaactgacctgcctgtaaaggtacagctgttaaggtgtcaggtgtgggtggaggctcatcccctttcccatgcttttttcatagttgtcctcccactttcagaagaaaggtaggcctctcaccaacactggggtatgaaaaaaaaccctaggcaccagacaaaagaataatcccaaatactggtgtctgatggggactctgaccactgggtaaccatatgtatctatatatcgatatatatgtgcatttgtgtgtgtgtaatatatagtaaatcaggtgagttccaaatattgccttaccaaacctgaaggagaacccaatcaagttgtcagctggcaaattattgaaagtatttggctgagtgtagtggtgcatgcttgtagtcccagctacttgggagactgagatggaaggacctcttgaggccaagagtacaagtccagcttgggcaacctaatgagaccacatccctaaaaaaaaaaaaaaaaattagtgacggatggctatgtgatttttggcatataacttagaaagggttcaaagaattgagtaacatagtgataaaaaattaatgtcataattatttatggaaacaaggtactttaaggcttacatctaaaatatgttaaaatgctgagtattgtctcataggaataagcaatattcacagatacgtgaactaattaggaagaaaaagcccattaatttcattaatgccagcagggggcaaaggccttgagcgttttggacagtgagaagccccattgccccagatctgggagatcctctcccggccggtggaatatgcaagggaaaggccatgtgagtctagattccatggtgttaatgccaggcagaggcagactttaacagacaaggaaatgaagatgatgatgggttcaggaggaagaggataaaaagtttaccgggccgggcgcggtggctcacgcctgtaatcccagcactttgggaggctgaggcgggtggatcacaaggtcagcagttcgagaccagcctgaccaacatggtgaaaccccgtctctactaaaaatacaaaaaaattagctgggcttagtggcgggcgcctgtaatgccagcgacttgggagcctgaggcaggagaattgcttgaaaccggaaggcggaggttgcagtgagccgagattgcacctctgcactctagcctgggcaatgagagcaaaactccatctcaaaaaaaaaaaaaaaaaaaagtgcagtttaccaaaggcaaatgtggccggagcatgtaggatgaactagggaagaggaggctcgaagccccggactggccatgaggctggcaggaacctagaagaggggaaacgcgtgcccgacttggtatcgtcctggagggtccagagagaagaggatgcaggcagcatacgttttaagggatgagtcgtcggaactggatgctaatcagatataatcagctgacgacattccttctgtggagtaagccacttgggaagacagtcttgggtgcggaggggacccagcgggacgagaccaggtgcctgctggtctcccaggttcgcgcaggaaggctgggaatttccttgcctcctccccaccgcaccatcctccacccccggcccggagctgtctctacctggagagaaaaaacggaaaggccgagaaatcagagccagagggcagagtgaaaggggtggggatgggagaggatacaaaggggttaggacgaagaaaacggacttcctagagtcccgacttgagggcttgacttcaagaagagaagagaagtctgaaacgggggcgagagcaaaggcagggggttggggtggtcgggggggggcggcgattataatcgacttttatggcttgacggccagggcagaaattaaatttgggggccggctaaggctagagagtaaggtgacggctcgccccgcgggtttggagctgtgcgctgggggccaagggagcagcgggaggagcgcatgcctggggcgcacgggccgggaggggcgggaggagagcccagtccccagctcagattactctcctaggcatggtccccaccagagccggggctggaagctggaaatccgagtagagctgactcggacttagctgcccaagggaaagcctccgggcggtcctcgctgcgcccctagtccggggccccgacccctcccggacactgcttgggccatgcgggcgccgcgttgccggccactcgtcgtcccggggtcccaactggggccgctcctgctgttctagagcttgctggccccggcgcgcctctcttgcagctcctgtactactcgaggggaccacgtcgtcccggaggcgcggccatcgagaggatgctgcggccgcggggcggcgggggcgggcgtttcagggctactcacccgagctgggaaggcaggaagtctgtgctggctgggggttggtctcagagggactctggggcttggacacaaaaatcgcggcgcactggggaggacacc

SEQ ID NO: 1111 - DNA, 301 bp, Homo sapiens
ttaagacagcgcccttcccgccccttccaaccccccagaccaccacccgggtctgggaacagggtgagcgcatggcgagaggttgtctggttttgtagctatcaagttgtacccccgctgtgcccataggaagtgactcatctgcttgtcaggtagtggccttgctgtgagccaggaccatattaagaaaagaaagaaaaaaaggagcagcaaaacactgtgcccctgcacaatgtgctctcctttcttctgccctccctctcctaggctgtcctcttcttcctccacttgtagtttgctc

SEQ ID NO: 1112 - DNA, 300 bp, Homo sapiens
tcaactcacgaaaaggatgattatgtagtatatattaattagtggttatcatgttatcctattttttatcactttactatttaattgtatagtattggcatttttattatatcaggaaattattggctgggcatggtggctcacacctgtaatcccagcactttgggaggccgaggcaggaggatcacttgaggtcaggagtttgagaccagcctggccaacatggataaaccctgtctctactaaaaatacaaaaaattagccaggtatggtggtgggcgcctgtagtcccagctactt

SEQ ID NO: 1113 - DNA, 301 bp, Homo sapiens; identical to SEQ ID NO: 1111

SEQ ID NO: 1114 - DNA, 375 bp, Homo sapiens
atcacttgacctttctgactctcagctttctagtctgtaaaggagggataataatatctgccctccttatttcaaaagtccacagtaagtgtcaaatgaaaaaaatcacttggaaatattttgtatagctctaagcaggctgtacagatgtaagaataatttatgtttgtgtttactctcatcccttgaaatgcctataaaaataaatcacttattacacgaatgacacagggagaaggaagaacgacagaatgccagtctaaggagatcaaccagtgggatatgggctcctggaatgactgcagttaactcagggaaaagagctaacaaatgccctggttatcccatatccattaccacatgcatttcccagcc

SEQ ID NO: 1115 - DNA, 375 bp, Homo sapiens
atcacttgacctttctgactctcagctttctagtctgtaaaggagggataataatatctgccctccttatttcaaaagtccacagtaagtgtcagatgaaaaaaatcacttggaaatattttgtatagctctaagcaggctgtacagatgtaagaataatttatgtttgtgtttactctcatcccttgaaatgcctataaaaataaatcacttattacacgaatgacacagggagaaggaagaacgacagaatgccagtctaaggagatcaaccagtgggatatgggctcctggaatgactgcagttaactcagggaaaagagctaacaaatgccctggttatcccatatccattaccacatgcatttcccagcc

SEQ ID NO: 1116 - DNA, 407 bp, Homo sapiens
cgactgtcacaatacaacagtgctcatgttcaagtcacccttatttcacttagtaacagccccacagcacaagagtagtgacgctggcatattgttataattgttctatttcactatttgttattctggttaatctcttgtgtttaaacttcatcacagatatgtatgtataggaaaagaaaagacatcggatacatggggtttggtactatttgcagttttaggcatctactgggcatgatccactgatcaatggtcttggaacgtgtctgccatggataaggggagtctactgtattgattctgattaatgcctgagaatgggatgttatttcattcacacggaagcctttttcctttcttccattctttcttcctttttaaaaaaatctccttcagaaaaaaaa

SEQ ID NO: 1117 - DNA, 2859 bp, Homo sapiens
  SITE (264): n equals a,t,g, or c
cagcactttgggaggccgaggcaggcggatcacgaggtcaggagatcgagaccagcctggtcctacagtggagaaagcccccgtctctactaaaaataccaaattagccgggcacggtggctcacgcctgtaatcccagtcactttgggaggccgaggcaggcggatctacgaggtcaggagatcgagaccagctggccaacatggagaaacccgtctctactaaaaattcaaaattaaccggcgtgttgcgcacgctgtatcntcggtcctctctacataagtctatggcttttaaaaatatttattaatacttttccagctgatatgtaggcttagcaaagaggctgggcacggtggctcacacctgtaatcccagcactttgggaggccgaagacagtggatctcttgaggtcagaagttcgagaccagcctggtcaacgtggtgaaacctgtgtctactaaatatacaaaaattagccaggcatggtggtgggtgcctataatcctggctcctcgggaggctgaagcaggagaattgcttaaactcgggaggcagaggttgcagtgagccgagatcatgccactgcactccagcctgggtaacaagaacaaaacttcgtctcataataaataatataactatatacataactaactaactaactaataaacatttacaaaagacgttagcaaataaggtgaacacaaaaatagcgattttacaaaccatttttcaaattttactactctttgatatttatttgtgtcctttccttcccttaacattagtttttatattttagaggaaagaactcaggtgaagaccatagctggtcctcctgtgtcactgggttatgtctgtccttgactaccagcaaggcctcctgcgtattggttagatttctgatgtaccatactcttttgtcctgtcctctagtattttgggtccgtgaacggaaagtcctgagttgttgtcccatgtttccctgtctttcctctttttttcactgttttgagctcggtccaactgacagtacaatcagctttctacttcagaatgtgttgagttttttccctgtcttcatgcaattgtgaagtacatatgaaaccaagtgggtaaatacagtgttatgggctgaattatattcttccaaaagttcatgtgttgaagtcctaaacccagttcctcacaatgtgacactatttggagacaggatctttacagaggtaataaagttaaaatgagctaattagggtaggctacctaattcaacatgactggtttacttataaaaagggaaaatttgggcagagcacagtggcatatgcctgtaatcctagcactttgggaagcagaggtgggagaatgactcgagcccaggagtttgagatcagcctgggtaacatagcaagactttgtctccacttaaaaagaaaaaaatcagccaggtgtggtcgcacacacctatagtgccagctactcaggaggctgaggagttagaggttgcaatgcactatgatcatgccactgcactccagccaggatgacacagcaagaacttgtgtcaaaaaaaaaaaaaaacaatttattagccgggcatggtggcgcacgcctgtggtcccagctacttgagacatgcacggcaccacgtgcacaccaccacaaccaggttaaattccttcttcgtgccagggcgccgtggctcacacctgtaatcccagcactttgggaggctgaggagggtggatcacctgaggtcaggagttccagaccagcctgaccaacatggagaaaccctgtctctactaaaaatacaaaattagccgggcgtggtggcacatgcctataattccagctgctcgggagggtgaggcccaagaatcgcttgaacctgggaggcggaggttgtggtgagccaagatcacgccattgcactccagcctgggcaacaagagtgaaactccatctcaaaaataaataaataagtaaaaataaattccttcttcgttaattaagccagtttgagttaggttttccatcacatggcagagaagaaccttaaattcaaatctagtttctgccacgaccttggaaatatcgctcaaacattaaacccagtctcaggtttatttaattaatttatttatttaattattctaatatgatagagatggcgtcttgctactgtcacccaggctggagacgcagtggctccattctcttctcactgcgatactttgattcccgggttcaagtgatcctcctggctcaggctccaagtggtgaatgggccaccagcacggaaagaggaaacagaaagaaaacgcacgtaccccctgcttgttcaatcgatcacgaccctctcacgcggaccccctgagagttgtgagccctgaagagggacaggaattgctcactcggggagctcggctcttgggacaggagtcttgccgatggccccggccgaataaaccgcttccttctctaactgggtgtctgaggagttttgtctgcggctcttcctgctacactatctctactaaaaatacaaaaaaaaaaggccgggcttggtggctgaagcctgtaatcccagctcctcgggaggctgaggcgggcagatcacgaggtcaggagatcgagaccatcctggtctaacacggtgaaaccccgtctctactaaaaatacaaacaattagccgggcgtggtggcaggcgcctgtagtcccagctactcgggaggctgaggcaggagaatggcgtgaacccgggaggcggagcttgcggtgagcggagttcgcgccactggactccagcctgggcgacagggacgagactccgtctcaaaaaaataacaa

SEQ ID NO: 1118 - DNA, 291 bp, Homo sapiens
ctacttcagaatgtgttgagttttttccctgtcttcatgcaattgtgaagtacatatgaaaccaagtgggtaaatacagtgttatgggctgaattatattcttccaaaagttcatgtgttgaagtcctaaccccagttcctcacaatgtgacactatttggagacaggatctttacagaggtaataaagttaaaatgagctaattagggtggctcctaattcaacatgactggtttccttataaaaagggaaaatttgggcagagcacagtggcatatgcctgtaatccta

SEQ ID NO: 1119 - DNA, 106 bp, Homo sapiens
atcccagcactttgggaggccgaggcgggtggatcacaaggtcaagagattgagaccatcctggctaacatggtaaaaccccgtctgtactaaaaatacaaaaaaa

SEQ ID NO: 1120 - DNA, 848 bp, Homo sapiens
cacactggcaacatatgcaccttctattacaacatttttcattcagttttagggcattattgaacagagattttctcatctgtgcaatcatgggcagctgatattaaaaaataattgtgaaatgttacctaatagaaaaattaagttatatataaaagatagtcaaccccatcagccattagggaaatgcaaagcaaaaccacaatgagataccacatcacactcactaggatgatcataataaaaaagacaaacaataacaagtgttggtgagtgtgtagagaaatgggagccttcatacatttctggtgggaatatagaatagtgcagctactgtggaaaacactttggtgtttcctcaataagttaagaatagaattaccatttgactcagcaattcctttcttgaatatacactccaaagagctgaaatatgttcacaccaaatttgttacataaatgttcaaaacagcattatttataacagccaaagagtgaaaataacccaagttgatgaatggataaacaaaatgtggtatatctatacaatgaaatatatgatttatcaagaaaagaaatgaagtactaatacaatatgaatgaactttgaaaacatcatgctgattaaaagcagccagtcatgaaaggggatgtatgataggattccatttgcagaaaatgcctagaataagcaaatttatagagcagaaaatagattagcagctgcttagggctgggcattggggtgaggtgggaatgggcattgactactaattgacatggggttttctttagtgaaggacaaattgttctaaaattaggtgataataatggctgtacaatcctgt

SEQ ID NO: 1121 - DNA, 3590 bp, Homo sapiens
aaattggtcccagttttcaccctgccgcagggctggctggggagggcagcggtttagattagccgtggcctaggccgtttgacggggtgacacgagcctgcagggccgagtccaaggcccggagataggaccaaccgtcaggaatgcgaggaatgtttttcttcggactctatcgaggcacacagacagaccatggggattctgtctacagtgacagccttaacatttgccagagccctggacggctgcagaaatggcattgcccaccctgcaagtgagaaggtaacgtttatttttgtatttttttctctgtctcccatatacagactgtagaaagaccaccaagagcggaccatttttttttttttcccaccatgatgtacaattcacatttgttaataaaaaaaaagtgcccgaggtcatccacctagactttttttttcttaaacaggaaacgggtttcagatgtttatatgttgaaaagtaaggctactaatccgtttagccatttcacaggccctggctcactctctcgtaccttttcatgttcagaccccatagaacgacattaatttttatccctcttgttatttagaattaaaaaaaaaagacaaaaacagaaaaacactttcaatagccacctgcttttttgggacagctccagtggaggttaaaataaatgaatccgctggtttcattcaattgtgctcttagctgcgagggtgctgtgcggtgggtttgagtgttcaacactcttcagcaattccttaaaatagagcgtggtcttgtgtattttcgtgtgtctgtatccacaagcggatctccgttgaagcaacatatttagatgaacacttaaggttcacaaacgcacatacttattccgtctatagcaagggtgggaattggtctcttccgtacttttctttcatttttctggggggtcagtgtgatgttttccacgtttcttcttgatgttcggctgtgccaggtaacagagaaaaggcatttcccagggagccgatgatcgcttgaaagggcttcaacttgatgcttggaaataaaaaattttgttttatttctgccatttttttcctcatcccaggaccagtaattttaaacagttgtcactggtgcaaacgtttccctgtttagtgtggcaaatcaatgcatttttaccctgttggggaggtttacatattcatagtccagggagaaaagagcacaacaaacgggaattgtggatgctttttaagtgaatttgttagtattcaaatcattggcgtaaaagactattttaaacatagagttcaaagcagaaggaataatattatttcctaaaactggatcaaatggttccccctttttaacccacctctgcttgaccaaacgctttatgtttaccgatcttgcaagggtgcaaaagaactattcttgaagaatttcgtcagggagagaaaaccagctaagttgaaaggagctcttaaaatttcagcatcagtattttcaggatcagtaaaaaagttactttcaggatcattaaaaagttatttgcgaaaattaaacatagacaaagaatcatcttttacttcactataagaatcctcccctcaccctcgtgtgtgtgtgtgtgtgtgtgtgtgtgtagagagagagttctatgaggcacaagatacattttcttgctttttcatcagagtaccagaagcggctggagaaaagattagtacaagtgtaaaaatggatatgttaataaatgtccaaactcctttaaatggaggtgagatggatatgataaaacaaattttaaaatatatgtttttgttttgtttttttaatcaaacaaaaaggccatttttagtgtataggggcatgttttaattcggcattcaaattatgccaggcataggtgtcagggactccccgtggaaacccagtgacaaaacaataacaccatcacctgcgttgaaatgtgagcaaaaataatagagtggttatctcgagaaagcggctcctgaaaaatgtctcccttaacatggaagcacccggcagaggctgatctgtggggctggggagaaatggagcaatcgccaacactccaggctcgtctgtgaaccccaaattccattaagaaaagaaactgcttagcaagacccttttgaaagccccggggtgctaaaggagcagaaggaaagcccggcttagcatccacacggccaccaaagctcggagggcagagactgccgggaggaactgatctgatgagaggatccatgagagagcagggcaactgcactaagtgcccatttctccaacacggacagggcaccggggagcttggctaacatggtcactcagccttcctttgtggaatcacaggacaggagcctgctttgggccagcatttacaaaaactgtcttttttggcccctggaccctgaggaatagaaaaacgctgcagtctgcaaacccactgcaatcgccgcgtcagctcagagccgagatgcttcccaaatgaacacctggatggtgtaaatcaccctgacagtaaacacttcaggccaggacgcaggctgcaggcggggtggggtggcatcctcccacccagctggggtccataaaccaggcactggccctgcgctaataaatgctcctttcacagcaaaagacccctcctcccgggctgggatcacggtcccggtagagagggtgctcagataaccgacagcgtttctcccaccctcatcactgtccgacttaccccgggctggcatcagggagtgttgtcaggcgtttatgccgttatgaatggctttatgatacctcgagagggggaccagggccaccggcttcatggtggctattttctgaaggtggcaggagaagataaaaccaaaattcagggtttgctttttaaataccatgctagtaaaatcagaacagtaatgacgggaaccaaaagatctatctgaaatgttcctaaggttagtggaatctacagtggcattccctcttgtaaaacacattgaactcaaatgttaaaataactctccctcttcttgctgctgtctcaaaatccttgactgctaatggatgaccacccatttggtgtatacaattcttataaaaatccccaaataggggaaaagcagagggtagatagcagaatagatctagaaaaagaacacctccttgggaatttctttgcattcagatgctctactttaaaaaataaaatgtctccgtataattatccagttaggaggagtcttttaaatgatatcttttgtcttcagccagacagatgtgaggacgcacaatgtaaacgttatgcagcagctttgggagaggctttttatggctctgtttctttccactcacagcacagactcgagaaatgtagggaactcgagagcagccactcggccccaggatcaacccagcaccgaagaaaaacaaccagaagaaattattcttcagcctgaaatgaagccgggatcaaatggttgctgatcagagcccatatttaaattggaaaagtcaaattgagcattattaaataaagcttgtttaatatgtctcaaacagaaaat

SEQ ID NO: 1122 - DNA, 3589 bp, Homo sapiens
aaattggtcccagttttcaccctgccgcagggctggctggggagggcagcggtttagattagccgtggcctaggccgtttgacggggtgacacgagcctgcagggccgagtccaaggcccggagataggaccaaccgtcaggaatgcgaggaatgtttttcttcggactctatcgaggcacacagacagaccatggggattctgtctacagtgacagccttaacatttgccagagccctggacggctgcagaaatggcattgcccaccctgcaagtgagaaggtaacgtttatttttgtatttttttctctgtctcccatatacagactgtagaaagaccaccaagagcggaccattttttttttttcccaccatgatgtacaattcacatttgttaataaaaaaaaagtgcccgaggtcatccacctagactttttttttcttaaacaggaaacgggtttcagatgtttatatgttgaaaagtaaggctactaatccgtttagccatttcacaggccctggctcactctctcgtaccttttcatgttcagaccccatagaacgacattaatttttatccctcttgttatttagaattaaaaaaaaaagacaaaaacagaaaaacactttcaatagccacctgcttttttgggacagctccagtggaggttaaaataaatgaatccgctggtttcattcaattgtgctcttagctgcgagggtgctgtgcggtgggtttgagtgttcaacactcttcagcaattccttaaaatagagcgtggtctcgtgtattttcgtgtgtctgtatccacaagcggatctccgttgaagcaacatatttagatgaacacttaaggttcacaaacgcacatacttattccgtctatagcaagggtgggaattggtctcttccgtacttttctttcatttttctggggggtcagtgtgatgttttccacgtttcttcttgatgttcggctgtgccaggtaacagagaaaaggcatttcccagggagccgatgatcgcttgaaagggcttcaacttgatgcttggaaataaaaaattttgttttatttctgccatttttttcctcatcccaggaccagtaattttaaacagttgtcactggtgcaaacgtttccctgtttagtgtggcaaatcaatgcatttttaccctgttggggaggtttacatattcatagtccagggagaaaagagcacaacaaacgggaattgtggatgctttttaagtgaatttgttagtattcaaatcattggcgtaaaagactattttaaacatagagttcaaagcagaaggaataatattatttcctaaaactggatcaaatggttccccctttttaacccacctctgcttgaccaaacgctttatgtttaccgatcttgcaagggtgcaaaagaactattcttgaagaatttcgtcagggagagaaaaccagctaagttgaaaggagctcttaaaatttcagcatcagtattttcaggatcagtaaaaaagttactttcaggatcattaaaaagttatttgcgaaaattaaacatagacaaagaatcatcttttacttcactataagaatcctcccctcaccctcgtgtgtgtgtgtgtgtgtgtgtgtgtgtgtagagagagagttctatgaggcacaagatacattttcttgctttttcatcagagtaccagaagcggctggagaaaagattagtacaagtgtaaaaatggatatgttaataaatgtccaaactcctttaaatggaggtgagatggatatgataaaacaaattttaaaatatatgtttttgttttgtttttttaatcaaacaaaaaggccatttttagtgtataggggcatgttttaattcggcattcaaattatgccaggcataggtgtcagggactccccgtggaaacccagtgacaaaacaataacaccatcacctgcgttgaaatgtgagcaaaaataatagagtggttatctcgagaaagcggctcctgaaaaatgtctcccttaacatggaagcacccggcagaggctgatctgtggggctggggagaaatggagcaatcgccaacactccaggctcgtctgtgaaccccaaattccattaagaaaagaaactgcttagcaagacccttttgaaagccccggggtgctaaaggagcagaaggaaagcccggcttagcatccacacggccaccaaagctcggagggcagagactgccgggaggaactgatctgatgagaggatccatgagagagcagggcaactgcactaagtgcccatttctccaacacggacagggcaccggggagcttggctaacatggtcactcagccttcctttgtggaatcacaggacaggagcctgctttgggccagcatttacaaaaactgtcttttttggcccctggaccctgatgaatagaaaaacgctgcagtctgcaaacccactgcaatcgccgcgtcagctcagagccgagatgcttcccaaatgaacacctggatggtgtatcaccctgacagtaaacacttcaggccaggacgcaggctgcaggcggggtggggtggcatcctcccacccagctggggtccataaaccaggcactggccctgcgctaataaatgctcctttcacagcaaaagacccctcctcccgggctgggatcacggtcccggtagagagggtgctcagataaccgacagcgtttctcccaccctcatcactgtccgacttaccccgggctggcatcagggagtgttgtcaggcgtttatgccgttatgaatggctttatgatacctcgagagggggaccaggggccaccggcttcatggtggctattttctgaaggtggcaggagaagataaaccaaaattcagggtttgctttttaaataccatgctagtaaaatcagaacagtaatgacgggaaccaaaagatctatctgaaatgttcctaaggttagtggaatctacagtggcattccctcttgtaaaacacattgaactcaaatgttaaaataactctccctcttcttgctgctgtctcaaaatccttgactgctaatggatgaccacccatttggtgtatacaattcttataaaaatccccaaataggggaaaagcagagggtagatagcagaatagatctagaaaaagaacacctccttgggaatttctttgcattcagatgctctactttaaaaaataaaatgtctccgtataattatccagttaggaggagtcttttaaatgatatcttttgtcttcagccagacagatgtgaggacgcacaatgtaaacgttatgcagcagctttgggagaggctttttatggctctgtttctttccactcacagcacagactcgagaaatgtagggaactcgagagcagccactcggccccaggatcaacccagcaccgaagaaaaacaaccagaagaaattattcttcagcctgaaatgaagccgggatcaaatggttgctgatcagagcccatatttaaattggaaaagtcaaattgagcattattaaataaagcttgtttaatatgtctcaaacagaaaat

SEQ ID NO: 1123 - DNA, 270 bp, Homo sapiens
tcaccctgacagtaaacacttcaggccaggacgcaggctgcaggcggggtggggtggcatcctcccacccagctggggtccataaaccaggcactggccctgcgctaataaatgctcctttcacagcaaaagacccctcctcccgggctgggatcacggtcccggtagagagggtgctcagataaccgacagcgtttctcccaccctcatcactgtccgacttaccccgggctggcatcagggagtgttgtcaggcgtttatgccgttat

SEQ ID NO: 1124 - DNA, 166 bp, Homo sapiens
gccccaggatcaacccagcaccgaagaaaaacaaccagaagaaattattcttcagcctgaaatgaagccgggatcaaatggttgctgatcagagcccatatttaaattggaaaagtcaaattgagcattattaaataaagcttgtttaatatgtctcaaacagaaa

SEQ ID NO: 1125 - DNA, 773 bp, Homo sapiens
tcttactgcagtgttactctagcaccctctgctgacaaaactgtaacattttcagctagcaaaggagaacatttacacaattctcatccttatcacaaagtatggcaataaagggtagatttgaagctgagagccagtatgtttggagaggcagtaaataactgtcacagtccactcccctggctgctcagcttccttatgaatgcttctaaacacacttgaaattccattcaacaatctgtgtctacgtaacaagacaaaactatcctttatacaaatggagttcttaccctctcccccaaataaggagacacacaacaacaatcattgctagctatatttgtatgtaatctgtcatagtgcctctgaatattctgttaactaaagactaccttataaagtttaccttcaatatcttatactatatatatagtaagcaaagagaaaatgcaaaaagctacttactacagtctttgtttctataatgggacacaaggctatagttcatatctctgtctttcactacccattcagtatttcttgccttaactaaaacttcagctgttctgtgtcctttactttgtgattggaacaaaactttaattttgatgtgtcttcaactatcctgcctttttcttagttgctgtagtttttcattaacctttttttttttaagacagagtctcactctgtcacccaggttggaatgcagtgatgtgatcccagtacactgcaatctctgcctcccgggttctggcaattctcctgtctca

SEQ ID NO: 1126 - DNA, 773 bp, Homo sapiens; identical to SEQ ID NO: 1125

SEQ ID NO: 1127 - DNA, 774 bp, Homo sapiens
tttgttgttgttgttgttgttttttaagacggagtctcactctgttgccaaggctggagtgcggtggctcagtctcggctcacctcaacctctgcctcccaggttcaagtgatccctctgcttcagcatcccaagtagctaggactgtaggtgtgcaccaccacacctggctaatttttgtattcttagtagagatgaggtttcaccatgttggccaggctggtctcgacctcttgacctcaagtgatccacctgcgttggcctcccaaagtgctgggattacagtgtgagccaccctacagtgtgagccaccgcacctggccccattaatctttaatagtgggcatggcaatactaacaggagcataagagaatggcctaagttccagatgtagtctttcttgcctacattttgtgcagtaacccatttttcctctgctaattggaatcagtcacgtgggccagtagactaacctcttttgctgcctgttggtttaatgactaggtagaagtctctagttcagtggaaccattgttgtgtttactggtagaagcaatactcttttgtacactaagcctccaaaccagcagagcttagagttgttgggaggggaagcaaaaatagtgtgaatgagtttatgagaggaaaataaatctcaggacccccaaatcactaagtcaaagagaaaagtcaagctgggaacagcatccagcaaaactgcctcccattttattcctaaataagatagctacaaaaatttaaaaaaaaaaaaa

SEQ ID NO: 1128 - DNA, 774 bp, Homo sapiens; identical to SEQ ID NO: 1127

SEQ ID NO: 1129 - DNA, 328 bp, Homo sapiens
acccagccaccgcctgcccagggctcaaaggaggttctcagagcaccggggtccccacacagccagcagctgcaccctccaagccctactgagcatgaggtagatgtgaagactccggcctccaagcccagaccagaccaggccagggaagatgagctgcatcccaaacaggcagaaaaaagagaaggccggaggtggcgccgagagcccaccggtggactctcctagccactcagaggggaagtcaaataagaaaaggggaaagctgagagggagaaggctccgggaggagagcattcttccagtctctgctgatgtgatttcagat

SEQ ID NO: 1130 - DNA, 327 bp, Homo sapiens
acccagccaccgcctgcccagggctcaaaggaggttctcagagcaccggggtccccacacagccagcagctgcaccctccaagccctactgagcatgaggtagatgtgaagactccggcctccaagcccagaccagaccaggccagggaagatgagctgcatcccaaacaggcagaaaaaagagaaggccggaggtggcgccgagagcccaccgtggactctcctagccactcagaggggaagtcaaataagaaaaggggaaagctgagagggagaaggctccgggaggagagcattcttccagtctctgctgatgtgatttcagat

SEQ ID NO: 1131 - DNA, 222 bp, Homo sapiens
ataactgtgcttatttattcttagctgtatataaaacagtagaaagttgttgatttaatatgaaagtttagaaaagataaggtattaattctgcattctaaaaactcattaaccaggagtgcttgatttcctagaaagaatggaacttcgcctgtcataattattgagacgatagattcacctctgatttctcaattataaatagaatcatcaaatgctgaa

SEQ ID NO: 1132 - DNA, 12932 bp, Homo sapiens
ccattctccaactcagctgggctctctcatcaaaggcccagccagcctgaccataggcactggctctgcccacacaataaatgcaggtaggcacctggcctctgtaggtgcgcatatctaaaacatccagaagaatggcagtctgggctccaactccattgatctgtggtactctcagctctgccatctgctttgactccaggctggctttgctcagttacaagttgctgccaggagctaagcgtactacctgctgcctcttccttcacctgaagatggagagaatgccaccccatgaccctcaaacaagagcccaagctacactcctgagtcaatccctttcagccaggagaatagcaggcactgaatggctcaagcttagttacttaaacaattcattgtgactagactgatcaatgtttctcaatagaggtgctattaacgttgtggctaggacatttcccagctgtacgctacaggtacatctcattgcagtacctttggcatatctggtcccacccatcatatatcatttgtgtacaccagttccctggctggatataccagttcaatcctatagctggaagcctggctgaactgaatggcctacagatgaagtgaaccaaatgatctataacataatggggaggggtagttccttaaaaacgaaatctggtcctatgaagaagatgagagagtgcaaatgaattctgggagggaaatcaataaatatccactacatctttcttctttgtaggaaagaagattaaaaggaagaaaaaccatgatgctaaatatttaaatgtgtgatattcctcttcagatgtgctcccggttactatggaaaccccttactcattggaagcacctgtaagaaatgtgactgcagtggaaattcagatcccaacctgatctttgaagattgtgatgaagtcactggccagtgtaggaattgcttacgcaacaccaccggattcaagtgtgaacgttgcgctcctggctactatggggacgccaggatagccaagaactgtgcaggtgcagtatcataaatactaagccagctgcctggccagcatgaccctctgccaatactgaatttagatgaagaatttctcttggggaagtattgtgagtgcccccttgtcactttcccagggcaatgtacattctcaggaatatgcatcccaaacccatcagggatagaaatttttatcaaggctactaatataattttgctcatgggtggaataaactaggagacacaaacacaacaaatgaacttttgtcttagcatcttatatccttctagttttaatcaaagaaataaatcggacttctatggattacctgccattaaccaggagactgaatgaaatcttgcatggttcaggccaggcatggtggctcactcctgtaatcccagcactttgggaggctgaggtgggtggatggcttgaggccaggagtttgagaccagcctggcaaacatggcaaaaccttgtctctactaaaaatacaaaaattagctgggcatggtggtgggtgcctatagtcccacccagcatcccttgaacccaggaggtggaggcagaggttgccatgagtcaagattgtgccaccgcactccagcctgtgtgacagagagattcttctctgaaagagagaaagaaagaaagaaagaggaaagaaagaaagaaagaaagaaagaaagaaagaaagaaaggaaagaaagaaagaaagaaagaaagaaagaaagaaagaaagaaagaaagaaagaaagaaagaaagaaagaaagaaaaagaaaccttgcatggttcaaatcagttttcttattcagagggctatatctctcgttcagttatgtttggtaaaatcaagatttccataaaatagattagcaagtcaagggtaccatttaatcaccaccatcctccaatttcctcaaattataagaggtaaatatttcaaagatagcatagaaaactttctggttaggcttcagttagactgaaacgcacagatcttattcatccatttgccacatagagtgaagctcttcaaaagtgaggtgacattgctttcctctaagagtacaggaaggctgagattgagtatgtcttactcttatgtgactttgaggggagagtgggagagcaggaaatattgtactcctgtggcatgcctctataaggaattctttcactgaaacagatttccacttgaaaagattcaaggagtaaggagttttaaataaaaaaaatgcaacatatatgttctgcagaagtcacaataaaagtaaacatgtctacaaaaaagcaatgtgcatagaggcataacactgagaatgacagcagaaaggaaggagcactgtgtctagtcaggctaaagagagagaaggcggacagcagaaataatgttggcaaaatcaaagcctgaaaggttgacatcctgattctcaaaacatttactaaatttgtgtttaaactataaagatgcaggtcactcttggaagagaagctaattttagaagcaataaagcatgatcttgctgaaagatttaataaatctgcattttgtggaacattaaacagatgaaatgtaataaatagatctcccatgaacctggtttttatgattattctgtaaagacagttaagaagtggggggaaatgcacaattctattccagttaattgctagcatagatggtaagagaattcctctttaaatattacaaattagttcccacccagaaactcagtggaaattgaacagtctgatgagattgggcttttgtttttgctttttccaaaaggcattacagaaaatcatcagtagatgaataatgggctcccacgtcttctaaattcatgtaaaaatgttcctgattccttgcagcacattattcttattgcactcatagctgtcatttggaggtttggagtctgtcttgccaagggtcaagcgcagtgggagccaagaatcgctcctgggcctcctcactcactccttgctaagctgctcctccctcacacctggcaatgatcaacccccgagttaaattaaactggagtatcagtctgcaaggaagggatggctttcaatttccagttgaatgatgagctcgtggtcatttagtatcttgtgaaacttaccaggacatttttggactaaagcaattgcactgtcatgtcagaatcccaaagagttgggagagaaatcctagaaaacttagattcaattttgcccagggtcacctttgaaaatctcattgggctggagcttaatcggatgaagggcgtaatctctgtatcgtagattctacacagtctgaaggaagaatgtaattaattcccattgatgaattatacactgatagctagtgtttctagaaaccaggaaaatattgccatattttaagcattaagaagtgcatttctcgtctcttgtttttgtttcccacagtgtgcaactgcgggggaggcccatgtgacagtgtaaccggagaatgcttggaagaaggttttgaaccccctacaggcatggactgcccaaccataagtaaaaataacagtacatgattgactaaccccactttctctaatgtgctgcaggtgtgggattaagaaaagctatgcaatatcactctctagaaactgctgagtcccacccctggacttaaccctttctgcacctcagcaaatggagcctgcaccaagtacttggtggtccacttgattccctagggcaaatgggtggtttacatttgcatagctctattttatccagtctttacattcagaatcttacctaatggctaaaggcaaagtcagaaacacaactcccagtgacagagctcttttcagctccttttcctatatcgtctcttcaggtccctgaaaatacgacgtacaaacaatttacaacacctggggaaactgagataccaagagatttaagtggcttctcccaagttacctcaaatctgaagtgggagcagaagtaaatattcaggctttacaaaatggaactgccttttatctctcctggttttctctggctctcctgttaattaaatcatgaggagttacactaggaacaaaacttttggtttaaaaactattttaatagtaggcatcccctcccccaaacagatgtatcttggtctctcagtccctcggagcagacgagattaaccttaccattggattacatcttagaagatgccataggatgtgaggcacaagtaatgccaagtttacaccctgattgaacaggtggcccctagacaaggccaatttaagaacatcaagatgcctgcctggtcctaagcatctcccccaccaagcctgaagtactggctgggaatcattcccttgagagagcttataagtaaaaccatgttaaacttcaaataacaaattaacatattaacaaccattaacacgccagtctccctttatcacgtctctagaagagagcaccatctgagggaaagagatcgggaacaggcacgttgcaaaaggtgatcaaggcagttctgaaacacagagtgccatccttgtgagtgtgtcacaggagggccctgggttctggaggtgatgacagtggtcagaggaactcaaatgtgaaaagtgagaagtgatgaggaactgggacctgcctccccatgtgcccacgttcagcctgaactttggtaccctcatcagatgtcaggaagcgactctcgcagcgataacctcagacctcccggtgctgaagtgttcatcctgccaggaagtggggctgtgaggaggagctgtgccctccctggggtggggagaaggctggtgctagcccctgaatactgagaaaagctaataggagaggaggagcgtctagccaatagccatcttcactagctaatgccaagcaagatactaaagcctgacaagaatagaattacagctcttcatgagacaaaaataaaaatggtattaaccaaggaaatagagatttatgttctgctaaaacggcctgcctttagcatgcttttgacttgtgattctgaagaaatgtttcacctccaggctgtgataagtgcgtctgggacctgactgatgcactgcggttagcagcgctctccatcgaggaaggcaaatccggggtgctgagcgtatcctctggggccgccgctcataggcacgtgaatgaaatcaacgccaccatctacctcctcaaagtacgcaggaatgttctactttccactctgttttcatcctggcttcacaggcccgcagctagtaattccttctacccctttttgtatctgagtctcatacctgtattacaggttgttagacctgtaggtctaacatagaaaacataagtaatttcataggaaattatgaaaagttgattgtaactatgagcttgggccaaaacaagaactactgtctacaaaagaggttatatgggaaatgaaatgactaaaagactagtatctatgcccaaaactactgaggaaagagaaacacttatttccttggcgcagccatacattacttgtttaagtcattaccacaaaaggtactgcaaggctaccatttccttagccttaatttgcaaggttttgagtttgtctagaagcatccttcttcttctctgtctctcctcaccccaccacccacccacctttccttcttatttacacacattctctctcattttctcatactcacagtcaaacgcagacattcacacacaccttgtttctcctcatagctctactggttaatacctagtaaacaagttaaaagcagccaacagattaaaaaacaaaaacagtaatacagttggccctccatatccacaggttccacatcctcagattcaaccaatcacagatagaaaatatattttataaaaacaataaaaaataatgcaacaattaaaaaagaaaaatacagtgtaacaactatttacacagcattgacattgtgttagtattataagtggtattataagtaatctagagatgatttaaagtattctggaggatgtgcatacattatctgcaaatactaggccattttgtatcaggaactggagcatccccacggggtcctgggaccaatctcccacaactaccaagggatgactatataaaggtccttgtatagctaagatttacaagttttctttcccactaaatcatgggcttctatcacaacaaaaggatatttttaaaataataatcattagctgagggaaaatggaattcaataccagcacattgttttgctttgttagtcaatttaggaaaatgattgagagcatggacgttgaaactaggttgcttgtattcaaatcccagctctgacacccactagctgtgtgaccgtaggtaagttatttaacctctataattcctcagtttcctgaataattattgcctctatctcatgagctgttgagagaattcagtgaattgatatatgtacagaagttagaacagtacctggcatactaagtactcattgctttttggaggtgcaaatgatatccatagcagttggccaaatatgtaaagtgtaagcaaaaacaaaaattgtattgtagcctggatagaatcttggtgtgaattttattctaaactttgaaattgttcttgtccaaaattacctgttggaacacatgaagacactaccccccaggggagtcacccagatccaggcctcctgaaaccactcagattctctttcctcaaaggcacaacttcaagacaggaatcattatggcagacaggaagtcagtgtcaagattgaagggctcactcccaagtaatctcagtaaagccgcatttagacccaactcctcgaaaatgaaaaaggagaaagccaggggtctgaaataaagagacttgcattaaaatgaggaaagttaatttctatactccatttacatcaatactgatgggttggtcagttcttccagacctaacaaaattaaaattctaaagctcagacacccagggccaccaccagcctatattgtacctttgtacaaattagaaaaaggagccctttccccatggtcaacccagcccctgaccagcatccctggtctagtgagtggagcttgcagaattttagcccctaagggcctcagtcccctctgcagaccccacccttcatatcaggctgcagcagcctgcggaccccactattttgagaaaagagcctcacactctactctgagtcctcttacactgaaagagttttatgtacattttttaaaacctggtgtgcccattgactattctcaaaacacattcttctgcagacaaaattgtcagaaagagaaaaccaatacgccctaagaaagatacaaatcaacaatgctgagaacacgatgaaaagccttctgtctgacgtagaggaattagttgaaaaggtacgtatgtatgtattcagtttctgggacagccttcaaagaaaggatttagctgatgtgaggctggctggtcacaaacgactgaggcttaacacagcccagaaaaaatgcagtgacccatgtgccttaaaataaatcaagaccagacctgtggagaaagttaacatactcagtctctaccgtctcctctcgttttgattgtttttcttgaaaagctatgtttgtggagaattttctgtgtatttgcggtgggttgatacggttgatttgtttaattaggatggtcattcaggtgtttgccaaggcatcttatgactaagagctacagagcatccagaattaaaatttattatatagaatataaaatttaaatattggttaaagtatacattaaatgataaatggaaagaaagggaattgtcctgagaaagcaatttcgctctttggcagggaaaaaaccactttcaaccatcactttataccacagactaaaataaattagcccgtttaaagagttgagtataaatctcaaatccacaagaaaatagaacaaactacttattaaatcttcaaagggaataacagaacacttaaatacaacataaagaatttcaataaaaagatagatttgacaagataaaatttcaaatatccaataaaacaactaaataaacaaaaaagacaactagacagagaaaaatattgagaaaaatacaacttgtaaaagctgtcaggaattaacaggaaaaacattaaaacatgagcagagtcaatgtgaaaggctattcaacgcactccgcaacagcctaatggaaaaacatccatccatgtgctatactaattttacaaactaagtcacgaggcaccatatttagcatattagaatgtttaacacagtttttttttttttttctaatgatattccaccagtactggccagagtacttcagaattgccgctttccaaaactggtagttgacattataaacaattctcatgatcaacaaaaattttaaaaaaataaaataacaatagtattctcttttgaccttggaccccaaaccctttaagagattatcatgaaaattgtgtccctagttcccggcaatggcacatattaatccaaccactagtgcttgaagagcagtgaaatctcttaaatagtaaaggaaataccaagaaataaatatttgtggaaactcattgttacttcatgttggtatcagatatggttgaaacttgctaaaactatcttaattcttttttctttttttttttttttttttgagatggagtctcgctttgttgcccaggctggagtgcagtggcgtgatctcggctcactgcagcctccgcctcccgggttccagtgattctcctgcctcagcctcctgggtagctgggattacaggcacacaccaccacgcctggctaatttttgtatttttagtaaagacagagtttcaccatgttagccaggctggtctcaaactcttgacctcaggtgatcagctcacctcagcctcccaaagtgctaggattacaggcatgaaccaccacgcccagccttaattctttcttgaggaaagaattttcaagaaaacatctgaggaaatgttttcaccaagattagctcctcccacagcccaggcagaattcctgatccttttgttgtacaatttccccacttctaatgtaagctaaatgcaggctttcgtggagaggaaataatgtacgcttgaaagttaacatcacagtagaaaaggctcccggacaagaagggcagaccaccaacacaggaggttgatgataaagctactaggaactttcacccagctgtttccatctatttttattgaatataatgttctgaccacagtcctgatggtgcaaaaacctgctgaaacatttcaaaacaaatgcccagggctggtcttaatgactttttaagcattcttcaagcccttgctctagaaaagtccatgactgattcttagatttaaggaaagctgtgtcttagaaagccttctatcaagaaagtaactaatatttggctttaaatagagtaaaggagttcattgtgtataaaaatcagtaatattgccccttgaacttgataagtaataccactttttgcaaattacctgccacatggatttcatgtgacccaaatctcacaagttacatccacctagctacgggttttgtctgaacttccctttctaaattctccagccttctactgggaagtcctacagccctttcccaccacttatgtctgggattcccctaaaggatgcccatccatctgtgttcataaatacccagtgctcaaaagatgctccctttggtgctgctgatcttgtctgcaatgaaaattccaaagatcgtgccaagattctacttttccatgttcccagagccactgtgctcaaggtcagagtgtcactgggctacaagcagaggtgagatgtggccctctcccaatctcagtgctgcccctcaccatctggatcttgaaggtccactgcagagcccagagttacaaagcacagtctccaagggcggctcaggaggtactgcaccatctcctccacttctactccttgaaccacagcagaagctacctgaatgacaactcatgcagagagacccacaggactaaaaggaaagtaggctatctccaagcatcaaaagcatctgaacctcatctctggtcctgccaaaaaggcaggagaaaattaagtacagttggccctctgtattcatagattcaatcatggcttaaaaatatttggaaaaattccacaaagttccaaaacgcaaaatacaaatttaccatatgctgagtattactttgaatccatatgaacgaagtgatgtataggcattgcattaggtattagaggtaatttagatataatatatatagggggatgtgcataggttatagtattgcaaatactacaccattctatgtaagaaacttgaacaaccatgaattttggtatctgtggggtcctggaaccaatctcccatggatgctgagggataactgtttacatttctattccagaagcattattgaacatctgtatataatatttatttatttatttatttatttatttatttattttcagacagagtctcgctctgtcatctaggctggtgtgcagtggcgcaatctcggctcactgcaacctctgcctcctgggttcaagcaattctcctgcctcagcctcctgagtagctgggattacaggcatgtgccaccacgtccggctactttttgtatttttagtagagatggggcttcaccatgttggtcaggttggtctcaaattcctgacctcgtgatccacccgcctcggcctcccaaagtgctggaattacaggcgtgagccaccgcgcccggcctgtgacagttagtgtgctaggtgctaggtatcctgaaatataataaggccctgttttcaagatgcttcagtctagcagggaaacagataagtaaaaacataattatgatacagcatttaataagagaaacatggtacaggctaaacggtaactctaaggaagaaatagtgaaatattttggcatgggtacactaggaaaggcttctcagagaaggtgagtattggcctgtatattgagaatgagtaggagtttatcagatactcccaagcaaggggtaagtactatgagaacagatagatgtgaagcagcgtgctaagttcttgggactggaactgtggccttgtggaagattcattgtaaggcagagagaggaggagataatgctgaagaagctgtcagaggcccaattgtgaagaaccttcccaaacacgctcgtgaacatggggacttcagcctgtggactctggaagtcattcaggtatttacccagaacaatgagctgattagatttgcactttagaaacgtccctctgcagtgtggatgatagactagccagtgaagactgacaataggggcactgcttaggagaccgccacagtggtctagagaagagagcagtgggttgctgtcttgccttcatttgaaaagaatttgcacagaacaaggatgaactgagactgtggtcatggaaaagaggaagagaggccagagtggcaggtggaatgaaacagacttggtgaccagttggaggtgagaaatggcaaagagagaagctccatcctgagacgtggatgactaagactacgaacacgaatggattactctggacattttaaaagtgaaatatctgtgatggcacagagggcagatagagatgtgaatctgcaattcagagggtaatcagggctggaaaggaatttagggtcattaatgtttaggaggtaggcagaagtagatattactgtacaaattctgaagtagcacaccaatattcctactattggtttgtccaggactgttgctgtttatgcttgtgtcccagaataattactaaaagttctccctttcatgtgcaaaaatgccccaggttgaaccataaaatatatgatcaccctagatattggttatcatcctcacgtcatctaccttttatgtactatattaccaagacatccttgccacttttatgtcaaatatgtacaagaagaattttctgttgagatgagcaaatgactaatacatttgtaatgtaaaccaccaactagtttacagttacaaggtaattttttaatttcagcttttcttaaaccgaggcgcacctgttttcccacgtgcctatatcattattttccttccacaggcaaagttacaggaaaaataaacattcatataagccatcactataggttcaattcagtcatcttacaatgtaaaggaatagatgttcctctttgccactgatccagtcatatatacagtatatcaatagctatatatctctatctacctgtatcttagcgccctctggcgtttgtcaaaaagaagaggttttcttataggcatgacatttttcagctgtctctcatcacttcaactgaagtttccatatcaaaaaataataagtttaatgacataggaataacaatagagctttactctgaagtatcaagccaaagtaaaaactaggggtgttgtgctttgcaaatataacttaaactggatcaaagatcaactcattaaaaattctaaaattttaaatgcttgtgtccgtattttttaaaagcagggaggagtaatattaagatttattatagtttctgcatatttaattttaaaatgaccacaaatactgtttttctggaaagcactggaacaagccaagaagaagactggaattgcaggaaggagtataatgactcagaagacagtgtccattcagagagcccacagtttatgaagggactgatgaccacattgccgctgcacagtgggctctgtgactacaggagccttgctctgtagggaggggattacccttctccaataaaaagcctctgggcatgtgtttgttat

SEQ ID NO: 1133 - DNA, 17809 bp, Homo sapiens
taatgatgatggcaaatcacatgaactgtctaaccttcgactggagaatcagctgctgaggaatgaagttcagtctttaaatcaagaaatggcctcgttactccaaagatccaaagagactcaagaaggtagaggcttaaattgttcaggattaggaatttaacttttaaaaataaacttaaggctggacgcagtggctcgtgcctgtaatcccagcactttgggaggccgaggcgggcggattgcctgaggtcaggagttcaagaccagtctggccaacatggtgaaaccctgtgtctactaaaaatacaaaaaaattagtcagatgtggttgcaggcacctgtaatcccagccactcaggaggctgaggcaggggagttgcttgaaccagggaggtggaggttgcagtgaaccgagattgcactactgcactctagtctgggcagcagagcaagactctatctcaaaaataaataaataaaaataaaataaaataataaacttaaaaactttaaactgttagaaatatttacatttaaactgtgagaaattagatgcgacttgtaaaatgatattttcatagaaaaactgcccagatttggaaatgggaccagtcatcctcccaccaacccaaaacataagagtattcgcttctttggtcatcctttaagaaccatgaaattgaagaactgagaggaacaaactagtagtagtctagttcattcatttattctgaactttcaagggaagctgttccattaaacaaagtagtaggcactaatagagttgcagtgttgctgctctagggcatataaaaggtacatggaattcagttcagtgcccttgggaattgtgcagtgaggtggccctggagtagaaaacctcaagttcctcagaaataggtaattaagaaggaaataatctcattatggaggtagtgactgaggaagatgtgaatgttattgtaagtgtggctgagaagaaaacgagtgacaaaattgctgccttggttcctggggctaattagaaaggagtgaggggatggtgggaaaagttttgccaagccatggatagagcctagaagagaggaaagggaagatagttgaagactcactaagctaggcgtggtggctcacgcctgtaatcccaacactttgggaggccgaggcgggcggatcacaaggtcaggagttcaagaccagtctggccaacatggtgaaacccgtctctactaaaaatacaaaaaaattagctgggcatggtggcgcgtgcctgttattccagctactcaggaggctgagggaggagaattgcctgaacccagacccaggacccaggaggtggaggttgcagtgagccgagatcgtgccactgcattccagcctgagctacagagcgagactcgtctcaacaacaacaacaacaacaacaaaaacaaagtactcactagtcaggctgactttagaaaaagctttactttacccacactaatttagacatagaaatagagctgtttggccaggcacagtgagtcacgcctgtaatcccagcgctttggaaggctgagatgggaaaattgctgaagccaggagttcaataacagcatgggcaacagagtgagacccctgggctacaaaaatcaatttttttttgttttaaattagctgaatatggtggtgtacacctgtaggctgagctactttggagactgaggtgggaggattgcttgagcccaggagttggaggttgcagtgagtcatgggccatgatcatgccactgcactccagccggggcaacagagtgaggctctgtctcatgtttttgggtttttttttttttctttaagaaaggtgtgtctcactggaaaaaaaaaaaaagctttgagaccctataaagtttgattcagtatttttaaaatgttgtggtggctaactgcaattacatatggtatgtgagggtatggaaatgccattgtattctgaaatagagcactactttgctctttttgcattgatttcctaggtcaaaagaataacatctttttgcaacagtaattgaaagcaatagattcttttctgtgtttaggttttgttttgttcttactaggatgtacctttgatttggatttgcattcctttccctgtcactagcagaactttacaaaatatactctgctatctattaatactagtttcggctcccagatgctttatcatatagaaacagcattgtagaagagcagctagcttcacgcccctttctaatcaattaactataatctagctgtgaatattgcccttgaaaagtggatgaccctttggggcaaagaaaattgaagacgtgtaagttcccaattttgtcaataaggaaagtactaaaggcactcaaagtagaaactgtacgtgctctgagaaaaatgtgtttggttttgcttgtatagagaaatttaaattttttaatagaattaaacaaagcaagagcaagagttgaaaagtggaatgctgaccattcaaagagtgatcgaatgactcgaggactccgagcccaagtagatgacctgactgaagctgtggctgcaaaggattcccagctggctgtactgaaagtgagactccaggaagctgaccagctactgagtactcgcacagaagcattagaagccttacagagtgaaaaatcacggtaggtgattctatgaataatgaaaaaaatgagcaagtaatggtaaacattgtagtgtatccacttatgaaacttagctttcttggaaatttacaagagggaatatttcttttggtagtgttagaaatgtgtatgattaaaatggattcattggctgggcgtggtggctcaagcctgtaatcctagcactttgggaagccgaggcaggtggatcacctgaggttgggagttcgagaccagcctgaccaacatggagaaaccccgtctctactaaaaatacagaaaaaaaattagccgggggtggtggcacatgcctgtaatcccagctactcaggaggcgaggcagcagaatcacttgaacccaggaggtggaggttgcagtgagctgagattgtgccattgcactccagcctgggcaaaaagagcgaaactccatctcaacaacaacaacataaaatggattcattgtttgaaccttgagatgcattgttagcaaattctgaatttaaaagcatttgttgtgtcattaatctttcattatacggtatgtacttaatatttggatgcctaaaaatgtagattatgttccattagaaaggaaagatttatctaagaatatttcagtcaaattatcttttttgtgcttgactaaagctgacgctctaaaaattattctgccttatcacttgtacactgtagacatgagttatttcacatgatgcattttcctttagaataatgcaggatcaaagtgaaggtaacagcctgcagaatcaagctctgcagacttttcaggagagactgcatgaagcggatgccactctgaagagagagcaggagagctataaacagatgcaggttagaatgagagacagcagattcctattgttacttggacacggaaaaaatgactttatgctgtttcatagcacattaactgtctaatataattctgcaatgcatttcagaaaattctgtttctgtgacaaaaatcagatatttgaaaatttagcttgatccttgctaaatgtatttaattttatgtgttgagagacaattaaaatagttaatgtgcattagagatatacatcttttacttaatttttgcaacaatcattgtcattatttgattaaatgctaatggttgggggatcgtatttgttttttattaatttaagtttttctgattccagattaatctggctcatttatttcaggagaaaattgtatgtaatatgtaaagagttttactcttagatgaatatttgcatttagttcagtcccagccctgtctacacgtgggaatcacttgtgtgataccttgtgctgtctgagctccatatgcagtcacattccattgtatgaggtagggactaggtattgacactttggttttagaaggttcacaggtgtatctaatgagcagtcagggttgcaaaccactggtctgggctagcttttcaacaggtgaaagtaattcagtcctgaaagtaaatatcaggtagtgtgtgtctcttaattttaacacaatatatccaaagtattaattatttcaatatgtagtcaatattaaaagttattaatgagatattttacattattttttgaatactggttctttaaaatatggtgtaatttacacctatttatttacttattaaattggaaacagttgatcagctagtatcagaccagacctagtatccaagtgaccaggttcacctgggaaatttcttaaaaaacagattcccagacccatcttgaaaattccagtttagtaagcttgggaaaggccttggatggctatatttttaacaaacttcctggttgattttaatgcattgccatgtttgggagttacaactttacatttcctatactttagctcctaacaaattaagaattttttcccatccctactatgttgtttggctgagctaataaatcccataagatatccgaatggatggttgtaaaatatgtttcaaagctaaatgatatcattaattatgatataaaaatttgtcacagagcgagtttgctgcacgccttaataaagtggaaatggaacgtcagaatttagcagaagcaattacactggccgaaagaaaatactcagatgagaagaagagggttgatgaactgcagcagcaagtcaagctgtataagttgaacttggagtcctctaagcaggaattaattgactacaagcaaaaagctactagaatactgcaagtaagcatgaaatgtacacttttggatgttaagatgtgcaagttaactgaaaggcaatttgagactgtgtagatactgtgtgaggtgctttgttcatgttcgtctgattggctagctttaggtgccttactctactttagaaattttattaaaggatgcagtgtttcttgttcctaccacttcttttaaaaaaaaaattcattctgccactgcctagttcaggtcttcaacctgtcaccttactcactgtgatgatattaatgcttgttgttgagcagctgtttattcttccttgttgatctcctattgaatttttgcagcaactgctttaggactcatccagttctcagaattgtctcacccagctttttttcccctccttcagatctaaggtgatcttaccctctactttactaagaaagactacagtcatctaatgtcgtttttgaattctctttcctttgtccctcagagggaaaacatgtcctttcatttttttctaggatcattttcctgcctgtgcattgattccatctcccatctcatgtgtaagccctttctccatagatctatgcccttccttcctgtgtgtgcctctctgctgctgctgccttctggctcagcttactcaagagcacatggttatttagtggaaaaatgaagactagatctcggactcctgcctaagagaaaaacagtctcttttagctttgtgaccactttgcactatttccctatcttcctttctttcagtgtcatgcttaccagaattgtgtacgtgctgtcttcatttctgtagaacttgttaactcttatctccttcttttcctactacatgtctgaaatttcttctcaaaaatatttgatgacctaaataaatattctctgtccttttcttagtctccataccttgtattttggtagaacatttggctctgttaaccctcccacttccttggaactcctgccttctatgctattcacatctccttggctctctttttgtcctcttctactgctgtttctgtctctcttgggcgctcttcccaatctccaaagagtcagagtcctcctaagctctgtcctgaaccctctttcattgtcctttcttaccttgcactgctgtatgctgcctctgcttctaatagccgcctgcatatgacttcaagcatgtttccaagcctgacctcctgacctcagtgcccagctgcctactgtgcaggcatggagtgttcagctcccagaccaacttctccctcattcttctgttctggtcaacgttactgccatgtggcagtaaagcttgaaacctcagggtcatttttgactttaccttttttctttagtctcaaacttctaatggctatgaatacctttttttaatgctacttccatgaagtatcatattgatctcctcctcaaactcttctttctaagtacttttttgtatcaccctaatttgttaattcattgaaaagttacttattgagcacctaactactcactaggcacagaggatacaaagctcaaaagatgtgtcctcttcctttaagaaaacattcatcttagtggaaagaaacagataattgacgtaataaggttattaatgcagtacaatgggagcttgagagaagaatcccttaaaacttgcctgaggctgtcaaagatcactggactgaggagatgtggtataaagagaaacttgaaagatgaataggaagactcatgatagggaagagatttccgagagaacaacctgtgccagagcaagggggccagagagaacatggcatatttaagggactgcagctagttccatactgctggaacataacgtcttcagagatgggaggcaaaagactcataaagttcaacggcaggcagaagccatggtcaggtttgagtgtgagaactgtggcagcctgatgaaaaggttaggggagatttgggcctctgtcttgttcatcgttgtatccccagcacagtgcctggtattcggtacattgttgaaaacatggaagtgataaggggtggcatcaatggcatgtagatggtgaagaggtgatcataagaaataatgaggacctgatcaaagtttttggcagtgaggatggcaggcaggggacagctaagagatatgtgggagatagaatatatgacatgtggagatttaactggaaggatgggggaaaaaggcaaatggaatccaggatgactccaggtttttggtttaagtgtatgaatgatgtttccttgtgttaataaaaggggaaacaggaaagagaacaggttagggttaaaggagagtatgacgaattatggtaagtatgcaaaattgatgcaacattgaggtgacaatgttagaaaggtaattagaagtaagttgggagagtaggtaagtttaggcaagagcgatgtgtaacctaacggggagaaaggctgaggtctaaaaacacagtcttaaacatcagcatttacaaattgggcaaaaggatagcctgcaaaagaaaaatactgagaaggtgagtggtcagagattggagagaaccaggaggagactgatgccatccaatgaagccaagcagagggagagtttcaagtggtgcatgatcaccaaccacagcacgcggctctgatgtgacaagtcccgagctaaattcctggacttggcaactaggaggtccctggggacctctcaacagagagttccggggtgcgctgggagctgaagacatggaggcagggtacttgaccatggacatgaggacagtagctagatgggggaatgaggttgggaggtttctggttttttattaaaaaaaatcttaaaatgttataaatgatcatgtttattatagaaaatttgaagaatacaaaagaagtttgaagaaggaaatggaaataacccataatcctaccacccagaaaaggaaaaattatttttgatggaggagaatgactttaaaatattttaatttaacgtgaaagctgctggtccttgttgttcctagtctagaattaggactttataaactggtctttgcatgtcaaatctcttcttcaaactcatcttttatctcaggggtcagaaaacattgagagggtcaaatagtaaatattgtaggctatgttggctacctgtagtctccatcacatattctttgtctttattatttatgatccttttaaaatgtaaaaaaaaaatttagcttgcaggctgtacaaaaacaggcccacggaccatcatttgtgagcaccttcttcatagcactgccaggttagcctcctaaaatgcatctctagtcatgtcactcctctctctactttttggtaatttgttttagcctgccatataatattaaaacattttagcctgagatcaggagcccctccaaattggtgctaaaatactatctgagctgcatctcacattattttcttacagactttgtgtgcttttgcatttttatgctttgctctctgtttttctctgcactttaaaaaagtctacccatatttcaaggccaacatttatgctctcttaaagtctcctcttacccagaagtggtttttcctctcagaactctgcaagtaatctgaccatatccttttctctacttgtgttgattgccttctgctggatacttgtaacttctcttttagtttgtaaggcagagggtactatctatagagagagacattatctttattgcgcagaacacttagcaccatttacttgttgggtagaatgtgttggaaaataaaaactatgagaagaaaatgtgagaaaagtcttgtttggccaggtgtgatggctcactcctgcaatcccagcactttgggaggctgaggcaggagaattcctggaggccaggagttcaagaccggcctgggcaacatagcaagaccgtatctcaaataaataaacacaaattttttttaatctttttttttttttttttttttttagacggagtctggctctgtcacccaggctggagtgcggtggcgcgatctcggctcactgcaagctccgcctcccgggttcacgccattcttctgcctcagcctccctagtagctgggactacaggcacctgccaccatgcctggctaattttttttgtatttttagtagagacggggtttcaccatattagccaggatggtctcgacctcctgacctcgtgatccgcccgcctcagcctcccaaagtgctgggattacaggcgtgagccaccgcacccagctggaaaaaaaaaatcttattcataacaagctttcaactttaccatgattgtggggctaaagtccaaggacattatacagcaaggctctgttgtgttttttatccttagggatttaagaaaatctgtggactttctttgatggagataatggaattttttttagtgggttattttctgtatagtagatgatattcaatatacaaactaatctctgctttgcttaaacatatttcttcttttataatagtctaaggaaaaattgattaacagcttgaaagaaggctctggttttgaaggcctagatagcagcactgccagtagcatggagctggaagaacttcggcatgagaaagagatgcagagggaggaaatacagaagctgatgggccagatacatcagctcagatccgaattacaggtaagattcatggtggttcagcttagtagacaccatttaccctcaggtgttaacagtttgagaggtggggaaacagcattactaaagcgataggtttctcgcttctcttcgcttcgcttcgcttctcttctcttcctcctcctcttcctcttctcttcttttggagtcaggatcttgctctgtctcccagcctggagtggtgtgatcatagctcactgcagcctcgaactcctgggctcaagcagtcttcccgcctcaggctcccaagtaggtggaactacaggcacatgccatcacgcccagctaatttttatattttgtagagacagggtatccctgtgttgtccaagctggtcccaaactcctggcctcaagtgattgtccctcctcagcctcccagagtgctgggattgcagggctgttgcagcccgtgctgggctaaagcagtaggtttctttctttctttctttcctttctttcctttctctcctttctttccttcctttctttcctttctttccttcttttttttgagatggagtctcggtctgttgcccaggctggagtgcagtggcgtgatctcggctcactgcaacctccactccacctgccaggttccagggattctcctgcctcagcctcttgagtagctgggattacagacgtgcgccaccacacctggctaatttttgtattcttagtagagatggggtttcaccatgttgcccaggctggtcttgaactcctgacctcaagtgatccgcccacctcggcctcccaaagtgctgagattagagacgtgagccaccatgcccgaccaggtttctaatccataagttgaccataaagttatggtgataaaaaacagatcaattcattcaacaaatagttaccaagtgcctgccatgtgcctaggtttggaattagaacagggtcttcataattatagatcttacattctagtggttaaaagcaaatcagatttgagctcctatgtgaagctgagatgttttctaatattagtatgggctcagggatgatcttctaattacagttttatccttattcttataatttatagtttatgtataattactatatttaaaagtaaagttgggccatttattttgcttaaacttcggggtctttgacataaatatcgtaggaaggagtctctgaaggtgagagaagataaagtgcagcataacgagcttccttttcttaaaaggaagaaactttttgtagagaatgttcatccatgcattaactctgcacattgtgagacttgtgaactacaaaagaaagcgtgaaagttgtgagaataggataccttgtctagagcatagacttgaatagcagacagacgtggatagattctgtctttggtacttaacagatgctgcttccacaaggcacttcatcttgcggagctttaattttctcatctatagaatgcaggtaaacaaaggttctcttgacaataaaggataatatatgaagagcctagcattgtttctgacatgtaatagaccctcagttaaataatagctgctattatttctgggtttattgttattcattaaagtaggattttttttttaatctgtgaatttgaattccaaagaattcagtcctgcaaacttagaaattgggtagatgctaaacttactcatatctgttcatgtctttttggtgagattatgaaaaatacttgttttatttaatatatcagcatcattaatgacattgacccattttcttacccttctcaaaatttatgcaatgtataataagtgttaggtctaacaaaatgaaagaattgtaaataattacaatagctattgtttactgagcacgtatgttccagatactgcacagagcacttaacatatatccttacatttattccttaccataactctgtgagggagatgatgatattctcattttatagttgaagaaatttaggcatggagaaggaaagtaacttgctgcaagactagtaaagtggcagagccaggattagaacctagtctaactccaggacatgtttttgaccactgtgcatactgcctgcctctcaagaatttgcccgatgtagtcaaattgatgacaaagattaatctaccttctgctaacctgaaaactcaaaggtagggaaaaatagttgtcattattgctttttcctctaaatctacaaagttgtgtgagttcagaggattgcactgtgattatctgggcatcttgttagtcttagttctttcaaacagcatgtgaagttccaaggtttgtggtgatgagtatgaaacagaatgtaccaacagataaaaaagcaaaaataagatgctgattttaatcttctgttgtgccatatgaatggactcatgcttaatccatttggggaaaatatagaaacctagagccatgtttttgctactaggagatttgacaggaaatccagaaggtgagttcaaagaaatgagagtaagaaacataagaacatgtaaaaaccaataatagtaataaagtaataaagctaaaagaagaaaattatatgccaacttctggtgatatgcaagacaagttatattcttatcatatgttgattactggggaacagatgcacaccaaaactaattataacctgcaatttcaggggactaatgcagtgaagtcctttgtgctattatgtttctgattttttttgaaactgttagcttttgagtaaagatataagtctcccagtgagcctctgccgatactcgtgaaaccacatggcttatgtgctgcagcagctgtagcgccccattcattctgctgttagccatagtagacaatgaaggtgtcaggttatatgctccctataggctgaaaccatgtctcattcacctttattcctcagtgcctcctgagcccagcacatagtaattgcatggtagacaggttgtgtggctcaacacctgtaatcccagtgctgtgggaggattgtttgaggccaggactttgcaaccagcctgtgcaataaagccatatcccatctcttaaaaaaaaaaaaaaaaacttaagccaggcctcgtggcatgtgcctgtagtcccgctactcgggaggctgatgtgggaggatccccttgagcccaggagtttgaggctgccatgaactgtgattgtgccactgcactccagcctgggtgacgtgagactctgattcttaaaaaagaaaaattgctcaataaatgttgaactgaatgttaattattgcttttacatgtaagctttttctctttaggatatggaggcacagcaagttaatgaagcagaatcagcaagagaacagttacaggatctgcatgaccaaatagctgggcagaaagcatccaaacaagaactagagacagaactggagcgactgaagcaggtcaggatttgagattgatgacttctgagactctgtcctctagcggtcatatgagcagacctcccaggaaagcagcttactgaaatttttagagtatgggcttagggttaccccacaagttcctcctgccttcccatctcatctgaaggggtggcctgcccctccacacctgtgggtatatctcatcaggtgggatgagagactgagaaaagaaataagacacagagacaaagtatagagaaagaacagtgggcccaggagaccggcgctcagcatacggaggaccttcaccggcaccggtctctgcgttccctcagtatttattgatcactgttttcattatctcagcaagaggaatgcagtaggagagcagggcgatagtggggagaaggtcagcaagaaaacatgtgagcaaaggaatctgtgtcacaaataagttcaagggaaggtactatgcctggatgtgcacgtaggccagatttatgcttctctccacccaaacatctcagtggagtaaagactaacagagcagcattgctgccaacatgtctcgcctccagtcacagggcggtttttctcctatctcagaatagaacaaatgtacaatcgggttttatcctgagacattcagttcccatgggcaggcaggagaaagaggccttcctcttatctcaactgcaagaggccttcctcttttactaaccctcctcagtacagacccttgacaggtgtcgggctgggggacggtcaggtctttcccatcccacgaggccatatctcaggctatcacatggggagaaaccttggacaatacccggctttccagggcagaggtccctgcagctttccgcagtgcattgtgcccctggtttatcgagactggagaatggcgatgacttttaccaagcacactgcctgtaaacattttgttaacaaggcacatcctgcacagccctagatcccttaaaccttgattccatacaacacatgtttttgtgagctcaaggttggggcaaagttacagattaacagcatctcagggcaaagcaattgttcagggtacaggtcaaaatggaatttcttatgtcttccttttctacatagacacagtgacagtctgatctctctttcttttccctacaccatcctccttgatttttgttttttaacagatgagaaatggaggcacagaatggtgatggcacttgcctggtacaactaattaaagatggaatagaaccaaggtttcctgtttctgagcccagaatgctttctattaccctgtctgtattttgttatatctcctagtatagaaaacttcaaaacatattatattcatcagttggttttcatagtttattgcatttgtgctttctaggaacagcagtaaatattatttaataaaaatacagatacaatattagtgccatattaactgttctttctgcttgagaaaaaagtcttatacagactcttctaacaaatcatgtttaaaattatatttcattgttcaattagcagttgcatgttcccaagccaaattattttactttaatgtactcatataatagtttcagtattaacagagttaaacatagccacattttcagaataagattctatatctaatgttaataacatcactaatttactaagtgacaacattgttataggcatttagtacatattatcttatttcctactcacaagtaaatcactactattctctttattttacagaagagaaaactattcttataattctcagtgctttactgttagtatttccatctttgtgtatttaaattctttaaagacgtttttcattaggatttattacttctgaaacttgttcttttctcagagaaatgttttttattataaaagttgtaattcaactctatttcctgagtactcagtgaaaaactcaccaagtaacaacgtgcagggtatgtcataggcagttttagataatttagttatgagattagcgtcctttcagaaattgcattttaatttattcaaggcactattatatattaaaaggcaacaatttaatgttcttgatgcttaatgagataattttcattttgttatggcagatggttttaccgtacctcttcccagtgcctttttaaaatgagggagttaaatagaagaaaatggagcttaatgtagctgtgggctatttatttagtatatgttccaaatggaaagtgtttaatcttgcaattgaagagtcctttagtgcttcttattaatttaagtaacaccaaccttaagttttgtacttgcctagagcttaaaagaaatcagacaaaccttgtaaagtgtgattctcctaccctaattacctttctcataatctcttttctcacctctcttgatttttttccatttgtgtgatgaacaacttgagctaaatgtttaacagagtctctagcagtgtgctgccatatcacctttactttttcagacagctcccgaactgctgctgtactcttcactgtcttcactgttaagtgaaaagcttttgaaagtacttagtaactccagttactccttctctgttctacgttgtatttcagtgatttggacacatttttggattggcatgtgctttactcttagattctgagctgtctctgagtgatccattgtacaaacgagcagtgcattagtgcagttgttaatgagtttagaggtattagcctttttggggagattagccttttgtctataatatgaattgcaaataatttttcccagcttgtcatctgtcttttagtttgcatagggtttttattttgttttgttgccatgcagaagttgatttttgagacggagtgtcgctctgttgcccaggctggagtgcagtggcgcgatctcggctcactgcaacctccgcctcctgagttcaagcaattctcctgcctcagcctcccgagtagctgggattacagacgttcaccactatggctggctaatttttgtatttttagtagagacagggttttaccatgttggccaagggctggtctcaaactcctgacctcaagtgatccacctgcctcagcctcccaaagtgctgggattacagttgtgagccactgcacccggccagaagttgatttttatgtagtcaactttatcattcttttctaccaaggcttctggattttcagtcaccgtgttcctctttgtgaaattataaagaaatttgcctctgtagttttcttctagtacttttttggtttgattcttgcatataaatctttgatttattaggaatttactctgatgtgtgaggtgagctacagatccaacctaattttcttccatatggctacttttttcctagtatcatttttttaaatagtttattgatttgagatgtcacctttatcatgtcctaaattctcaaggtatctagatctgcttctggacttttgttctcttccattagtcactttgtctgtttatgcatcagtaccacattgcttttaatttctgagattttatatgttttaatgtctttatgacccgttctccttttcagagcttctggcttttctttttcttttcttttttttttgagccatggtttcactctgtcacccaggccagaatgcagtgatgcggtcacagctcactgcagcctcgacctcctcaggctcaggtaattctcccacgtcaacctcctgagtagctgggattacaggcacgcaccaccgagcctggctaatttttttatattttgtagagatgaggtctcactctgttgctcaggctggtcttgaactcctggactcaagcaattcacccacttcagcctccccaagtgctagaattacagttgtgagctaccgtgcccaacctggcttttctttcttacagttttccatatgaatactagaataactttacatagttttttttaaaaaaagcagcttttgtttttgttgagatcatgtcagacttatgaattaattagaggagaactgacatctttatgatgttgtattcctaagaatatgatatgactttttatatgttccagtattttttgtaccctttagaaatgttttaaagtattctttatatgtactccacacatctgttgttaaatttgtttttgctactattatttcttggggcctttttctcatatcttctaactgctttatataaaactattgatttttatatattgttttatattctgccaccttactgaattattgtttttctttgtctcatgtactttgcctatttttaaaatgttcctggtttgtgtttttaatctattttatgaacattatattgatctttatcatatattttatgaatattttttccagttgtcatattaatgctatataactgagattcttgaagagattatccattcttcctcattacaagataaacattttttgtttctgattatttacactgttaataattatttattatggatctttgtttacaatacatactgaagtgccagcttttcatcagacccatctgttattcacttaattatatactcattatataatacactctgttataaactcagttatatacggagttacatgttcagcacatactgattgtctaccatgtgccaggcactgatttaggtactgaggatggaataggggacacttatttcgcttctgttttgtttgtgcctcactttgcaggagttccactatatagaagaagatctttatcgaacaaagaacacattgcaaagcagaattaaagatcgagacgaagaaattcaaaaactcaggaatcag

SEQ ID NO: 1134 - DNA, 383 bp, Homo sapiens
agctacatttttttaaaaaggacacagtaagaactttccccgtgttttcacctgagttcttttgtaacagtggtgacaaaagttcttttcaacctggtatagaaaattcatctaatgccatttgagtctacatttgctctgttctatgatttgcttcttatagaagtatcttgtagccaaagtcacgaagtagatgagaattaccccgaaatttcagacctttgacatcagtgtggttgtgctgattgccaggttcataattgtgatttcattttcctaagaaaaatctaatgatacatcttcctattaatgattgatcagtcttccataaagtcaccaagatatttttttaaccgtgaaaatgtaaaatgtacagaaaataa

SEQ ID NO: 1135 - DNA, 475 bp, Homo sapiens
tgagccaccacgccctgccaacactcccatttttaagtcacgtcttaggtgcccattccctaccccacttgattattagctttttgtggttattttttcttttaggtaaaatgtacatatattaagatgcacacaaatcttagctatatgacgaatggcaatacctgtgtaacccacacctttaccgtgttatagatttcctttgccccagaaagttcctcatgttcctttccacttaatctcctcaccccgtccctgaaagcacccagtgctctgatttttctctccttagttttgcttgttctaaaacttcatataaattgaatcatatagtatatatactttctaatctggcttcttttactgaactgttagtgagattcatccatgttactgttctttttttattctgttttattatgtagtactctattatacggctgtaccacagtttatctattctcttttatggaca

SEQ ID NO: 1136 - DNA, 278 bp, Homo sapiens
acagaactcagatgtttgagaattgacaatcaagtcctcctggacctagaagcataagaattctgttagattagctcttgccacccctgtcagaacttaactgttcatagatttatgttattgacccactttcttcaagagcagaggcagtttttcaggcagtgctgacgccagaattggaaaagcagattctcatttaacaaacatgacctcagtaaaaacagccatgttgttggtctccatttgaaggcagaggtagggattgggagtatgtgatt

SEQ ID NO: 1137 - DNA, 509 bp, Homo sapiens
tggatagaagaacagatctagctaagtaggtgataagacaagtatagcaaaatgtaaatgataggctgtagtctaaatagtggttataaaggtgttcactgtaaaaaagctttcaacttactggcttttttctggagtatgtgaaaagaaatgctttcaactttcctatatgtctgaaatttttaataataaaatattgggggaaatgagttgaaatatctggaaaaataaaatttagataatggctagagaaaattttcatggatttgggattcaacataccacccccagcctcattattatccccattgtgttcaagctctctcttcctcgtggcttattcattcggtcttgatcatctctggccatcatgttctaagtgatgtggatacgatggtgggacaaggtggctctctgactgtggaacatgcatcctttcacttttctgggggagtggagacagacaagcaatagtgagatgttctataaaaaagaaaaaaaataccacg

SEQ ID NO: 1138 - DNA, 3351 bp, Homo sapiens
cttgtccttcaaccctaatctgacagtgtggacaacagtgagtatatgcggaatggagacttcttacccaccaggctgcaggcccagcaggatgctgtcaacatagtttgtcattcaaagacccgcagcaaccctgagaacaacgtgggccttatcacactggctaagtatgggggacagaggaggaggggactcagtaggtgggtggttgttacatgctactcttctttagattccatgaagctgcttttgcccatcaccttcctagactgccttctgcactatttagtgtaaatgtcaatagcaacttgttttttgtattaacctgtatttaatgtagtacggaagctaaatctcctggggtgaaatttctgtttctttttattgtttgttgggcagggctagggtagggggtgaaatttcataatatattttaaagtcagtgaaaagtgattttgggctgggcacagtggctcatgtctgtaatcccaagagtttgagaccagcctgggcaacaggacaaaaccctgtctctactaaaaatacaaaaattagccaggcatggtggtggctacctgtaataccagctactcaggaggctgaggcaggagaatcgcttgaactcgggaggcggaggttgcagtgagccaagatcacaccactgcacaccagcttgggcgacagaatgagactccatttcaaaaaaaaagaaaaaagtaatttttggatcagagcccctgggcatatatcactcatccttttaccctgaaagtgttttgttttaggaactgataattcttaaatgagtagcctcccactccagtgtacatactgttagctaggagaatgggtctggaggtggagaggacaggagagatacaaattagcatcgttattttggtggattctcagggccctgtgagcctttaaaaggagttaggggaaaatatttggaagtagagggcagctttcttacaaagccagccacttaattatttctgtgcttggtttccattaaatactagatgtttgattgagaagaatagaggccaagcacagtggctcacgcctgtaatccctgcattctgggaggccaaggcagacggatcacttgaggtcaggatttcgagaccagcctgaccaacatggcaaaaccccgtctctactaaaaatacaaaaattagccgggcgtggtggtgtagatctgtaatcccagctactcaggaggctgatgcacgagaattacttgaacccgggaggcggaggttgcagtgagctgagattcgccactgcacgccagcctgggtgacagagcgagactctgtctcaaaaaataaaaaagaagaatagagattacaattagaatagaaataatggttattatccaggtctttaaagaaaagtcagacacaggccaggtgcggtggctcacgcctgtaatcccagcactttggaaggccaaggtgggcggattacgaggtcaggagatcgagaccatcctggctaacacagtgaaaccccgtctctactaaaaaaaatacaaaaaattagccaggcgtggtagtgggtgcccgtagtcccagctacttgggagtctgaggcaggagaatggcgtgaacccgggaggcggagcttgcagtgacccgagatcacgccacgcactccagcctgggtgacagagtgagactccgtctaaaaaataaataaataaaagttagacacagtttagaggtacttgtgctgacctgaattcactgaaatgcttttcctacatcccagtgactgtgaagtgctgaccacactcaccccagacactggccgtatcctgtccaagctacatactgtccaacccaagggcaagatcaccttctgcacgggcatccgcgtggcccatgtgagtcctactgggttccctggacctttcctccctgctctgaggtcctgcctccatcatactcatttctcccctggaatcctgagctaggaccagagcaagagaaagctaacttggagtagaaaggatatgggggatgaatcccagggtagttgagggttgtgaagggaaaaatccctagaattgagaattaaggctgggcgtggtagttcatgcctgtaatcccatcactttgggaggccaggggaggaggattgctgaaggctagcagttcaagaccagcctgggcacatagggagaccctgtttctctaaaaaaaaaaaaaaaaaggccgggcgcggtggctcacacctgtaatcccagcactttgggaggctaacacgggcagatcacctgacgtcacgagttcgagaccaatctggccaacgtggtgaaaccccatctctactgaaaatataaaaattagccagtcctaggaaggctgaggcaggataatcgctggaacccgggaggtggaggttgcagtgaactgagatcacgccactgcactccagactgggcgacagagcgagactccatctcaaaaaaaaaaaaagagagaaagagaattaacctcccttctttatgcacagagagtcatagcaaaaagggaggaggtgggggtgttaaatcttgtgtgaacgtgatggtagatggtgtacttcaggtacaaagaaactgtaagaaaaagggaaccgagtgacagaggaaagagctgagtgattcctctggttaactctgagaacttcctctccctttacaagctggctctgaagcaccgacaaggcaagaatcacaagatgcgcatcattgcctttgtgggaagcccagtggaggacaatgagaaggatgtgagtccaagtggcagctggggaatgtggggagcccatgtttgggactgaggtcttccagccctcaggagaacctggcagaggcatcaggctcatcactttggggaaaggtgaatgtggagaattcagtgattctgttggaggaccttggggaggtcaatagatttctgtatgcttttatgcggcgggtcctttccccccctcgagtatggaacagatttcttgatttttctccccttcttcccagctggtgaaactggctaaacgcctcaagaaggagaaagtaaatgttgacattatcaattttggggaagaggtgagtagggactgattggagggcattgacttaatttggtcataaacagaatggtccttaaccctgaggagtgcgggtactgtggcagagtagtgcacaaatgggaaagaacagggagcaaggcctgaagaagggcatcatgtgttctttcctccccaggaggtgaacacagaaaagctgacagcctttgtaaacacgttgaatggcaaagatggaaccggatctcatctggtgacagtgcctactgggcc

SEQ ID NO: 1139 - DNA, 384 bp, Homo sapiens
gtagcacttaagtgcagcttgtaagaaattgctgtggttcatcagtagatcaccacctttggtgctcatcagaatcattttgtaaggatttaaaaattttttcggctgggcaccaggtggctcacacctgttatcccagcacttggggaggtggaggcaggaggatctcttgagctcagaagttcaagaccagcttgggcaacatagctagatccctgtctctacaaaaaaaatttaaaaggtagctgcgtggtggcttgcacctatagtcccagctacttgggaggctgaggtgagaggatcacttgagcccaggaggtggaagctgcagtgagccattagtgcaccactctactccagcctgagtgacagagcaagacccta

SEQ ID NO: 1140 - DNA, 1736 bp, Homo sapiens
  SITE (1062): n equals a,t,g, or c
accaaacccaagggaccacacagcccattctgctccgtataccaggtaagtctctgattgcaacaaactggcaattctagtgtactttttcattattagaaattagctaaaggcaaatatgtgtaagcaggttaatccagggtttcaatgggagatagagaatagtggaatatctttattttaagttaaattacagtctggatttgaaaggaccttagagatggttagggctcccacctcagtagatagtcattgaactgggagtcctggagaagattgttcaaatgcccatgggaagttcatagcagaactagaactcaggcccagagcactctcagtaacactgcaatttccccctgacaagatatttatagaaattttaatttattagatggatctctactgagcatttattccatttaaggcagtatgctaggcactttggacaaatcaatgcctaacgtacttacttaacaaacataaaacctagcaggaaggtaatacatatatataaataaatgaaatgcaaagtagatagtaattggcatgacggagatgggcagagaagggctgtgcacttttgggagaccttgctcaaggagaccctcctaggggtgtcaagtgatgtgagctatgatggaggggtatttggacaagcagagatgggaagaaaagcatttggaagggactgtgtaagcacagaccagaagcaaaaccatagaggcttagatgaatataaagccatcctataagtcacaggctttctacatggtactaggagaggaaagtggtctgatgccattttccaaaagacctaatatgcggacctcatgtccctcagaagccagctttagtagggcatttttccagaacagatataagttgccttgggtaggaagggagccaagaagagaactccaataaaatggagcagaagaaattgccttttagctcctcctcttcaaagggcctgaaaattatccaagcttatttcatttttaaatgtaatgggggagttaagggagatgaaaggctttcttttcttaaagggtcctgaaatanaatctgtttggcatgaatttgtatccatctttctttaattgaatcactgtgtcagctttctgtctctagaaaaaaacacatttgaagcatgaattctcagcagcagaagcagccttgcaccccaccccctcagcctcagcagcagcaggtgaaacaaccttgccagcctccaccccaggaaccatgcatccccaaaaccaaggagccctgccaccccaaggtgcctgagccctgccaccccaaagtgcctgagccctgccagcccaaggttccagagccctgccagcccaaggtgcctgagccctgcccttcaacggtcactccagcaccagcccagcagaagaccaagcagaagtaatgtggtccacagccatgcccttgaggagctggccactggatactgaacaccctactccattctgcttatgaatcccatttgcctattgaccctgcagttagcatgctgtcaccctgaatcataatcgctcctttgcacctctaaaaagatgtcccttaccctcattctggagggctcctgagcctctgcgtaaggctgaacgtctcactgactgagctagtcttcttgttgctcgggtgcatttgaggatggatttggggaaggatcaagtgaaccatccctagtcttccttcaataaataacttttaactccaca

SEQ ID NO: 1141 - DNA, 4622 bp, Homo sapiens
  SITE (3322): n equals a,t,g, or c
ccggggcggatcgactgacgccggggccgggatggcgacgcctcggccctgcgcggacgggccctgctgctcgcatcccagcgcggtgctcggcgtacagcagacgctggaggagatggacttcgagaggggtgaggctgccgcgcggccctcgtggttctcaccaggccccggcccaaggaggaggcgtggggccaaggagaggcggatgaacggggccccgagagcttggggcttggggcttggggcctggtgcgggaaggcgggcgggacccacggttcccgtgtactgagagcctcccagggccccgcacgagctcggccaggagacacctgtcccgcgggcggcggggaagcggaagcactggtttccgtaaccctcccgagtagcgggggacgacctcccctgggagacacaagcctgctcaggtgtttgagagagggcccggggagcagaatctgcaccaggggcattgcacccaacctgaggggcatggagctgcaggcctgggggctgcgcggtgaaggagagcagtggcctttgtttagccccgggtgccaggcagcctgcatgctttaaagatggcaagagcttcgcacgggcagccttcgaggcagggcacagtatctcatctgtgggacccagagaggtaacacgtttggcccagattatacagagattatggtgccaataggaacagaggaaggcgggaaaccagggtgcttcttgtgagcgttgggaaccactgtgctgtgtcatctgcccttgcggatgcagccctcgattgccactgctgtgtaagcattctcatggaactcttcctttaccgtggttctggcacctgcctacttccctccgcccctcctaccgctgtcctctgcactgctgaagtggttgcctcagagggtctttctgcttccacgcttgccttcctacagggttttctactctcacatagcagccagagcggctttttgaaaattagaaatcacatcattccctgttatggcctacaaagctctgtagacccacccctgccggttctacttctcctcctcattttatttctcatgcttttcttcccccaatcactacgccgcagccacactggtcttgttttggtgtctcaaatatgcaagaccttttcctgagttaaggccgttggacttgctgtcccatctccttagaatgaacttcctacaaccgttaagctagctgatgcttttcttcagatcccagctccaatgtcatctcctcagagaccctccctaaacaccccagttctcaactgggggcagttctgccctttaagggactttgaatatctggagacattttgggttgtcacaatcaggagggtgctacaggcgtgtagtaggtagagatgagagatgctgtatacatggtacaatgcacaggacagctcgctacaataatcatccggcccgtaagtgtcaattgtgctgttaagaagtaaacattgccttatccaaagttaggccagttactctgatgtatccatcatcttgctttttttttttttttttttgagatggagtctccctcttttgtccaggctggcgtgcagtagcgcaatctcggctcactgcagcctccgcctcctgggttcaagcgattctcctattctcctgagtagctgagattacaggcgtgtgccacgacgcccggctagtttttgtatttttagtagagaccggggtttcaccatattggtcaggctgatctcggaactcctgacctcatgatctgcccgctttgacctcccaaagtgctaggattacaggcgtgagccaccgcacccggcatcttgctttcataaaaaacaatttttaccgcaaacaatttcctcatttttttgtgcaaacaaatacattctttaaaacattaatgggaagagtgtatttgataagccagttttagctactgttgtcacaaataaaagaaactgtgagatttgttaatccgcttcactacagtaactctttgttgttgttgttgttgttttgttgttgttgttgttgttgagtcggagtctggctctgtccccaggctttagtggcgcaatctcggctcactgcaagctccacctcccaggttcacgccattctcctgcctcagcctcccaagtagctgggactacaggcgcccgccaccatgcccggctaattttgttttgtatttttagtagagatgaggtttcaccatgttagccaggatggtcttgatctcctgacctcgtgatccgcacagtaatatatctttttttttttttttgagacggagtctcgctctgtcgcccaggctggagtgcagtggtgcgatcttggctcacggcaacctctgcctcctgggttcacgcgattcttctgcctcagccccctgagtagctgggactacaggcgcgtgccaccaagcccagctaatttttgtatttttagtagagacggggttttactctgttagccaggatggtctcgatctcctgacctcgtgatccacccgcctcggcctcccaaagtgctgggattacaggcgtgagccactgcgcctggccaatatttttctatttatcattttgtactacattttgggtgaattccaaatcactaattctctttgactaggtctgcagtactctttgacccatctattgttgttgttttgtttcaatgagtctgttttttaatttatcaactttcctgtttcagatctggctgttttgtttttcctaatgttctgttgatttgtggattctatccctttgtctctgtgaacaccttcaatgttgttgttttaaggtcttttttggattgtgcaataatggctcactttggaggcatgcgtgttcccacttgtatttgctagttgttgtctgtcgccatgccaccctgaactccccgaactcccctcatctcacctatatttgctgattgtctcttagggcagcagattgcttcttgttttgcaactttcagtctttgtgctcaccagggagatcctcttctgtgggagattgtcacactgccttggcagccttctggaggcatcattatattttttaaaagttgtttctggctgggcacggtggctcacgcctgtaatcccagcactttgggaggccaaggcaaatggatcacttgaggtcaggagttcaaggccagcctgaccaacatggtgaaaccctgtctctactaaaaatagaaaaatttgctgggcatggtggtgggcgcctgtaatcccagcccgacctgaatttcactctagatccaaacattttaaacattacttcatccagccttnctgtgtttgaagtgggatgggagaatgtctgtgtcccgcccagtcctactgtcctgatgagatgtgcccatctgtcttgttcacagctaagtcaccagcattcagaacaaaccttgacacagaggaggtgctcggttgatatttgttgaaggaatgaatattcttcactttatagacaagaaaactgaggtcaagaggcaaagcaagcactgaaactcccattcagcatcattcagtcctttggttgcctttctgcaggaatctggtcggcagccctgaatggagacctgggccgagtgaagcatttaatccagaaggccgaggacccaagtcagcccgactcggccggctacactgcgctggtgagctagggaggagcacagggtcaggagacagaagcgttaactcaggagacacctgctctctgaggagggggactgatggttaccttttacctcctccctccctttcttctcttccagcaaaatttctctttttaagcatcatatgaacctggattttttaaattagtgtgagacctttacatcaataatttaggttttgttttgttttgagatgaagtcttgctctgttacccaggctggagtgcagtgatgcgatctcagctcactgcaacctccgcctcccaggttcaagcgattctcctgcctcagcctcctgagtagctgagactacaggcatgtgccaccacacccagctaatttttgtatttttagtagagatgggttttcaccatgttgaccaggctggtctcgaactcctgacttcaggtgatccgcctgcctcggcctcccaaagtgctgggattacaggcatgagccactgcgcccagccaatgatttagttttattttcgtaacaattctttgagataggaatgatcattttccccatttttcaattgaacaaactcaggttagtcacgcagaagcttgcccaggtcacacgactgctggggttggcacctgagatgattccaggcccctcgctgcagggaggccatgctctcacctctataccacccttgtcacctgcctggcttctcccatctgacctcggtctctgttccctgcagcactatgccagccgcaatgggcactacgctgtgtgccagttcctgctggaaagcggagctaagggtgatgcccagacccacgggggtgccactgctctgcaccgagccagctactgcgggcacactgaaatcgcgcggctcctgctatcacatgggtccaaccccagggtggtggatgacgacggcatgaccagtctgcataagg

SEQ ID NO: 1142 - DNA, 486 bp, Homo sapiens
aaaccgtggagcgcgccccggcccgatggctcacgcctgtaatcccagcactttgggaggccaaggtgagcggatcacgaggtcaagagatcgagaccatcctggcgaaaccccgtctctactaaaaaatacaaaaaattagccgggcgtggtggcgggcgcctgtagtcccagctactcaggagtctgacgcaggagaatcgcttgaacccgggaggcggaggttgcagtgagccgagatcgcgccactgcacacaagtctgggtgacagcgagactccgtctcaaaaaaaaaaaaaaaaaaaaaaaagaccgcggagcgcgtggcgcctccctgccctagggactaggggcggtaaagagaggaggctgcgaggtcgctggacggctgggtcatggcgaaggtaacgggaaagctcccgaccggacccagctgcctcatccccacaccctgcaaggccaggcggcccggcggccctccagcggc

SEQ ID NO: 1143 - DNA, 1049 bp, Homo sapiens
tagatggaaagagtgcagataggactacctaccattcacccctaccagtgaagtggaagcactcatcttctttcccttcttaccctttcaaagcaagttgttgagggatgaagaggagagtgactttaatcgtggctttaagtagagattttctttaggagtaattgtttctctcgacagagtggataggcttccatagttgtcttaataccttttgtccaccccaaggattgacccaggcaaggaggatgaaccctcctcaatttgggaaagttaaattttaggcacagcaggtcaaagagtagggaagagctgcagttgttggaaccaagtgacattgatttagtctggaaaggagtcacagaggaatcaaaagccagaccctcctggcagctttagatgtggttggggtctgggaataatgctggtcccaaaatcacctctggaactaactcctgtaaaatgaagcctctgcatccttcagtaacttacttaaaattttgttagggctgcattttcttcaaagccaagttctgaataagaagtatttgttttgggctctagccagattactgaagtattgttgagggagatttgctgtggaaggtgttgggggtacagggattgtgaagataatgtaaaatatttaacattttaaaaattttcagtaagttctctttccccaatgtcagcatgacttcttcattcatgttcttccatcactctccattcagttagaatctcaattgtgtaatatcagtggtagcgacaattatgaaattcgtccagtgaggaaaatccgcagagctagagcccaaaccagcaactttgtagtgaggatgaccccactggccggggagaaactgaactgatttttttttttctctctctctcagctttttattttgaaataattttagacttacaaaaaagttgaaaaagcatccaggcatggtggcttatacctataatcccagtgctctgggaaaccaagacaaatctcttaaagccaggagtttgagaccaagctgtgagactatctctacaaa

SEQ ID NO: 1144 - DNA, 2006 bp, Homo sapiens
actcgtggcatctctctccatccagacactggcagtgagcgcccaagaggctcctgctgtgcccgtctcgaggcccttgctcttcccgtctaccccgcagctgctgtcggggccgtgtttggcctcaccacctgcatcagcgcccatgtccgcgagaagcccgacgaccccctgaactacttcctcggtggctgcgccggaggcctaactctgggagcacgcagtgagtggccccctccccacccccaccctcctcccagcctggcagaatgacccctgacctctgctcatcctccaccctctctgttccatcccggacaagaagtaaagcagccttcttgaacaccagccatttcagtcatagcgacagctgctgctgctgcttaagcacctactgtggccctccctgacctgccctgtcccctccccaccctcccctcctcactctgctccagccacacgggcctcctcactgctcctcccacatgccaggtacagtcctgccccagggcctttgcatgggcagtgcactgcgtggaatgctgttcccctcactgtcctgaccaccctgtgtacaagccagcatccccgccgccctcgctctgtgccgccttccttctgtgtgccttgtcagaggacacaggtcaccaaggtcaccccctgtctctgccactggcctgtgagtcagagaggaggatggatggagtctcgccctgccatctctctccctgcacctggagccctgcaggggagctgcccccgcaaccttcactttacagaaaagggtattagggctcagggagggaattaagtggcccgaggtcacctggaggagcaagtggccttctttgcagccatcagagggtgcagccctggtggagaaggccacgcttggcacaggggagcccgtctggagcatgagccagacatcactcctgccctcccatgggcccgggctcagcgtcagtgcccgcctgtgcccctggcctacccccagcccgccaaggctcgggccctcagggccagcgggaggagtgaacgagccctcttgcagctcagccgctctggcctggcatgttgggagtgatgaatggcaggttccaggcaggcagagagggagggtgcgagggcagggcctacgccgtcactgctgtctctgcgtcaagaccttggggaggccttgtccctccccagctcccactggaactggtcagaggttgcaggtgggttgaggtcttgactgtagcccagctcaggctggaactgctccctgtccccaagccagcctccctgtctctcttcaaagagtgtgagtccctttaggtcctggtgtgtggggacacacctccttcctcctctggcccggaggcttcggagcaggagagcctggagaagtgggggcactgtcggggctcctcggtacacagaccacgggacagatgcgtggcctggccctggcatccatgggcaaaggagagactgagacacaccgatgtgtcaccatggcccggtgcccagccttgccccagccccagctgggggcagcacggtgtcctcgcagggggaagtcagtgtggggcgggatgaggacccacagcctgggttcctgctgggaagcaacctggactccggcctccctctgtgcatcagtttccacatctccagagtctagggccctcttcctgagtgacttaatccctgaagagagtgtcctgtcaggggtctcagtctggctcccagggtgggcaccggccagggcgtggagcgtcttggtccggccgagccccacccgggcctgacatcacctccccactcccacagcgcacaactacgggattggcgccgccgcctgcgtgtactttggcatagcggcctccctggtcaagatgggccggctggagggctgggaggtgtttgcaaaacccaaggtgtgagccctgtgcctgccgggacctccagcctgcagaatgcgtccagaaataaattctgtgtctgtgtgtgtgtca

SEQ ID NO: 1145 - DNA, 2423 bp, Homo sapiens
gtgaggactgagggagggagaccacccagtggggtgcccggccaagcaagggcttagcagcagtggggtctgaacagcctccctcctctgtctcgcaggcctgaccgccgctgcctacagagtcacactcaatcctccgggcaccttccttgaaggagtggctaaggttggacaatacacgttcactgcaggtgagcacgctgggctgggcatggctgggccctctcctggcacagccccagctctcagagcacatttgacggctgcctcttctctctgactccccagcccgtgtccacagtgctggccatccggagaaagtggggtgttcctttatcaggaatacatgtagggtggggaggcccaggagaacagctccaggactggggccaggaggctgccatgcacagcgagcagccgactcgtggcatctctctccatccagacactggcagtgagcgcccaagaggctcctgctgtgcccgtctcgaggcccttgctcttcccgtctaccccgcagctgctgtcggggccgtgtttggcctcaccacctgcatcagcgcccatgtccgcgagaagcccgacgaccccctgaactacttcctcggtggctgcgccggaggcctgactctgggagcacgcagtgagtggccccctccccacccccaccctcctcccagcctggcagaatgacccctgacctctgctcatcctccaccctctctgttccatcccggacaagaagtaaagcagccttcttgaacaccagccatttcagtcatagcgacagctgctgctgctgcttaagcacctactgtggccctccctgacctgccctgtcccctccccaccctcccctcctcactctgctccagccacacgggcctcctcactgctcctcccacatgccaggtacagtcctgccccagggcctttgcatgggcagtgcactgcgtggaatgctgttcccctcactgtcctgaccaccctgtgtacaagccagcatccccgccgccctcgctctgtgccgccttccttctgtgtgccttgtcagaggacacaggtcaccaaggtcaccccctgtctctgccactggcctgtgagtcagagaggaggatggatggagtctcgccctgccatctctctccctgcacctggagccctgcaggggagctgcccccgcaaccttcactttacagaaaagggtattagggctcagggagggaattaagtggcccgaggtcacctggaggagcaagtggccttctttgcagccatcagagggtgcagccctggtggagaaggccacgcttggcacaggggagcccgtctggagcatgagccagacatcactcctgccctcccatgggcccgggctcagcgtcagtgcccgcctgtgcccctggcctacccccagcccgccaaggctcgggccctcagggccagcgggaggagtgaacgagccctcttgcagctcagccgctctggcctggcatgttgggagtgatgaatggcaggttccaggcaggcagagagggagggtgcgagggcagggcgtacgccgtcactgctgtctctgcgtcaagaccttggggaggccttgtccctccccagctcccactggaactggtcagaggttgcaggtgggttgaggtcttgactgtagcccagctcaggctggaactgctccctgtccccaagccagcctccctgtctctcttcaaagagtgtgagtccctttaggtcctggtgtgtggggacacacctccttcctcctctggcccggaggcttcggagcaggagagcctggagaagtgggggcactgtcggggctcctcggtacacagaccacgggacagatgcgtggcctggccctggcatccatgggcaaaggagagactgagacacaccgatgtgtcaccatggcccggtgcccagccttgccccagccccagctgggggcagcacggtgtcctcgcagggggaagtcagtgtggggcgggatgaggacccacagcctgggttcctgctgggaagcaacctggactccggcctccctctgtgcatcagtttccacatctccagagtctagggccctcttcctgagtgacttaatccctgaagagagtgtcctgtcaggggtctcagtctggctcccagggtgggcaccggccagggcgtggagcgtcttggtccggccgagccccacccgggcctgacatcacctccccactcccacagcgcacaactacgggattggcgccgccgcctgcgtgtactttggcatagcggcctcctggtcaagatgggccggctggagggctgggaggtgtttgcaaaacccaaggtgtgagcccctgtgcctgccgggacctccagcctgcagaatgcgtccagaaataaattctggtctgtgtgtgtgt

SEQ ID NO: 1146 - DNA, 2428 bp, Homo sapiens
gtgaggactgagggagggagaccacccagtggggtgcccggccaagcaagggcttagcagcagtggggtctgaacagcctccctcctctgtctcgcaggcctgaccgccgctgcctacagagtcacactcaatcctccgggcaccttccttgaaggagtggctaaggttggacaatacacgttcactgcaggtgagcacgctgggctgggcatggctgggccctctcctggcacagccccagctctcagagcacatttgacggctgcctcttctctctgactccccagcccgtgtccacagtgctggccatccggagaaagtggggtgttcctttatcaggaatacatgtagggtggggaggcccaggagaacagctccaggactggggccaggaggctgccatgcacagcgagcagccgactcgtggcatctctctccatccagacactggcagtgagcgcccaagaggctcctgctgtgcccgtctcgaggcccttgctcttcccgtctaccccgcagctgctgtcggggccgtgtttggcctcaccacctgcatcagcgcccatgtccgcgagaagcccgacgaccccctgaactacttcctcggtggctgcgccggaggcctgactctgggagcacgcagtgagtggccccctccccacccccaccctcctcccagcctggcagaatgacccctgacctctgctcatcctccaccctctctgttccatcccggacaagaagtaaagcagccttcttgaacaccagccatttcagtcatagcgacagctgctgctgctgcttaagcacctactgtggccctccctgacctgccctgtcccctccccaccctcccctcctcactctgctccagccacacgggcctcctcactgctcctcccacatgccaggtagcagtcctgccccagggcgctttgcatgggcagtgcactgcgtggaatgctgttcccctcactgtcctgaccaccctgtgtacaagccagcatccccgccgccctcgctctgtgccgccttccttctgtgtgccttgtcagaggacacaggtcaccaaggtcaccccctgtctctgccactggcctgtgagtcagagaggaggatggatggagtctcgccctgccatctctctccctgcacctggagccctgcaggggagctgcccccgcaaccttcactttacagaaaagggtattagggctcagggagggaattaagtggcccgaggtcacctggaggagcaagtggccttctttgcagccatcagagggtgcagccctggtggagaaggccacgcttggcacaggggagcccgtctggagcatgagccagacatcactcctgccctcccatgggcccgggctcagcgtcagtgcccgcctgtgcccctggcctacccccagcccgccaaggctcgggccctcagggccagcgggaggagtgaacgagccctcttgcagctcagccgctctggcctggcatgttgggagtgatgaatggcaggttccaggcaggcagagagggagggtgcgagggcagggcgtacgccgtcactgctgtctctgcgtcaagaccttggggaggccttgtccctccccagctcccactggaactggtcagaggttgcaggtgggttgaggtcttgactgtagcccagctcaggctggaactgctccctgtccccaagccagcctccctgtctctcttcaaagagtgtgagtccctttaggtcctggtgtgtggggacacacctccttcctcctctggcccggaggcttcggagcaggagagcctggagaagtgggggcactgtcggggctcctcggtacacagaccacgggacagatgcgtggcctggccctggcatccatgggcaaaggagagactgagacacaccgatgtgtcaccatggcccggtgcccagccttgccccagccccagctgggggcagcacggtgtcctcgcagggggaagtcagtgtggggcgggatgaggacccacagcctgggttcctgctgggaagcaacctggactccggcctccctctgtgcatcagtttccacatctccagagtctagggccctcttcctgagtgacttaatccctgaagagagtgtcctgtcaggggtctcagtctggctcccagggtgggcaccggccagggcgtggagcgtcttggtccggccgagccccacccgggcctgacatcacctccccactcccacagcgcacaactacgggattggcgccgccgcctgcgtgtactttggcatagcggcctccctggtcaagatgggccggctggagggctgggaggtgtttgcaaaacccaaggtgtgagccctgtgcctgccgggacctccagcctgcagaatgcgtccagaaataaattctgtgtctgtgtgtgtgtca

SEQ ID NO: 1147 - DNA, 2426 bp, Homo sapiens
gtgaggactgagggagggagaccacccagtggggtgcccggccaagcaagggcttagcagcagtggggtctgaacagcctccctcctctgtctcgcaggcctgaccgccgctgcctacagagtcacactcaatcctccgggcaccttccttgaaggagtggctaaggttggacaatacacgttcactgcaggtgagcacgctgggctgggcatggctgggccctctcctggcacagccccagctctcagagcacatttgacggctgcctcttctctctgactccccagcccgtgtccacagtgctggccatccggagaaagtggggtgttcctttatcaggaatacatgtagggtggggaggcccaggagaacagctccaggactggggccaggaggctgccatgcacagcgagcagccgactcgtggcatctctctccatccagacactggcagtgagcgcccaagaggctcctgctgtgcccgtctcgaggcccttgctcttcccgtctaccccgcagctgctgtcggggccgtgtttggcctcaccacctgcatcagcgcccatgtccgcgagaagcccgacgaccccctgaactacttcctcggtggctgcgccggaggcctgactctgggagcacgcagtgagtggccccctccccacccccaccctcctcccagcctggcagaatgacccctgacctctgctcatcctccaccctctctgttccatcccggacaagaagtaaagcagccttcttgaacaccagccatttcagtcatagcgacagctgctgctgctgcttaagcacctactgtggccctccctgacctgccctgtcccctccccaccctcccctcctcactctgctccagccacacgggcctcctcactgctcctcccacatgccaggtacagtcctgccccagggcctttgcatgggcagtgcactgcgtggaatgctgttcccctcactgtcctgaccaccctgtgtacaagccagcatccccgccgccctcgctctgtgccgccttccttctgtgtgccttgtcagaggacacaggtcaccaaggtcaccccctgtctctgccactggcctgtgagtcagagaggaggatggatggagtctcgccctgccatctctctccctgcacctggagccctgcaggggagctgcccccgcaaccttcactttacagaaaagggtattagggctcagggagggaattaagtggcccgaggtcacctggaggagcaagtggccttctttgcagccatcagagggtgcagccctggtggagaaggccacgcttggcacaggggagcccgtctggagcatgagccagacatcactcctgccctcccatgggcccgggctcagcgtcagtgcccgcctgtgcccctggcctacccccagcccgccaaggctcgggccctcagggccagcgggaggagtgaacgagccctcttgcagctcagccgctctggcctggcatgttgggagtgatgaatggcaggttccaggcaggcagagagggagggtgcgagggcagggcgtacgccgtcactgctgtctctgcgtcaagaccttggggaggccttgtccctccccagctcccactggaactggtcagaggttgcaggtgggttgaggtcttgactgtagcccagctcaggctggaactgctccctgtccccaagccagcctccctgtctctcttcaaagagtgtgagtccctttaggtcctggtgtgtggggacacacctccttcctcctctggcccggaggcttcggagcaggagagcctggagaagtgggggcactgtcggggctcctcggtacacagaccacgggacagatgcgtggcctggccctggcatccatgggcaaaggagagactgagacacaccgatgtgtcaccatggcccggtgcccagccttgccccagccccagctgggggcagcacggtgtcctcgcagggggaagtcagtgtggggcgggatgaggacccacagcctgggttcctgctgggaagcaacctggactccggcctccctctgtgcatcagtttccacatctccagagtctagggccctcttcctgagtgacttaatccctgaagagagtgtcctgtcaggggtctcagtctggctcccagggtgggcaccggccagggcgtggagcgtcttggtccggccgagccccacccgggcctgacatcacctccccactcccacagcgcacaactacgggattggcgccgccgcctgcgtgtactttggcatagcggcctccctggtcaagatgggccggctggagggctgggaggtgtttgcaaaacccaaggtgtgagccctgtgcctgccgggacctccagcctgcagaatgcgtccagaaataaattctgtgtctgtgtgtgtgtca

SEQ ID NO: 1148 - DNA, 89 bp, Homo sapiens
tttttttttattttgagacggagtctcactctgtcccccaggctggagtgcagtggcgcaatcttggctcactgcagcctccgcttcct

SEQ ID NO: 1149 - DNA, 5526 bp, Homo sapiens
cttcacctggactctgagtcgtcttggtcccaggagccagtagtgaaggcaacagtctgcccacctgtggacaccaggtaggtgcctttattctttaagaagagaggaacacggagcacctttgctggccctgattcatttaaacatttttttttttttttttgagatggagtcttgctctgtcacccaagctggagtgcagtggcgcgatctcggctcactgccaacgtctgcctccagggttcaagcgattctcctgcctcagcctcccaagtaacagggattacagatgtttgccaccatgcccggctaattttcttatgtttagtagagacgcggtttcaccatgttggccaggctggtctcaaactcctgacctcaggtgatcctcccaccttagcctcccaaagtgctggaattacaggcgtgagcccagcctcatttaaccttttgtcttcagcttctccatttctcagggctcagagtgaaggtggggagaaatggggtggaggatgtggatgagacagagatggtctcaggatcacagaccgcggagttcagcagttcaagggaactaaacctgtgcccctcggcaaatagatgagagagctgagggccacagagaagaggcttgcctgaggtcatggaaagggactggacacagaacccaggcctctcgcctcccagcgctctgggagccctctgggcacttcagaggtagacaggactgggagatggggcggctggccttcactggtcctatgggtccctgcctgaggtccacgtcctgcgtcaccgggtctgggtgggagggatgggaagatcgggagccagttttcaaaaatagggggtgcagtggagattgggctaatgaggcaaagtgctttgggggagactcaggctttacccttgccccaccctctcccttcactgacctgggctcattgggagagagtaagtcaggagaagaggttggcaatgacacggaagaggggatttgccaaggcaccaggactccccagagtccttgggaacaaagaaagagatctgagtcagaatcagaagtgggagcgggtagggggcacctacaaatagagcagaggtggctggagccctccttgcccccgccccgtgcctcccaaccacacagagccccgggcccagggactctccccaccacttacagcaagaaagagcaagttagaggagtgtgcggggccgcgaagggggcagcattcaggaatacaggagtaagatggagccctgccttggtacatccaagggcgacgcagagccttaaaagtgaggggaggctgaagaggagcgtaggggctgcctgccctttgctcagctccaggtctgtccctcttggttccagaatcccagaaggggcagcggtggacagggttcttaaatatgtgaagcagcagcagaggctaaaagtgtgggaccgtggagcaagaccacctgggtttaaaccccaattcacagttggggttgtatgaccttgggcaaattcctcaacctctccagccctgcagcaatagcaccctcctcagagagctgttgagaaaatgcaaggtgttcagtgtctgttattatcacatccccatcacacagatgggacaactgaggtctgcccagagaggaaaggacgcttgcccagcgtggcacaaaagctgtgtccaaattagtaagcaggtatactgggtcctggttgcgaggggacacccagccctccttgagctctgcaaagtcagcagccccagcctcctctgcaggacacagccagaaaaccctgcagggagcgcccagatcctgtcccaacaaacccagtccacttggagcctgtgtggaaaaagccgtggttccggctctgtgtcctcagctgtcccgggagggcgggagcgcagaggccggctcccttccacttccatttatagaaagcttcccgtgcccgggatgccccgccccctgcaggacctggccaaggaaaagtctggcatcagacctaccggagccacgggcgttgggggaggcaggagaggggaaggggccctggcttttctcatgaaacctgtgcgaccttcagccaatcatgccccctctctagatcccaggtgtccctctgcacttgaattccatgtggcattgtagcaggacgagccgcagacaaaactcctcagacaccaagttaaagaaggaaggggtttattcggccgggggcatcagcaagactcctgtctcaagagccgagctccccgagtgagcatttcctgtcccttttaagggctcacaactctaagggggtgcgtgtgagagggtcgtgatcaattgagcaagcagggggtacgtgactgggggctgcacgcaccggtaattacgtgggaacaaaacaggaaagggattttcacagtgcatttctatacaatgtctgtaatctatagataacataaccgattaggtcaggggtcgatctttaactaccaggcccagggtgtggcgctgggctgtctgcttgtggatttcatttctgccttttagtttttactttttctttctttggaggcagaaattgggcataagacaatatgaggggtggtctcctcccttagcataaggaattaagattccaaaatcccacacctgggtttgaatcccagctccaccatctttctggatgtgaagcgtgtttcttgacctctccgagtctcagcatcttcatctgtaaaatggactgacaactcaaaataaataaataaggccaggcacagcggctcacacctgtaatcctagcactttgggaggccgaggaaggaggagcacttgagcccaggagttcaagaccagcctgggcaacaaagtgagaccctctttctacaaaaaattctctgggtatagggcacaagcctgtagtcccagctactcgggagggtgagctgggagaatcgcttgagccccaggaggtcaaggctgcagtgagccatgactgtgccactgcactctagcctgggcaacagagcgacaccttgtctcaagaaaaaaaaacaagaggactgacaatagggtgcagtacttcctagagctgtgagaggattgagttaccaatgtaattcgtatgtaaactatttggcacatggtcagcgctcaataaatggaagctactattatgaggctgttatactccataagtccttatttctaagtactatttagaattgcctaactaccttcacaaggagcacctcactggttccataacactctctgggagggtgcaggaattctcattaccatctcacagatgaggaaactcagggtcagagtcacaccataaggagctatttgagctagaagtcaaatctaaaccttcggatcccagagtccactttctcttctcccaggctagtctcagataccttttccagtgctaaggtctgactccaaaacaggacgtaaaggaggcgttttggcaacgagaagaaagagagttggggggtgttggtgggggctggggaccagcagcaaagctcagagcaggcaatgggagtgtaaccagcacattgcagctctgtacagttttcttggcagcctcagtcccagaacttcttacctccttaccaagccccacctacaagaaactagcatgtggcattaaggttagacaatggaaaggacttttcacagtaaggaaaatgaggaggttgagacatctctttcccaaatgagccccaaggaaatgaatatcatctgatgatgtcactccccagctcaaaacttttcagagcctccctgttgccctcagggttgagctggcagtcctgagcccagcctgcaaggccctacgggatctggccagcctgcctcccccgccccatctcctccacccaccccaggtgctctgttactcaggtgctcaatagggtcttgtgagcttccctgctggccagacttttgcacaaatggtcccctctactttgtttatttatttgtttatttgtttagttagagacagagtcttgctctgtcatccaggctgcagtgcattggctcgatctcggctcactgcaacctctgcctcccagcttcaagcaatcctcctgccccagtctcctgagtagctggaattacaggcacgtgccatcatgccagctaatttttatatttttagtagagatggggtttcaccatgttcaccaggctggtctcgaactcctgacctcaagggatcagcccacctcagactcccaaagtgctgggattacaggtgtgagccatcacgcccagctcatcccctctaacttaaatcttcctctctgcctcctcatccctactcaacttgcgcagctacctcttgcttttccttcttatctccctttgcgtgtcccttcctccaggaagacctccctaacctccccactgaactagaaaagtgcactgtcccttccctcctctctcgtgacactgcttacagttgttcacccacttacttgtctgtttcaccaaccggcccaagtgcaggtgctcagacatcaggcagccgagggcccagtccttctctacacttgttggcagtgtgacccttgggcaagttacctacctctctgtgcctcagttctctccctgtaaaatgggataataatacctaccttatacagttgttataaggatttttaaagcctttatctaaaaataccagagcttatgtggataataattactcagcaaacgttaggtagtatttacttaataaacacacctgggatgtagtagatgttcaataaacatctactgaagttattttatttaatgatcacttacataatgcttattatgtgccaggcactgttctaagcacattacaatgattaacttgttttatagacgagggaactgaggcacagagaagtcaattaacttgcccaaggttatacagctagtaggtggtggagccaggctgcaaactcaggtggtctggctccagcatccatgcttttaaatgaatgaataacttagcctttgtacggagggtgggaggcaggggcttcacctacagaaattactccgttcccactcttggactctttcagatcctgggagctcctggttagcaagtgagatctctgggatgtcagtgaggctggttgaagaccagaggtaaactgcagaggtcaccacccccaccatgtcccaggtgatgtccagcccactgctggcaggaggccatgctgtcagcttggcgccttgtgatgagcccaggaggaccctgcacccagcacccagccccagcctgccaccccagtgttcttactacaccacggaaggctggggagcccaggccctgatggcccccgtgccctgcatggggccccctggccgactccagcaagccccacaggtggaggccaaagccacctgcttcctgccgtcccctggtgagaaggccttggggaccccagaggaccttgactcctacattgacttctcactggagagcctcaatcagatgatcctggaactggaccc

SEQ ID NO: 1150 - DNA, 344 bp, Homo sapiens
aatgagaaagaaggaggaatctgaagccttgggtaaggatttggggcacagtaccaggaggggggcttggtgccagacctcatgaggaagaaggattttcctatgtacagagaaggggaccctgtcctgttgggaggtgctgtgcaaacctaaccaagttactaacccctctgttttctgtgctacacaaaggggataaatacaagcttccctcactagccaattctatttggttcctgagtttggaaagtgatagatactgattttctatgattttatgaggacttaaataagctcctatggaaagtgttttgtgcagtgccgtgcccataaagaagagctca

SEQ ID NO: 1151 - DNA, 427 bp, Homo sapiens
gccttccgtggtcctccctgaagccatcacctttcctggacaagctcctaaatgggctcagggcttgtactctccaagaagccttcatggaggcccccgttcctcagtctctggaacgttcctcttgctccttaatcactggtgcctcacacccctgttaaagcacgtttcctcctggcccacaagctctcgggggtcgggggcacacgtttggtttgtcttgtccccttctcccctgccaggtgtgctccttccatgcctggcacccacaggcctcatggtgaatggcagagcaagaggaggccggctgcagaccccacttggggctgtgtctgggccgggctgggggcggctgtgtgaaaggccgtcctgtttgagctgctgctgctgttcacgcccggcccatgtgctcatgtcctgtgtgggg

SEQ ID NO: 1152 - DNA, 155 bp, Homo sapiens
ggggtggggggagtggggagggatagcattaggagaaatacctaatgtaaatgacaagttaatgggtgcagcacaccaacatggcacatgtatacatatgtaaccaacatgcacattgtgcacatgtaccctagaacttaaagtataataaaaaa

SEQ ID NO: 1153 - DNA, 5938 bp, Homo sapiens
cccagtcacagcagcacagatgtgcaggaggagaccatttccacggaccctccgactcctaggaggcaggtgaggagagggggagggaggggaccagcgctggtgcttcaggtatgctctggccactgcgattcactctgctttgtgcttggggtttcacacgcatctcggcgactgtgtgcggaaagtacagtcgtgaccatgcgcaggtgaggcctggaggaggtcagctaaactgctctctctcaatggttctgaaccctgagagtacatcagagtcacctggaggacttacgaaaacacacactgcagaatttctgacttggtcgatgcaggttggggccaaaaatgtgtatctctaacaggttcctgggcgatgctgacgccgatgctgtgcgtcctgagccacacttggggagctactgcgcaagctcgcacagctagccgaccgctgagctggggctcagacctgggtcagtcctggtccacaggccagcccctttctcacgtcccctggtgaacggcggcatggtggcctcatggacactgagcagggcccctagggaagcctgtatggaggccacttcactttgaatggatctgggatagaggaaggacgcgagctgtgggagcctgggtcctgggcacagcgggcatgtcatggcagggttcaccagcctcctttcagcagttccctagttctgccccagctacctgtggttggtggtgggaggtttatttgttagttccttcagcagtgactcaccacacttactgagagcttaccgtgtgccaggactgccacaggtatggggatgcagagtgtccacagccccccagaagattgatgatagcaccctccatgtaggaagggctgtgactgcagacagggcatggggcggggcacctgtgtttgccacaacctctagagggtcccttcatattcacgtctgtgcgtggggccctcctccacccagatctgcttccgcagcacagccacacaagtctacagctggtgactgtggctggcaagcaggggaaggtgggtgggggcggcagccgtgggctttccactgggtcccagcagaccaagtcctggtacaaggaagcacgggctggcactggcaaaccctcctcagggagcagcaggccaggaacctgggctgggactaattattgctgaagagagaacagggccaagtgtccctcatgtccccccagcagccggggcaagcagagaaagaaatgtcggaaccggggagaggcccctgcctctgcacagggctaaacatcatgccagctggcaagggagaaatgggtacagggcccaggggcattatcacagaagaaggcaatgaaaggtgcgttgggggctgaggcaacccattataactgcacacatcacacaccagggatccactaatttagactacaatgtgaatggtcttttgaaactgagatgtgtgggggcccagagggagggatccacccagctgggaggaggttagggaggtcttccttaaaatacttcctgttccgtctcagagaacccatggacactggccaggggagggagaggaaacacgtcgcaggtggagagaatcgcttgtgtgagggcacagagcggggcaagaagacagtggtgggctttccccaggagctgttcggcagagggaaagtggatgctgagctcttcctcttccctggagcaagtcccatttcctcagagaacacggcccccttgggccaaaaggacatgaagaagctcttgctaatgccagcctggctctcctcatcccgccccctgcacccctgcccttctggctgccctcccttctcctagctctgtcccctctcacttcaggagtctcaagtccttcagactactccaaagtcgggggatctctggatgggtaggaggtgatctcaccgcctcctctcttgcccgggcttgtcgagatgaacttcctgatgctggcggcgctgaagctgacactagcgggggcacctccctgacatgaacgcccctcgagactgggccagtgctcctgatgcctgggcacctgcggaaaggcacccagcgtggccgccgtggcatgccttgagtgtgtgggtggggactgttgcaaactgacattccagctgtcccagtccattttgtgctgctctcacacaaccccggagagtgggcgattcacaaaggacagaaatgtatcttcccacagctctggagccaggtgccagcaggttctgtgcctggtgatggctccagtctctgctttcatgatggtgccttgctgctgcgtcctccagaagggacaaaggctgccgtcctcacatggctgaaggtggaagggcaacgagtgaatgtactccctccacacagcacctacatcaggacacctgattccattcatggcctaatcccctcttaaggccccacctcttaatgctagcacattggcaacacctggattttgcgggggaaacacgttcaaaccataacaccatctaaggctgcttctgcctgagacaagtgtgctcatgtctgcctcagagacggggccaaaagcagcttgctctgccctgccctggaagcaggacagaggatagctgtcatctctcccttccaatgccagctcattgtctcaaacaaaacttggccccttgtgccctctaaggagtgggttcctgtgcaggggctccaaggttctttgtgataatagaccagggagggcaagttggttccctctcatgcttggcatccaggtgtttgagggtagctgcccagggccctgtgttgagggcactatggtcagagctggagcaagggggggctgggtgcatgatgagtttgcatggcagctggaagtgtcccctctgagtggctccctggatatcccgggaccactggccgtgtgcaacctgagtcccggcatgaactccgctgggaccctccttcgtgttaacgcttcacttttcaaacaggaaatagaaggaaaacaaagctgctttctaacaaacactttgattttaaagccagagtatgagtcagaaacatcatccattgcagccagctttacatgggaatagcccagttcttcaaaagaagcagctgtcatttcatggcaccgaggcatcgtgtttccagaagagccacagtccctcttgcattaagatgggttgtgacggacctcttagagaatccgacagtttcgggttggaaaggggatcccttttgttctgtctggacagtaaggcagtgcatcatctacaggtgcatccgctgcatggctgctggcttgtggcctgacaaaatgcccagcattgaaccagatgcataggtgtgaactctggagaatcctgttttcagtggctggaagacggaggtgtaggcaccagctcaaactcttcacctcacgccttctatcctgcagaccccagcaggccacatggtgaccttctatgtccatctgggacagcagtcagctgcccctgcctctgcggggagtgagcaatgggccgcaggatcacttgtcctgggcagctcttctgggggtggctttgcattgctgctgggatttgggagtccagggcctgtggtctcctgggggctgcgtgcagagtgtcttccccagaaccagatggggaagggagccgcagggaaagaacgtgacctttgggctcaatcctggtattgaagccgtgttcgttcttttacattttcgtaacgtgcagcattgggtaaatgccttctgagtttggttagtgcttgttaaattgggcgagaacttcataaggttgcaggaagtattccgagaaatggtacacgcacagtacttagcgtggtcaccgcacatggccagcatgtaccaaactggtccgaattgactagaatggggagggtgggaagcgacaatctctacgttctctttaacctgaggtgtctgatgctacttgctgggcttctggcctgtgatgagtgctcccactccctgctgccctgagacctgtgtggctttcagggtattcttttttctcagtgcctttgtgtggagagccgctgtctccctccattctgtgggtgatgcaggtggcgctgctgtgagctgcccctggaggtcatggataggctgtcaaggacggggcctgccattccagagctcccgccgccctggggaagcgatgtgggcagtagctcagaatgcagcttctccctagaccctgggccaccggggacttgcgagagaaagaacagggacggggaagactggatggtcctgaaagctgagaggggccacagaagcccagatgacacaggactatgggagacaagtgagggcaccagcttccctgggttgagggaccgtgatacccaggagggcagagagggagacagggcccggctggcaacctctgagcaggtgagtgggagagagagcaggacagagaaggcagctctgtgttctgctctgatccgtctgactccacacggatgtggagttctctgagactcctttccctgaatctgagagcttactaacagaaggccgggcctctgagatagagatcaggcatgtaatgaatgaatgtgaatcatgaatacagctggagcacccctcatcagggtagcccacaccttacaaccgtggacacagaggccttgttgcttccccgaaagtctagttaatgcctagttaatatctaattaatgaccagttaacgacaacgctcctaactccatcatcccaccccctttccccaaattcagcacaaatggcttcagtttgagtttcccaaagcatctcctcaggtgtgtggttacagcccagccctagggtctctgggtgcatcggcttccccctcccagatccaagtacaactgaaaccctaacagtagaaatcatcattgctggcccagcgctgccaccactgcttctgttcatagcctgttttgtttgtttttagtcccttagggactggccctaacaacaaatgaggagaagccaagttctctgctttctgcagacagggcctcccctggatgggatcttcctctgaggcgagcttcagatctgctcaagcttcctgcagtggggccaggaggcagggcctgggcaggggagaccagaacctctcggtgatgcctccgaatggcagggctcagacacacacacctggctgggtaagtccctgcagtgaaaaccgagacggtcttttgcctgccacagccccgggcagactctgctctcaccgtggtgccgacatcccaagttttcagactcaccaggacccagtgacagcatctgggtcctcagagctgcatgcggactgtccccagttcagagcattggacagagctgggaactgacagccctgatcaatagtcccaagaggaaggccagccctcctcctcctcggaatcctgggtttctaggaggcagaaaggttttctgagaaacaaggcttttggaaggaaggtggtgcctggctgcatccagaaagtgagagctaaatggagaggctgaacaaaggacgcatgtggagcgcatggggagggaaggctggggtgcagggctccgggcctgctcttctgcgtccaccccggatcctgcttttgtccagatgggcctcggagcaccagtcacttactccaagaagtcgtttcctgtggccaataatgaagatgacgcactcggaagcttgtgggctctgaggagggggtaaggatgcaggggccatgcattcatcccagcacaggcagcgcatggctccggaagcagacacaggccaggcctgggccaggagtctgccaggagccaggagcgcctacacctccctggaggcccacacttctctccccagaagctcacacgcagcgtctgaggtgcagggcccaggtgtgctggggtgacaaagccccgagctgtggtgatgg

SEQ ID NO: 1154 - DNA, 85 bp, Homo sapiens
ggcggaggttgcagggagccaagatcacaccactgcactccagccggggtgacagagtgagactctgtctcaaaaaaaaaaaaaa

SEQ ID NO: 1155 - DNA, 11553 bp, Homo sapiens
atgcgggatgaagatacgagggtgacatggaggaggagttcgaggaggaagaagagggtgtgttctggaccagtggcatgagcaggtccagctgggacaacatggactatgtgtgggaggaggaggacgaggaggaagacctggactactacttgggggacatggaggaggaggacctgaggggggaggatgaggaggacgaggaggaagtgctggaggaggttgaggaagaggatctagaccccgtcaccccactgcccccgcctccagcccctcggaggtgcttcacatgccctcagtgccgaaagagctttcctcggcggagcttccgccccaacctgcagctggccaatatggtccaggtgattcggcagatgcacccaacccctggtcgagggagccgcgtgaccgatcagggcatctgtcccaaacaccaagaagccctgaagctcttctgcgaggtagacgaagaggccatctgtgtggtgtgccgagaatccaggagccacaaacagcacagcgtggtgccattggaggaggtggtgcaggagtacaaggtgagagaagtacagagagaagatgggagtttagtggggggatggagaggaagtaaggggacctgggaaaaggaaacatctcttcacccaccaaagaacctcatggtattggtgagccaagtttgcttatctaagcacttactgccaccaaggtggattagaatgagaaggattctgtacacagagcagatgcagtgaagacgaccagggaaggatggcttcctcaaagcaaatagagcaaagccggtgatgccagatcaggtctctagggctttaccagaagtctcgttttctttcgggtgagtcttaagtctgtccttgacggagacacctagagatggaaagaactgggggcttcaaaggacaagaaaaggctcagaagcaggaacacagagataactgctagtgtcagtgtcagacccaaatgctctgcacttgcctcccagtgggttccccacctaccacgatatggcttggttctgtcttcaaggactttggttggctctgtgtcattcttatgcactgactagaaagcaggagcttttcagtcagaagacctggctctgcaagttgcattgtcaaatcttgattaagtctgtgagtgtctttggactttaatttgtccaggattgatagttaatattcactggacatttatatgtataccaggcactgtactaggcacttttcatggactgtctcgttaaaacccagacaacactgagtttgatatgttttccattcccattttatagattgggaaacaaagtcagagaggctttaagtaccatacagagggccacagagcttcagtaataattgacttagttatttactgtcccttcccctggtgtatactaacaacgccaccaccatttggatgtctgttgtttgacttttctgatgtgactttcttggagtctgattctagtttgacaaataccttgcccctacttctcattttgactcttctttggacataggtaaaggagatttgtttgcaaggcagccagcacaaatagcactacttagtgaaggcctggatgggtttgaagcagtgggaccaggaggaggagggggtagcctctgtgtggtctgcacagagctttttttgttttataactcatgttttcagaccttctcctgattcctgctataacttcatttaggtattattttcgttaccccaattttagagtaatgtgtctagggtttctcagctctgagtggtacagctagacatacctacattacctcatcacaagtaacaatttcttttacagagtggccttttttttttttaattttttgagacggagtctcactctattgcccaggctgaagtgcagtagcatgatctcggctcactgcagccttcacctcccgggttcaagtgattctcctgcttcagcctcctgagtatctgggattacaggcactcgccaccacagctggctgatttttgtatttttagtagagatggggtttcaccgtgttggccaggctgttctgaaattcctgacctcaggtgatccgcctgttttggcctcccaaagtgctgggattacagacatgagccactgtgcctggctacacaaagattgttaaacctgcctgattgttggaattactaggggaggttttcaaaaatacagtggatcctaccactagagtttctgaatcagtgagtaggagaatatctttaaaaagcccagtctagcatggggatcactgcattggtaacattgcctagctgttagtccctgcatttttagcagagattgtgaggtcctgttgtcctttccatctcctcagttcctagttaaccatacccatcatatcatgtgtggtcactttgtgaacaggaacccaggccaaactatccatgggcattccaccctttctctttcacctccccctgtaggactgctccaaggagcttctgaaactggattttaatttgcattagccaaatttgttcaatgccagctgcctgaaatcccgtattaggtcctgaagtaggtgaggaattaaaaaaagtcataatctcttttcttttccccccttttttttttttgagacagaatttcactcttgttgcccaggctggagtgcaatggcacaatcttggctcaccgcaacctctgcctcggattcaagcgattctcctgcctcagcctcccgagtagctgggattacaggcatgtgccaccacacctggctaattttttgtatttttagtagagacgggatttctccatgttggtcagactgatctcgaacgcctgacctcaggtgatccgcccaacttggcctcccaaagtgctaggattgcaggcgtgaaccactgcgcctggccatactctcttttcttgatctgtttactgcgctctgcagtttgggaggccatatacacatatttaatctgacattaagtgatgagtaaatgtaaatacatagttttattgtataggactaatttgagtgattccctttctgacttaataggctattttacaagtgggtcatttatttttttatttttattttttttgagatggagtctcgctctgtcgcccaggctggagtccagtggcgtgttctcggctcactgcaagctccgcatcccaggttcacgccattctcctgcctcagcctcccaggtagctgggactacaggcgactgccaccacgcctggctaatttttttgtatttttagtagagacaggatttcaccatgttagccaggatggtatcgatctcctgaccttctgatttgcccgtctcggcctcccaaagtgctgggattacaggcgtgagcaccgcgcccagccacaagtgggtcatttattcttttcagatatgtacatgcagtaaccagtagcttggcaaaatgttttgtaaaaattttttttgttgaataggtaataacacacaaatgatatgtaaatatagttcctgaacagttacatgtttgttttgttttttttgagacagggtctcactctggccaggctagaatgcagtagcatgatcatagctcactgcagccttgaccttctgggttcaggtgatcctgagtagtagctgggactggaggtgtgtgccatcatgcccagctaattttttttttttttttttcgtggagacagggtcttgctgtgttgctcaggctggtcttgaaccactggcctcaagcaatcttcccattttggcccctcaaagtgctgggattactgtgtctgcccgacagttaaatgttttgaaagttggccgggcatggtggcgggtgcctgtagtcccagctactcgggaggctgaggcaggagaatggcgtgaacccgggggcggtggagcttgcagtgagctgagatcacgccactgcactccagcctggacaacagagcgagactctgtctcaaaaaaaaaaagaaaaaatgttttgagaatttctcttataactggctggctgtggtggctcacgcctgtaatcccagcactttgggaggctgaggcaggtggatcacttgaagtcaggagttcaagaccagcctggccaacatggtgaaattccgtctctactaaaaatacaaaattagccagcatgatggcatgtgcctgtaatcccagctactcgggaggctggggcaagagaatcgcttgaacctgggaggcagaggttgcagtgagccaagattgtgctactgcattccagcctgggcaacacagcgagactcccatctcaaaaaaaaaaaaaaaaaaaaaaaggaaatatatcttaaatagaactctgtttgaatttgtgcttattaatttttgtttttgtcagcaatttagggtcccggcacggtggctcacacctgtagtcccagcactttgggaggcagaggtgggcagatcacttgagggcaggagttaagaccagcctggccaacatggtgaaaccctgtctctactaaaaatacaaaaattagccaggtgtggtggtgggcacctttaatctcagctactcgggaggctgaggcaggagaattgcttgaacccaggagttggatgttgcagcgagccgagatggcactgctgcactccattctaggcgacagagcaagactctgtctcaaaaaaaaaaaaaaaaaaaaaaaaacagtaaatggtaaatttaagcgttataaattctgaattaatggagaaattattgactagaaaagtagaaagttatatcagaaggccaaattttgtgtagttcatgctattgtcacgagttgactataattccattattactgtaattttgtctacaaccacttatcctgtgcagcaactgctgtttgcactctggcttggtaaactctttagttcaggggtcattatcaggatgtcactggcagcttaaggtatagggaacaaatattagataacatttactgatcttctgctacatgccaggcactgcagtaagtgtgctatccatgaggtccattctcttcttatttgaagctgaggaaactgaaagcatggcttgcctgaggtcacttcacttccctctggtcctgactggagtcaggctggagctctcctaccctatattctctctcaaagaaaaggagacaggctagtagaagacatagaaaaggtaagagcaaataggtagggcttattccactcattctgggctaacagccctttaaagaaaagtatttggctacaaattgtagaaacacagagctcgtgtgcctattggctataacagttacaacctttggaagaggggtttcggtgtcctttgccatttagcaagtaattgagcaggagagaaagcagatgagcagaaagaagcaaagaagttgaaataagtagagtgtgggcagggactccgcagtgtcctggaggaggcacacctgtcattggtgccctgggaactcatgtattagatatttcttgggatcacagaggatgttgggggtggggaggatcagggccattttcagggagctgttttaaaggaagaataccttgggccaagtggagaaaggcactcccagacagagggaacagcatggaattatactcaggaaatgacaagtaattttatgtggtcaaacgtgttaagagtctgtgtggaaggcgttgagtgtagaggtgaggctggaagtgtggggtcaatgttttggaagtggtggtgacccatggaaaggttttagcataggaaaaaaatcatcagaaaagtatttagagagaagagttctggggaagatcgcctgtgaaggggaaggggaccaaaggtgagggcacccctggaaagactctggtgcggggctcaagccacttcccctcagctgtgagcgtgggagctctctagtcttgaggctcctacctttagagaatacacacagggccggccgggcgcggtggctcacgcctataatctcagtactttgggaggctgaggtggacggatcacgaggtcaggagattgagaccatcctgggtagcatggcgaggtgaaaccacgtctctactaaaaataaaaaaattagccaggcgtggtggtgggcacctgtagtaccagctactgggaaggctgaggcaggagaatcgcttgaatccgggaggtggaggttccagtgagccaagatcgtgccactgcactccagcctgagcgacagagcgagactctgtctcaaaaaaaaaaaaaaaaaaaaaaaaaaaaaatacacacagggcttctgcagacgtgcacagagggattggaggcttttgtcatcatctgaaagaagaaagtggaggaaggtataatactcacttgacacccattttcgggggtagggatcaggctttgacccatcttgctatagggaggattgcagaggtaggctctgaagggcaggtgcctctcccagcccccacttttctttttctgtttcctcaggccaaactgcaggggcacgtggaaccactgaggaagcacctggaggcagtgcagaagatgaaagccaaggaggagaggcgagtgacagaactgaaggtgggtgaatgttctcgacggggctgatgggcagtacagtcgaggcaaggaaggtagggcttcccactctcacagggagtgacttggtcccctgaggaggggacagctaaggcctgggagaggggtagatgctttccctaggtgctgaggagagcggggccttagagaatcaggaggcatgttcattcctggttccaaaatggagtggaaactgaggcctggattggagggcctaggtgcctggcccaaggctgcagaacaggctttctacccgacaccagagcctgaagggggcaaagcaaaacccacatagcagccatcagagaagctgccggccccaggatccatgcaggcactgggcagagcagccctaagcatgaggcggacactgtcctgggacacttgctgtgtcctgagagggggccagtgtgtttaagctggggcaggatttagtgtatgttagcactgcagagacctaatatttcctagtctagtgttttctcagcacaccccgacccccccgctttttttgttgtttttttccattattgctcgcccttctccaaggagtcttttaagatacattttccatccccacctcccgcctgttttcataaccccagcaggtcctgctgggatgggctggcactgtgagcttcatagaccaagccaggacctccccttctgtccctcttccctcctcccttcccagccagtgcctgggccttgccactacccagggcccatgctcactgccacctgaacgttagggactctgctgctggcgactgctaggcactgaatggtaggatctgtctgggagtaggaagtcatcgtgcttctggccagctgcccaagttgatacttttgggctctcctgggtatagaggtaacaggagctgtgtgcccctggcatagagtgaagctgactgtggcggctgttccctcacgcgtctggtcagttgggaccctcctctggcctgctgctcacagcgtctgcagccgatggtagctgtgtgaaaagtgtgcctaccacccaggaagggccatccctggcaaatagggtgggactgggcaggagttttttctgttacaggatattaagtccctacataatatccttgatttttgcctcttagcccacaaagcataaaaatacttactatctggaccttcacagaaaaagtttttccgagttctgatctggggcttttgggtgactttcttaaggtcactgtgtttaatggcgtcgggaccctaacttcatgttttgattcctgaattcttttatttattcatttcaaaaatttttaccaggtgcctactctgattggtactatgtcagggtccgaggaccctggcaaacaaagacattcctagtccctgtcagtgggagctcatggtacagtgggggaaaggatgttaacagttacgtcatttaaacacaacgtttcaatattatatgtgccacagagagatacagtgatatttgtggggatggtcccgatttagatctggagaggagggaaggcttgtcttggaatatttaaggttggacctgaaggatgagtcaacttaggtagagtcaggtggagaggagtgttccaggcagaggttagtgagtttgagaccactgtgctgggagcaagggggtggtatctggtaaggctggtaggggatgagcctctttccgggactatcttggacctggggagtgtagggctcctttgccttgcattgagaagtagtagttgcaaaactggaggttatcttcgtacgtgttgaggtggtgtctgccatcccctttgcaccattccagagccagatgaagtcagagctggcagcggtggcctcggagtttgggcgactgacacggtttctggctgaagagcaggcagggctggaacggcgtctcagagagatgcatgaagcccagctggggcgtgcgggagccgcggctagtcgccttgcagaacaggccgcccagctcagccgcctgctggcagaggcccaggagcggagccagcaggggggtctccggctgctccaggtgagcaatgtcccctccctgttcccccagcattctgtgttggctgtcaggcagtgcttaccaaacgcctgtccagagctgcctcttttctccctgggaggaacccacagtgattgaacctgaagaccaaaaacatgttttaaagctggaaacagagttaatgtcgaatgtggtatgtgtggcgattatacccagtgaaaagcatgaagattcggttgtaggagaggtttaaatgacagttgaggaaagtctttttgacagtgacatcctgaaaaaggtgagcaagtcgtattgtggaaatgacagtatccctgggctcacagcaggatgaggcgagttaggtatggcgaggcatggggtggttgaaatggatgtgtgttcattgagggccgtgagggtgctgcttctcccttcctgctcaggttcagtctctgactggagatcggggaacgctgtccctgtgcagctgacactctctttatctctttctccctctccctctttttgtttctcttattcccaggacatcaaggagactttcaataggtgtgttcccagtctttgcccttcgtgacccagtggcatctggttccctgtccctgcttctcttcggtatccctctcctctccttccttccccaggacctgagtttccatctcctggaccctcctctccttcccctcagcttttgcttttccctctgggaatatcgtggtcccaccccctgcccggtccccttcctccaggtgtgaagaggtacagctgcagcccccagaggtctggtcccctgacccgtgccaaccccatagccatgacttcctgacagatgccatcgtgaggaaaatgagccggatgttctgtcaggctgcgagaggtagggaggtcacctccacgaccttcctttgcctttcccttcacagacctgagactgggtcctgagggaagttgggccccagggaaactgtggggcttgagatggagcaggatccaggcagccactctgaggttgaggtttcaagccatgagcaggtagacctagtgcaggcaggcctggagggtggggtggggtggagtggcaggaagagccaggctgggggaagacctgtcaggtatcctaggaacaagagtgaggagcaagatgagcctgcaggaatctgaggctggcctctgggatggtgtggggagctggattcagggagaaagggggcccaatctgtggagttggctgctgacaggggaacagccgttccagccctggcgtatttgtcctccctccctcccaagtggacctgacgctggaccctgacacggctcacccggccctgatgctgtcccctgaccgccggggggtccgcctggcagagcgccggcaggaggttgctgaccatcccaagcgcttctcggccgactgctgcgtactgggggcccagggcttccgctccggccggcactactgggaggtagaggtgggcgggcggcggggctgggcggtgggtgctgcccgtgaatcaacccatcataaggaaaaggtgggccctgggggttcctccgtgggcagcggggatgccagctcctcgcgccatcaccatcgccgccgccggctccacctgccccagcagcccctgctccagcgggaagtgtggtgcgtgggcaccaacggcaaacgctatcaggcccagagctccacagaacagacgctgctgagccccagtgagaaaccaaggcgctttggtgtgtacctggactatgaagctgggcgcctgggcttctacaacgcagagactctagcccacgtgcacaccttctcggctgccttcctgggcgagcgtgtctttcctttcttccgggtgctctccaagggcacccgcatcaagctctgcccttgattatcctgccacccgcaggggcccctctgtcagcacttggggggtgggtggtggagggtggcccgtaagtttgagggctcaaaggctcttcccactgcttgttactgtgttgcttcccactcccccttgaccccaggcccctgcttctccctctaggagcctaaagaaccctcctggcctccagctcagccttctctcacctactatgtctgtccaacaggtctgcatgggtccctgataatgagaacagctgcctggtcttctctcccagtctgcctagcccagccctgggactggaatttgagtaggggatgaggggaaattgtaatttcattccttaacttccttttccccacccctgctcttcaacctctttatcagttctgaggctggagggtttgggcaaggcaacatccccattccaattccattttctgatgcagattttagctgagggatttggaagccatttggggaggcaggctgggccaaagggtagagctgggtaataaatgtctattctcctggggaggagggattctaaactttccttccgtcctcaatttctacctccatagaccggccagaatttagcttcacttgagagagatctggaatggtcgccatgattgaaaccacgcaccattacatcatcattacattaattacatcaacataaattatttcttcccccttcccttttccagcactcaaccaaggagcaaagctcatcccaccccacacccctcccaggtctgctcactgccaggctcctctcccctttgttcagtggagctggcttttctcccagcccctttccatgcctttcactccatttggcaagctctgagggggagcctggggacgggtttgggtccccaggaggagagccttgggtataatctatttttctaggagcctcttgccttgtcacttgcagctttcgccctctgctttgatggctgaggtgaactcatgttctttgggaaaagggaaggcgtgctgtggaaataaaatgtttatttgcttctctt

SEQ ID NO: 1156 - DNA, 446 bp, Homo sapiens
atatcttaacctaacttactaactgttcagtctacttagagatgtttgccacacgtagttgaaactgaagccagaaatgcctcatcaccattataaattgaggggagtaggaagtggagggtgcatgtgggccttcaatatgctgtagttgcttagcacagaaaattgcaagggtagtggggtctcagccgcatgttgaaccattccatccctgtactgaggtttctattggaaactgtaattgtagtttaatggctcacttctggcctttcacaaggcatctatcctcatgaataaactgtgtttgtgtgtagggggattgagggccaggttatagtagcagttgaaatgtttagtagggccaactttatggttctatttatgaatgcttccagaccaaccaccccaaaacttttgacctgaggaataaattagttttgaattaa

SEQ ID NO: 1157 - DNA, 21470 bp, Homo sapiens
gcgcagagcaggttcaaacacagacggcgggtgaacatggcgtcctcgacttggtctgagacgtgataggcctgccttctggttgaagatgtggcgagtgaaaaaactgagcctcagcctgtcgccttcgccccagacggtaagcgggagatctctggcggagagaactgggccgggctgctgtcgcgggggcaccggccgtgtctactgtcctggaaagttgggtcgagcccggggttgggggcttgtggagtctttgttcgccttgctgctcctgcgcgactagggtgcgagcgtactcttctaatcgcattttgggcttcttagggagggaggaggggcgggctggcagaacccaggcttcctcacactcgccctctttcttggtttctttctcagggaaaaccatctatgagaactcctctccgtgaacttaccctgcagcccggtgccctcaccaactctggaaaaagatcccccgcttgctcctcgctgaccccatcactgtgcaagctggggctgcaggtgagattcgcctggacagcttctcgactgggctgtttgcccagggtgagagctcaggggaacagagggccagggctacaataattaataacgataatgaagtcttctacgtcggtgacatccatttacagctattcaggccaacagagaggtgccctagggtggttaaaggaaatccagtgagaacttgaatctctgtttagctgttagtttttattacctcctcctcctcccttcgacctttatcaaactattgagaaatcctaccaccctgattagtgctcttcctccaacatggggtcacttacggaaaggtcagtcacctgcaagattgaggcaatatccatttactctaggaggtagttagaactctcctgggatcaagttacaccactggaaggtagggtacttgaatcaccttagtttaaactagctccttgcagaattgccctcactgatttgtacttttgttaaacgttttgagagacgtagccatgtagaaactgcatttcagttgctgtcaaaacttgtcaaggaagcagcttgactcctgtataagattcctccaagaaaggctttaggactaactgcctggaaaaattgtcttcctgaagaaattgctatccttttctttctgataatgagaactatgtagtttaccatattttccctcttgctctgccttctagaaagctcaaggccaaactggatcatcacatacagctactgttatagctgtataggaagttttgcttcctcttttttgaccatgactttgttatttcattaatcgtatctattcattttcatgcatatgaattatttttggaaggagatgggatatcaataaaataggtatgaggaggaaagaagagtgtatagacagatgacatcctgagtaacagaagtatgatgatagcatagcagtctttcttgaaagagttgcaaaatacctactgtccaatagaactttctgggatgagggaaatatttgataatctgtgctgtccagcatggtaactactagtcacatggttattgagcacttaaaacgtggctgaggtgactgaagaattgaatttttttgtttttgagacggagtcttgctctgtcacccaggctggagtgcagtggcgtgatcttggctcactgcaatctccgcctccagggctcaagcgattctcctgcctcaggctcctgagtaactgggattacaggtgcacaccaccacgcctggctaattttttgtatttttagtagagacagggtttcacaatgttggccaggctggtctcaaactcctgacctcaagtggtccgcccgcctcggcctcccaaagtgctgggattacaggtgtgagccactgtgcctggcctgaataattgaatatttaatttaatttaatttaattaatttttttttgagatggagtttcgctcttgttgcccaggttggagtccaatggcgcgatctcggctcaccgcaacctctgcctcccgggttcaagcgattcttctgtctcagcctccggcatgtgccaccacacccagctaatttttgtattttcagtaaagacgggtttctccatgttggtcaggctggtctcgaactcctgacctcaggtgatctgcccgcctccgccttccaaagtgctgggattataggcgtgagccactgtgcccggcctgaatttttaattttaatttcaatagctacatgtggctagtggctatcatattagacagtacagcttaagatgaaaaataaataagtactaggtggaaattagctctatagagcttatagaatttattatgattattaattaattaattaattttgagatgcagttttgctcttgttccctaggctggagtgcaatggcacgatcttggctcgttgcaacctctgcctcctgggttcaagcgatcctcctgcctcagcctccctagtagctgggattataggcacgtgccaccatgcctggctaatttttgtatttttaatagagacggggtttcgccatattggccaggcttgtctcgaattcctgacctcaggtgatccgcccacctcagcctcccaaagtgctgggattacaggtgtgagctatggcgcccagcctgaacttatagaatttaaccataattatttaatcacaatagcagaatactagattgaaatcgaattctccttccctcttaactgctgggcttactacctccagatgcagtcagctacacaatgaaaagggtttttccccaataaaatagcaattatttttgttttgtaaaaatttttttttttttgagagtctcactctgttgcccaggctggagtgcagtggcacaatcttggctcactgcaacctctgcctcccggattcaagcaattttcctgcctcaccctcccaagtagctgggattacggtgtgtgccaccacgcctggcagattttttttttgagacggagtcttgctctgtcacccaggctggagtgcagtggtgccatctagggtcactgcaacctccgcctcccaggttcatgcaattctcttgcctcagcctcctgagtagctgggattacaggcatgtatcactacgcccaggtaatttttgtatttttagtagagacagggtttcaccatgttgggggtcaggctggtcttgaactcctgacctcgtgatctgcctgcctcagcctcccaaagtgctgggattacgggcgtgagccaccgcgcccggcctaattttttttttttgagacaggatctcactccttcatccaggctagagtgcagtggtgtgatctcggctcactgcaacctctgcttcccgggttcaagcaattctcctgcttcagcctccccagtagctgggattacaggcgcgtgccaccatgcctggctaattttttgtatttttagtagaggcggggtttcaccacattggccaggctggtctcaaactcttgacctcaagtgatccaccctccttggcctcccaaagtgctgggattacaggcgtgggccactgcacctggcctgttttgtaaatttttgattattaatagatattaattgtttgaagcatttgaatatataaatgtataaggaagaaatatttctggtatcttagataaatgtcatatttgacagttctttcatacatctctttatgtgtgtctattttgtatatatgcacacacacacacacacactcatctttatattgtctttttttttttttttttgagaaggagtcttgttgtatcgcccagattggagtgcagtgccgcgatcttggctcactgcaacctctgcttcccagattcaagcgattctcctgcctcagcctcccgagtagctgggactacaggcacccgccaccatgcccagctaatttttgtattttgagtagagatggggtttcaccatgttggcccagctgcactcgaactcctgaccttgtgatctgaccgcctcagcctcccaaagtgctgggattacaggtgtaagccaccatgccctgtcttttttatttttttttttgagacagggtcttgctctgttacccaggctagagtgcagtggtgtgatcttggcttattgcaaccttgaactcctgagctctagcagtcctcccacctcagcctcctgaatagctgggactacaggtgtgagccatcataccttttaataatttcaaaattaaagtaagatacatgaaattacaataaaacataacagcataacaaattactataaagtacacatccatgtaactaatacccaggtcagtaagtaggacagtaccagaatatcagaagccctttttaacctaaccttggttttgtttcatccactaatataaatgagaaatttcatatgtttgattattattattattattttttgagacggagtctcgctctgttgcccaggctggagtgcagtgtcacgatcttggctcactgcaagctccacctcccgggttcacgccattctcctgcctcagcctcccaaatagctgggactacaggtgcccgccaccacagccagctaattttttgtatttttagtagagacggggtttcatcgtgttagccaggatggtctcgatctcctgacctcgtgatccgcccgcctcagcctcccaaagtgctgggattacaggcgtgagccactgcgcccggtctgtttgattatttttttaataaataattggactttctatctaaagcttccagaatagttttttcttcattgtagcacagaaattttataattatgtgtctagcatgtatcttttctagtcagtcctgcttagaaactggtgagccattttaatgtgcaaactcaggtctttcattagggtagttttcttctaatatttgttaatcagcgcctcatgtatatatgttctcttctggaatttcttttatttaactgttaggtatcctgggtttatcttctaattctcttagctttttcttcagatttacatttctttatatttttatctttgctttaagatatttcttccacttgtccaggccagtaattctagtttcaactctaataatttactctttcaattcattttactgacattttttatttaaaataatatttattatttctaaaatgtctttgtgtgtgtatttatgttgtagttaaagcttaagtactcgttttttttgttgttgttcagattatcatctgtgtcttccagcagctctgttttgttagggtctaccttttttatttatttatttatttttttttgagacagggttttgctctgtcacccaggctggagtgcagtggcacgattttggctcactgcaacctctgccccctgagcttcagtgatcctcccacctcagcttcctgagtagctgggactacaggcacacatcagcaccaccatgcccggctaatgtttgtatttttagtagagatgaggtttgaactcaagcgatccacctgcttgtggcctcccaaatgctgagattacaggcgtgagccactgcgcccagccgagagggagaagaacttgtaccaactctagattctgacagagcttaagccttcactcacaccctatggacccctcctatctgttcatctagaagtgcgttagagttcagaatggagatgagtggggtcactttcaagctaccatctgcccacgatatggatctatattctcagcctgtttataatgtaggctggttcacttggaaggacccaaaatggcttagcagcttttctttccctactattgggtctctatatgagcaacaaagattagccaagttcttacctaagcagaggtagtaagaattcttttcttttttgagtgcactatcttgcacctgtaattgtatgtcgggaactgaattgactgccttagacaactacttttgtttcctttggcaggaaggcagcaacaactcatctccagtggattttgtaaataacaagaggacagacttatcttcagaacatttcagtcattcctcaaagtggctagaaacttgtcagcatgaatcagatgagcagcctctagatccaattccccaaattagctctactcctaaaacgtctgaggaagcagtagacccactgggcaattatatggttaaaaccatcgtccttgtaccatctccactggggcagcaacaagacatgatatttgaggcccgtttagataccatggcagagacaaacagcatatctttaaatggacctttgagaacagacgatctggtgagagaggaggtggcaccctgcatgggagacaggttttcagaagttgctgctgtatctgagaaacctatctttcaggaatctccgtcccatctcttagaggagtctccaccaaatccctgttctgaacaactacattgctccaaggaaagcctgagcagtagaactgaggctgtgcgtgaggacttagtaccttctgaaagtaacgccttcttgccttcctctgttctctggctttccccttcaactgccttggcagcagatttccgtgtcaatcatgtggacccagaggaggaaattgtagagcatggagctatggaggaaagagaaatgaggtttcccacacatcctaaggagtctgaaacagaagatcaagcacttgtctcaagtgtggaagatattctgtccacatgcctgacaccaaatctagtagaaatggaatcccaagaagctccaggcccagcagtagaagatgttggtaggattcttggctctgatacagagtcttggatgtccccactggcctggctggaaaaaggtgtaaatacctccgtcatgctggaaaatctccgccaaagcttatcccttccctcgatgcttcgggatgctgcaattggcactacccctttctctacttgctcggtggggacttggtttactccttcagcaccacaggaaaagagtacaaacacatcccagacaggcctggttggcaccaagcacagtacttctgagacagagcagctcctgtgtgggtaagcgcccctatgtccttgcacctcgtgagttccattaccctggaccttcccctcccatcccttcccctccttttcttttcgtcatgttcttctctttctgctgcagccggcctccagatctgactgccttgtctcgacatgacttggaagataacctgctgagctctcttgtcattctggaggttctctcccgccagcttcgggactggaagagccagctggctgtccctcacccagaaacccaggacagtagcacacagactgacacatctcacagtggggtaagaaggttcctctcaaagcttgagggatcccagtggggatccttggaatttaagctgagaagctgccagagggcaaaggggactcctatcacaggcttatacttagaacatttgcaaaagctgagaatctgggcagtcacaatggctgatgcctgtaatcccactgctttgggaggccaaggtgggaggactgcttgaggccaggcatttgaaaccagcttgggcaacacagcgagatcccatccctacaaaagatttttaaaaaatcagctggatatggttttgcatgcctcactactcaggaggctgaggcaggaggatcatttgagcccaggaggctaaggctgcagtgagctatgatcatgggcaagacagtgaaaccctgtctcttaaaacaaaaaagctgaggatctggaaaatccccttaaagctgtgggtagtcactctacccctggggtacatcagaactttccaaaggagtgcaagcaaggaaacttttaaaggaattggtttttagatcatcatcttccacaagtattctttttcttcgttttttgcattggtagactatatttaatattttaagaaaaattatgaataagcctaaaacattttttaaaataatttttaatttttgtggttacagagttaggtaaatatattcatggagtccatgagatgttttgatataggcatgtgatggtcaataatcacatcatggaaaatggaaaatggagtatctgtatctgtcccctcaagcatttatcctttgtgttacaagcaatccaattatacttttagtttttttttttttttttttttttttgagacggagtctcactctgtcacccaggctggagtgcaatggcctggtctcggctcactgcaacctctgcctcccaggttcaagcgattctcctgcctcagcctcctgagtagctgggactacaagcgcatgccaccccacccggctaatttttgtatttttagtagagacagggtttcactatgttggccaggctggtctcgaactcctgccctcatgatccacctgcctcagcctcccaaagtgctgggattacaggcgtgagccactgcgcctggcccctgttgtttatgtgaagaagatttctcagtgtttacatctgtcagaatggaaaggagtcagctggcatagtggctcacccctgtaatctcagtactttgggagggtgaggtgggaggatcgcttgagctcaggagttcaagaccagcctgagaagtatggtgaaacctcatctctacaaaaaaatacaaaaattagctgggtgtggtggtgtgtgcctgtagtcccagctacttggaaggctgaggtggaggatcacttgaggctaggagttcaaggctgcagtgaactgagatcttgacactgcactccagcctgggcaacagagccagaccctgcctcaaaaaacagagtcacgaattgttgctgaactatttcttattgctggaattatagtaatccacagatatacgaactaataaggggaaggaatctccatcgatttcattaataggtgattcccaattaaattttgccgagcatgtttattttattagaaattatattacagtgactaatatacaactgattaaaagatttctctatcctaaagaaagctttttcactttaaagccttccggtcaaaggaatttaaaggaaattttaatttaaatttagatgaactttcattgttgttgcagagatgatggttaataacagattttatttttattttttgagatagtttcttggtctgtcacccaggctagagtaccatgttgcgatcagggctcactgaagcctcagcttccttggctcaggtgatcctcccacctcagcctcctgggtagctaggactgtaggtgtatgccaccacacctacctaatttttttgtatttttagtagagatggggttttgctatgttggccaggctgttctcaaacccctgggctcaagtgatctgctagcctttgcctcccaaagcactgggattacaggtgtgagccactgtgcccagctaataacatactttaaagcataaaaatatattacattaggctgaaattctgagaaaaataaaaaatatatgttcaaagagaaaaagggatgacataataaaatttctgactgctaagaagagctttttcttgtatttttaaaagatagcaactaggtatctcatcattttggtgtatgtagtatttatgccactggatatatttaagagtaatctaataattttattttaggctgggcatggtggctcatacctgtaatcccaacactttgggaggccgaggcgggaggatcacctgaggtcaggagttcaagaccagcctggccaacatggcgaaaccccgtctttactaaaaatacaaaaattagctgggtgtggtggagggcacctgtaattccagctacttgggaggctgaggcatgagaatcgcttgaacccgggaggcagaggttgcagtgagccaagatcgcgccactgcactccagcctggaggatagagtaagactctgtctcaaaaaaaaaaaaaattattttaaattgtcaatattggtaatatgctggacattacagcctttgcaacaatttaaacttaagggtacttagtttttgcaggaaatattagaggaaagtagctaaaagaccactgttggcccaatgtggtggctcacgcttataatcccagcactttgggaggctgaggccggcagatcacttgaggccaggagtttgagaccagcctggctaacatagtgaaaccccatctctattaaaaatacaaaagttagctgggtatggtagtgcactcctgtaatcccagctacttgggtggctgaggcatgagaattgcttgaacctaggaggtagaggttgcagtgagccgagatcacccagtgtactctagcctgggcaacagagtgaggctgtctcaaacaacaacaacaacaatgttctagaggattgtattacaacacaggcctaagaaggaagggaatggtggcaggtgaaggaattgatagcacctcaccattgtggctgttgagataataggtggctgctgctaagaagagatggtccccaaatgtgcagagacctcctttgagttgaaaatatcctcaaagtaatgaccttaccatttgccaaaaatcctggaaaccataagctccatgttcctccagctgttcaatttccctcctgttttcttatctttgtgtcctttcctcttgttcttgaccttgtttcccatccctgaatctgccatgcatcctcttcccctgaaggttgccaggtccctttgtaggccactgaagcagaaccaaagaggggaaatgacatacctttagccattctccatcagcatgccatgtccttgctgcctggctgcctccttcacattaatctcatcacctgcctgactgtccagctgagcacgatgtgagccctatccaagctcatgtgctactctgtgccttatttcacgatgcagcagtgaatgataactgctttgctggggaagggagccatgaactccaagaaatcagcagtgctgctccagtagtaacttttcccccagatgatggctgccttgcctcagtaatgaagactcccacttttctcttagaacttgtcttctggggttctactgcctttgagatcatacctacttactctatgcatactatgagttttatctatctgacccaggataatgagcagacaattaagaaagtaaaaatgatgaataaatacctaagaaggttagcattattggcaataaaaaatgcaaattgaacagtgagatgccattttcttgtgactcaatagcaaagaataaaataggtaatgctggtaagcatactctatttatctgcaggatataaattggttcatcctttttttttttttttttttttttgagacgaggtctcactctgttacccacactggagtgcagtggcacgaacatggctcactgcagcctctacctcctgggctcaagggatcctcccacctcaatccagctgagtagctgggaatataggcatgtgccaccatgcctggctaatgaaaaaaaattttttttttttgagacggagttttactcttgttgcccaggctggggtgcagtggcgtaatctcggctcactgcaaccttgcctcccggtttcaagtgattctcctgcctcagcctccggagtagctgggattacaggcacgtgccaccacgcctggctaattttgtagttttagtagacatggggtttctccatgttggtcaggctggtctcgaactcccgacctcaggtgatccgcccgccttgacctcccaaagtgctgggattacaggtgtgcgccaccgcgcccagccttttttttttttttttagagatggggtttcactgtgttgcccaggctggtcttgaactcccggacccaagtgatcctcctgcctcagcctctgaaggtgctgggattacaggcatgagtcactgtgcctggctaaacaaagaaattttttacctacctgtggatttttctttctgacttggcttcattgaattgagtactttgcttctgcttttaataggaaaggtggctgggtgtggcaggagcactttggaagtccgaggcaggaggactgtttgaggccaggagtttgagaccagccagggcaacatagcaagacctcatctctacagaaaataaaaaataaataaaataggaaaggctcctataactcactgggtgggaggaagaatgaggtgctggtggtacatgttgcctactcaaaaggaacaacttggctggtcatggtggctcacccctgtaatcccagcactttgggaggccgagtcggtggatcacttgaggccaggagttcaagaccagcctggccaacatggtgaaaccccgactctactaaaaatatacaaattagctgggtgtggtagtgcatgcctgtaatcccagctacttgggaggctgaggcatgagaattgcttgaacctgggaggtggaggttgcagtgagctgagattgtgccactgcactccagtctggatgatagagcaagactctgtctcaaaaacaaacaaacaaacaaaacaaggaacaactctgtttttctggctagataactaataaacttcagcatcttaaggagagccatgagatgggacaggccctacagcaggccagaaatgtcatggtaagtgatgattgaccttacaccaccactgggtctcctgtgaagatgaagaatggagaatcctgggtggttagtagatggtgatactaagtcgtggtggtgaagggaggtttccaaacatttgtaaagtacatctccttatgcggagcttggaattggggttagcggttttcctccccagtgcccctgtttcctgcttagtgactttatttgatctcacctacccatttttttctctacagcaatcatgggtgcttatctctaaagagctgatatccttgcttcacctatccctgttgcatttagaagaagataagactactgtgagtcaggaggtaagcagcctgaagatggaggtggaggcctgtggtgggactaaaagccataaagaggaaccagacacattaactgattcttaccatatagtctcggcgtgcagaaacattggtctgttgctgttttgatttgctgaagaaattgagggcaaagctccagagcctcaaagcagaaagggaggaggcaaggcacagagaggaaatggctctcagaggcaaggatgcggtaaggtgacaggcatttgttcttggatgtgggaggtttccacctcaaggttcctgcaggaacacaaatgcactttagacacagatgggtggcctaagaactgcctgccctgggcagtaaagaactgatctattgaggtgtcatggttacatctttttgtgctggctcccctgttgcccactgtggccttgcaaccacttccctcaataggcagagatagtgttggaggctttctgtgcacacgccagccagcgcatcagccagctggaacaggacctagcatccatgcgggaattcagaggccttctgaaggatgcccagacccaactggtaatttaagggcattttctttcctggggtctgtgctgacagactgggagggtagttgcatactcccactttgctgtatccaaagggaaggggttcccgcctaggcaatctttcttttgtaggtagggcttcatgccaagcaagaagagctggttcagcagacagtgagtcttacttctaccttgcaacaagactggaggtccatgcaactggatgtgagtatttgggaccatcataactaattccttactcacatcaagtcctgttgtgagctttgcctcaagtgtgctctactgacctgcttgcttcccctggtagtatacaacatggacagctttgctgagtcggtcccgacaactcacagagaaactcacagtcaagagccagcaagccctgcaggaacgtgatgtggcaattgaggaaaagcaggaggtacaaaccaagagtggggactgcttaggcttggtttccttcctaatgtgtgataccattagcctcttaccctggatctgttttcttttcaccctgtgggtttggaggccagccagtaaggtctcttagctgtaagatggccttaagcgcagttttttcctttgcccttcagcatctttacttcagcaacttttctcctgtctctactttttcctgaggatcaaccttattttctgcaatgttgatgcccaggagcaaggtagttttctgtcttgtccagaaagagaagctggaccaagtcctgggattattgattcaggaggaactataggaggaaaaccatctgttcttcctaggtttctagggtgctggaacaagtctctgcccagttagaggagtgcaaaggccaaacagaacaactggagttggaaaacagtcgtctagcaacaggtgtttgtgtgtgtgtgtgtgtatgcatgcatgtaagcatttgagccctgttaaggcttggagtgtggcactagagcaaggaagtactcaggagcacttgctttggagcagaagtttggggagtttctagcctgctgaccgcatggtgtcattaggatacttttgttctagatctccgggctcagttgcagattctggccaacatggacagccagctaaaagagctacagagtcagcatacccattgtgcccaggacctggctatgaaggatgagttactctgccagcttacccagagcaatgaggagcaggctgctcagtgagttcctaacggggtactgtggcagtaggcatccaggatttaggaccaaatgggatctaatatgttgtctctggcagatggcaaaaggaagagatggcactaaaacacatgcaggcagaactgcagcagcaacaagctgtcctggccaaagaggtgcgggacctgaaagagaccttggaggtaaggaatatggcttgggccaagggagctggtaagcctcaggagtgtgattcttgcctgatagtgttgaggtaaggtttgagactgtgaactagaaaaagcctctgtacccagggcactaaaattctccctccctgtcttgctccttctcttgtcttcccagtttgcagaccaggagaatcaggttgctcacctggagctgggtcaggttgagtgtcaattgaaaaccacactggaagtgctccgggagcgcagcttgcagtgtgagaacctcaaggacactgtagagaacctaacgtaagttctctaactttctgtacttccccctaagtgcttatttttttctcaggaacacttctagaagccaaaatctccaagaagagaactgtgagtgttgagcctcttgtttctctcctttaatgcagctctgtggggatttgggataggcgttcagagaaggtaatttggtctttggtcatcttccctgttccttatttcagggctaaactggccagcaccatagcagataaccaggagcaagatctggagaaaacacggcagtactctcaaaagctagggctgctgactgagcaactacagagcctgactctctttctacagacaaaactaaaggagaaggtaggatcctggggttccttctcttctcttccaattgtatctttattttacagatagtcttcctaaaacattactctttttctaactgtgaccttttatgatttcagttacctacaggacctcattagcctgttgctcaaacctttcttcccctgtctcctatctccctattatgaacactttgccccagctagactgcctgtatgctacacacatgtccccatttttatccccagaacccagactctggctgttcccacattcattctattctttcttcaaactggaaatgccttttctattaaaatcctcccttccgacctgggcaacgtggtgaaaaccatctctacaaaaaaatacagaaattagcccaggtgtagtgttgtgaacctgtagtcccagctatctgggaggctgaggtgagaggatcacctgagcctgggaagttgaggctgcagtgagccatgatcatacctggctaatttttttgtatcactgcactccaaactgggtgagagtgaaaccctttcccccacaaaaaaagaaatcttccctggtttaccttctttgaactgttcccaaatcaaatcatgtggacccggtgatcttttcttctgccatatttctcatgaacttactcttcttttgtatttgtattaattttccttggatacctggtctcttcaaccagactatgtttcaagaaagcagaaatatagccttctttggcctccctgcagtgtgcactaaacaataaatggttgacatcattcagaatacaaaggtaattagcttattcagcagataaggcacaacaaatatcctaaaatctggcaattgcttatgacctgatcctcttccccaactgggtaccgagcacaggaaatgccatcaaatctacagtttagcatggaagacaaacagatgtaaacttgtcatcttgacttatgatcatggtagaggtctgcatggaccactgtgagagatagagaggggagcaccacttcagccttcgagaattaggatgccttctcaaagcagctgaccttgggtacagtcttgaggtttagacgtttgtggggcaggggagggtatttaggaagtcccactaggcagagggaacggtgtatgaaagtttcatctgactacatatgagagtcgtacgtagaaagtcatgcacatagtacatgatgtgttcttttttatagtgtctaccttataaaacctgggttaggtgctgggactagaggatgaacaaggcaagatgctgctcatatggaatgcagcaagtctgaggaatgggaagcagctcttcatggctgcagcgtgagagctctgtggggcaaggcaggagacaacactggagaagtaggcaggaggccagattttgaaggcttgaaataatggcagttttataggcagtagaaaggagaggatggagtgaatggattcaatagatatttaggaagcagaggcagtagaaccaatttgatgtaagagtgaccaatttgatgtgagagtaagttagaagagtgaatgatgatccttagattgctaggaaagagggcccagcgggtcagctgtgttagtgtgtggagactagggctagtgacacctccgggtcagctctgtgcccaggaagcacttcaacctgtgtggcaggagggatagcaataggaagcacttcaattccccacaactcagacacccagacgggagggcagaggaccaaggctgaaaggagtagagagcctgagagagagatgagactgaggggagctagtggtgactcaggctaaccagtcagcgggagagacctagaccggggggcagagaaggcgggagaactggagagaggacctagcctaggaggagagggagcaggctgagaaggaaatgctctgggtaggagagacagactccaaggaaaaatccaacaagtagaggaggatttgggattggaaaagctgaggtccagctgggagagctgaagagggatagaacagaagaggttgagccatggggtttcaagtacgcggaaaggagcaaagatgttaggaaagggtcgaaagggcacatcccggagtcccaggtagcaggacgaggatggcaggggaagagccaaggaaatgaagcggagatgttgagtggctcccgccttgcctggccttacctgtgcgcagccagttagcagccgcagccacaagcacagctacttcaggactgaggccagcaagcttttcctataaatggccatataataagtatttttggctttttgggccatatggtctctgtctcaactactcaattctgcctttgtagttcaagagcagccatagatgatacagccattaatgggtctggctgtgttccaataaaactttatttacaaaaatagttggcaggctagatttgacctgtaggccacaatttgctagccttccctctccctgctctagaatagtaaatacaggagtaggaacagacttttgatagggtgttccctatcagggcacagggaaaatggtgaactcagcttcatacatactaagttgacagattgactgtggaaccttctggtagattcttcacaggcagttagcctttgagtctgcagactgggaaaaagactgggaaaaagttgagagagggatggaagagtcattcatgtggaagggaagtttgaagtagatgtttttgtgatgctcccaaggcaaggccaccctgggaatgaattagagtaaatttagggccaaggacttaacccagaggatccagcagttaaggaaggacctgtgaatagagaagaaataaccagaaaggtgtggggcctgcctttaaaggagagagactcatgtcctggaagctaagaaaaggaagtttctaaaagaacaatgtggtcatcaatatcaaataggtcaggtaaaacaagagctgaaatatatgcattgcatttgaaagtaaggctgccattggtgaaccaaatgacaagaatttaggtggaatgacaggggagaagcctgagtgtagtgggctggggagtcaatagatggtgagagttataaacaagaagtataggctctttttttctttcttttttctttctttcctttctttctagaaaaggcagtagctaaaaggggatttaaggtaagaagaagggttttgttttgttttgtttaggtttgtttttaaaatactgctgtttttgttggagaggcttaagaatataaacatgttcagagaaaggcactaatggagaagttgaagatagagaattgagataataggtggaacagcattttggaggagatggctgggagttacctggaagcccaggagttcactagacctgaacagcagctattttttcttctttgcccttagactgaacaagagacccttctgctgagtacagcctgtcctcccacccaggaacaccctctgcctaatgacaggaccttcctgggaagcatcttgacagcagtggcagatgaaggttaaaggccctgggatttgggggtgggaaagttgtgacgctgctcctgatatcttctgctgttgaagatgtccaccagcgggcttgtctatcttaccctggcttccattatggtagacccctgcctggatcatcagaggggccctctcccattattggtttttctcttagagccagaatcaactcctgtgcccttgcttggaagtgacaagagtgctttcacccgagtagcatcaatggtttcccttcagcccgcaggttaggaggggctccagggatcctgcctcatttctagaaaatctggtggtgatgagtaaagacgaaagcagtgagaagtgctttgctctaaaaacctcaattctacttgggctcattttatttctgccttctgggatctgtaatgttccagacattcaaatcctgtgggtggggaacacggataagagttgtggaaatgatggctatacactccttccttccagggctggaaggctagacctctatctgggactttctctttcagagaccccaggcatggaggagagcctggcagaaatgagtattatgactactgagcttcagagtctttgttccctgctacaagagtctaaagaagaagccatcaggactctgcagcgaaaaatgtgagtgggatgcagttttggtgacagagggacagtgagacatcctcttatgccaagggtccaactgatccctgagaggacaggaatgttgctaaattcttccttccttcagttgtgagctgcaagctaggctgcaggcccaggaagaacagcatcaggaagtccagaaggcaaaagaagcagacatagagaagctgaaccaggccttgtgcttgcgctacaaggtgaaggagggacctagaagtggggcgatgaagaactggggcagctctactggcccactgggagccattatctctccaggaatctgggtggtggggattttccaaccactgccctagttttgcccttcctggggtcagacatttcacatgtcagctatgggctgacctgtcttcccaggctgactcaggagagaagtcaggaactctagcagagctctcccaacactgaaatgtgccttgcctggcttggccctggggaaagaattggcgtgatatcaattggtcccatgtgggctaagcatgggtcaggcactctctcctacctcctggcaagggctgtgaagagaccagctcttcatgtgtcttctcacctccctttccctcacagaatgaaaaggagctccaggaagtgatacagcagcagaatgagaagatcctagaacagatagacaagagtggcgagctcatagtatgttcaccatcatgcccaggcctttgccttctgtgttactggtcagccaggatcccaagtatgagaaatggtttgcttttgttcaccacatgttgtctatccttatgtcctattggacacctctccattctcattcccagagccttagagaggaggtgacccaccttacccgctcacttcggcgtgcggagacagagaccaaagtgctccaggaggccctggcaggccagctggactccaactgccagcctatggccaccaattggatccaggagaaagtgtggctctctcaggaggtgactcagagttaacagaggagctggacagcaggtggggaccccaggctgtacccctgttgatctggacatatttctaggtggacaaactgagagtgatgttcctggagatgaaaaatgagaaggaaaaactcatgatcaagttccagagccatgtaagaatgtccatgccattccagggccatttcctaccatcgttaacaaatgccccgccatgtttcccctgtcctaccaagtttgctcttttatgcataggacttataaaatctgtttgctttctagagaaatatcctagaggagaaccttcggcgctctgacaaggagttagaaaaactagatgacattgttcagcatatttataaggtataggcaggagggaggtgatatcactaatgaacctggtacaaggcctggccccaggaggtactaatgagcacagatctggttcccagcctgtgctgagagctgggcctgaatcactattgcaggcttctctgtggtgtctgttttctcccctctaattcagcggctgcctcctggggctgggagccctgggccttaagtctgtggtcctgagctgcgttttctgcctctcttcccagaccctgctctctattccagaggtggtgaggggatgcaaagaactacagggattgctggaatttctgagctaagaaactgaaagccagaatctgcttcacctctttttacctgcaatacccccttaccccaataccaagaccaactggcatagagccaactgagataaatgctatttaaataaagtgtatttaatgaatttctccaa

SEQ ID NO: 1158 - DNA, 3809 bp, Homo sapiens
cacgtagctctgcgacatccgcagcctcatttaccagagggagccagggctgcagcctcatctgtttgcggatcagaacccgagctgtgcttgtggctgcggctgctaactggctgcgcacaggtaaggccaggcaaggcgggagccactcaacatctccgcttcatttccttggctcttcccctgccatcctcgtcctgctacctgggactccgggatgtgccctttcgaccctttcctaacatctttgctcctttccgcgtacttgaaaccccatggctcaacctcttctgttctatccctcttcagctctcccagctggacctcagcttttccaatcccaaatcctcctctacttgttggatttttccttggagtctgtctctcctacccagagcatttccttctcagcctgctccctctcctcctaggctaggtcctctctccagttctcccgccttctctgccccccggtctaggtctctcccgctgactggttagcctgcatcaccactagctcccctcagtctcatctctctctcaggctctctactcctttcagccttggtcctctgccctcccgtctgggtgtctgagttgtggggaattgaagtgcttcctattgctatcctcctgccaaacaggtgaagtgcttcctgggcacagagatgacccggaggtgtcactagccctagtctccacacactaacacagctgacccgctgggccctctttcctacatcactgcagccccactggggccaacctctggtactgggtgggaataggcaataggcataggcaggcaggtttggagtacagaaaaggagaagctgcaggagcctgtgactggtatttgtgccactcctactccctacctgttcttccaaccttttcctctagaagctgagagaagagggtggcaataagtacttttgcctcattctgaagccttggaagtaagtacactttccctaggggtcctgtggaggatgagaaaagggaagctggaaaggccaggacttttgcctacctcaacaagggaccaagttcagtgaaagaagggttggcatccttgattgggcagcagatttatcagaagagctgtggcttcagggctgctcacctccccacccccaccctgcatctttccccagggctgggaaggatgcctaccagggacaaaaggagatgtgggaactggagccctaagcttgctagctgtcagaaggactggtgccacttgatgcccaggactcatgccaaggactgctgccctgttcccagccccttgcttgatggggaggccatttggcccatctggccaggagaggcagcagagggtgaggtctggcttttttatcttgtctccactccagggagctgtcaccatgcctcactcgtacccagccctttctgctgagcagaagaaggagttgtctgacattgccctgcggattgtagccccgggcaaaggcattctggctgcggatgagtctgtaggtaagtggacatctgtagccaggtagggtacaggtggctaggggaccctggggatgttctcactgcctctctttgtttgcccctaggcagcatggccaagcggctgagccaaattggggtggaaaacacagaggagaaccgccggctgtaccgccaggtcctgttcagtgctgatgaccgtgtgaaaaagtgcattggaggcgtcattttcttccatgagaccctctaccagaaagatgataatggtgttcccttcgtccgaaccatccaggataagggcatcgtcgtgggcatcaaggtgcagcccctggccctgctctgaatggaagctgggtgtgaaaataagcttgtgtaggaggggtagcaaggagaatcctgcctggattcaaccctctgcttgtacttcctctacaggttgacaagggtgtggtgcctctagctgggactgatggagaaaccaccactcaaggtataggatgggtgggcttgaggaccaaagaggtgttagatagttgatgctggtaaaagaggggcagagtaatgaggttggcactgtgcttgcagggctggatgggctctcagaacgctgtgcccaatacaagaaggatggtgctgactttgccaagtggcgctgtgtgctgaaaatcagtgagcgtacaccctctgcacttgccattctggagaacgccaacgtgctggcccgttatgccagtatctgccagcaggtgtgtgtgttgggagggtggtgagctaggtgccctgtatgcctggtggggagagagtcacaaggctttcttcatctcccctactgcccctcccaagcatctctgctcttgcctgcagaatggcattgtgcctattgtggaacctgaaatattgcctgatggagaccacgacctcaaacgttgtcagtatgttacagagaaggtgagtccacacctgggcacacaaacatactgcagggacagctcggcaggagtgtctgttccccagaacccccagcttagatccaggcacactttcccctagcactttttcacttcatcccggcacaggcctgtgatctgagcctgtactgagccctcacagtctgtgcccatctacccctacatagggagcatcgagcagtaaccagtgggggcccagacccttagtaaacctcctctaatccccacccaggtcttggctgctgtgtacaaggccctgagtgaccatcatgtatacctggaggggaccctgctcaagcccaacatggtgaccccgggccatgcctgtcccatcaagtataccccagaggagattgccatggcaactgtcactgccctgcgtcgcactgtgcccccagctgtcccaggtactacccagctccctaacctgctcctatccctaaggcccatcttcaggtccttcttgtggccttcaggggttccctatcctggaaaaattgggagtgaccagtcagtttgtcttctctcctccacactaggagtgaccttcctgtctgggggtcagagcgaagaagaggcatcattcaacctcaatgccatcaaccgctgcccccttccccgaccctgggcgcttaccttctcctatgggcgtgccctgcaagcctctgcactcaatgcctggcgagggcaacgggacaatgctggggctgccactgaggagttcatcaagcgggctgaggttgggagctacaggtggtggtgggtgggggcagcacccagaggctatagcctgggcagggcttggcacctgtgggctggctcagcctgcttactccacgctcccttttgcaggtgaatgggcttgcagcccagggcaagtatgaaggcagtggagaagatggtggagcagcagcacagtcactctacattgccaaccatgcctactgagtatccactccataccacagcccttggcccagccatctgcacccacttttgcttgtagtcatggccagggccaaatagctatgcagagcagagatgccttcacctggcaccaacttgtcttcctttctctcttcccttcccctctctcattgctgcacctgggaccataggatgggaggatagggagcccctcatgactgagggcagaagaaattgctagaagtcagaacaggatggctgggtctccccctacctcttccagctcccacaattttcccatgatgaggtagcttctccctgggctctccttcttgcctgccctgtctcctgggatcagagggtagtacagaagccctgactcatgccttgagtacataccatacagcaaataaatggtagcaaaacattcta

SEQ ID NO: 1159 - DNA, 7524 bp, Homo sapiens
gcaccccgccttgtagtgacctgtcggcacgtgtcccctcgggaagcagccagggtcctggtgcgctccaccacccccaagtaagcccgcagggctgacgccacttcatccctttccaggtctcagatctgggtccagccctaatactcttgagtattgtgcaggcctttcttgtgtcacgcggatgctttgggcgtgtagtgggtagagacctggaaccctcccctcatcctttatacccagaacccctgtggggagaatctggggcaaggtgtcaagctcgaagcagctctggatttgggtactgtgggacaccctgaatccggaacagggcatctttgagctcccctcaaaggctgagtttcttctgggcagcttcactgtctgatagccctgcacgccatacccctcggttctctggccctttgaacagagattccctaaccctgctgcttctcctctgaaagtgataaggtcccagaggcccaggatggtgctctcctggggtaaggagatgggtatgttaattttatccatcttttagtgcttagccagagcttcccgtctgagtgaaacgtgagtttctacgtaatcagaaggtaggggggtggcccacgcagctgtacatggttcagcccagccttgcagcccaggcttttccaaatctcttcctgaatccccaagcttagccaggtgtgggtaacactgcccagttttgccataggtgtccccactgtggcctataggacagccatgactttatagggaagactgatgatgaaggtttgcctatggtgtgtggcccccaccagattccttccactccccccacatgccccttgctcctaaggagactgccaggtctgttggaagctacccctgcagagtgtgtagtaggacgcccctgtctgatcccgggcaagtcacttaacctgtctaagctgcctccccgggagttgacgctgaatgtcgtggaacggagcctgtcacgtcgtgtgctacagaagtgttagcgtgtacgtaaatagggacccagaggagtgaaaccatgtcatatctgacccaccaactgacgggattgttgtgggtatcaacgaggcagtgaaggaaagtgttgtgtttgccttggctcctcccactttgtttggtgttgggaatgttactgagcgtctctgggcctcagttataccacctaaaatggagataatgccagtgcctagtttatagggtcgtgaagactaaataaagtgatgtccacaaaacactaacaccaaacctggcccacagtgctcactaagtgtcaggttgattattcaggtacaggaagctttagagaagtagcacagtttgtcaaccacctttggagataccacagaatggttacatgacttgcccagagttgcctgctggtcgattcagggctgatacccagatcttctgacttttactgtcactctcagctccttgatttctcccaagtactgaggagtcagaaagctagcctgtcatttgtttcccttgctcccaggagtgtggccatctggggccgtgtggtatttgccactcaggagacatgtccctatgacatagcagtggtgagcctggaggaggacctggatgatgtccccatccctgtgcccgctgagcacttccatgaaggtaaaggacgaagggcgcagcctgaaggagggcccctctgagctagggtgggcctcaggaaggagaatcagtgttgggcattctcatgaagtcagggtagcattggtcaaggtccttggaggcctgcctccctttttgtgctggtggggcacatggagtgccctgggaaggataatgctgcacgccctttccccgagtgcctgcagcaatgtagtgtgaggatgctgggcctttggggttccttaacacttcaggctggtcagagaggcatgtggcactttcaaggctccaggggcacgatttgggtaaaaggctttgtgatgctgccacataagtactgatgttgcactccatggaggcagtgtgatacagtgatgaagggtccaggggctctggatgggcatctttcctatgccacctattagtcccatgtccttggacaggctagttaactatcctctgcctcattttccacgtctttgaaatggggctaatgcatcctatttctgggtgttgtgagggctgggtgtgacgttgcctgtaaagcacttacccccataccctgcacttggaaaaggaaggtcatggctgcattatagccatcatcaccatttcttttcacgaagagacttcttaggagttccaggaggagatgggtgtgaattccacaaacatttattgagcatgtaggtaggtgttaggaactcctaaaagtcactgccccgcctgtccagggaacaaggactagggaacagcctgttgctcagaagtggtcatgcagatacagtgctaggagctcagtggagttctcagcctcttccagccaggggacatggggaaggctctctggaggcaggagtatctgagcagaaacttgaagggtggagaggtttggaatgtttggagagggtagggatgggagttagggagtgtgagtcctgctgtaacacaggtgtccccagcttcaccctccttccttccctggcaggcgaggctgtgagtgtggtgggctttggcgtctttggccagtcttgcgggccctcggtgacctcaggcatcctttcggctgtggtgcaggtgaatggcacgcccgtaatgctgcagaccacgtgtgctgtgcacagcggctccagtgggggacccctcttctccaaccactcaggaaacctccttggtaaccagctctttggccccctcccgccctcccacttgccagaacctcagtcccaccccatgagtgcttgtggccagccccagtgcaccctctgtctgggaaaatggtgggcattatgagtgagctagcgaaggtttgcaggctgttctcctgatggtggagagggacggatgctggactgggaggaaagagatctgggctctggtcccttctctgctactaatctaatctggtttgatctgtgaaattgaggagttggattagtcaaagcgtcacagactcaaaagccaacagaggctggaaagataaagcaaatgaatgagaagacaacagggaggggaggggaggggtctaaactgaagcgcactcgactcagctgctgcagactgtggccatgaaggaggatgggcctaacgttggctggtattctaatattttcacaagacatgtaaagcttttttaaaaaaatacatgtggccgttaaatcgatcaatttttaaattttggtaacattcaggtttttaaaaaacagtctgtttagctgtcaaaaagaaaaaaacatgagttcatctagaaacctccaactccagtccagtctaactctccttgtttcttctttctcctgtagtgaaaaaccttgctcttgttgtctacaatatgtttacttatctgttccatcctagtatacaagtaaaattgtatttgcataactttagtatatttcctctaaatatttagtacttacaaagaggaaatattggagccgtaagtaatatttagagccataagtctaggcctggtgtggtagctcgtgccagtaatcccaacacttccggaggctgaggcaagaggatcacttgaaatgggagttcgagaccagcctgggcaacatagtgagactctgcctctatttttatttaaaaaaattttttttaattaaaaaaaaagaaaggaaaatactaagtctaccttggagaggcctggcagataccacctcagccaagtgatcaaggtgaacgtcagaagtactccatacagacatcagatagctgagacactgggaaggacacatggcttttatggtattcttcccaataatgtgtaaccttaaacaattaaaagtaatggcaaaacaattaaaagtaatgacaaaaaccgcattcatttttgcaccaacccaatagtcatgagaaaacattaggtaggcctcaattgagggtcattctctaaaatcactgacctgagccagacatggtggtatgtgcctgtagtcctggctctgcaggaatctgaagtgggaagatcacttgagcccaggagttcaaggctgcagtgaactatggtcaccattacactttagcctgtgtgacagagcgagacccatctcaaaaaaataaacagtgtttatttaaaaaaaaaaaaaaaaaagccaggtatggtggctcgcacttgtaattctagcacttttggaggccagggcgggaggattgcttgagtctgggagttcaagaccaagctggacaaccatagtgaggccccatctctacaaaatattttagggaggctgaggcgggagaatcacttgagcccaggaggttgaggttgcagtgagctataatcccaccactgcactctagcatgggtgacagagcgagaccttgcctctaaaaaaacaaaaacaagaacaaaaaaaaaaactgtaaataaataaaataacctgcacttttaaaaatgtcaaggccacgaaagataaggaaagactgaggaactgacccagattggaggagatttgggagatgcgacaactaaatggaatatggagtcctagactggatattggaactgaaaaaggacattagtggaaaaactagtgcaactcatgtcaatgagttctgtagttcacttaataacagtattctaccaaggtatatgttttggttttgataaatattttttggtgacattagatacgaacataaaggaaagctggtcaaagggtatatagaattctgcaatatttaggcaagacttctgtatgtctgaaattatctttaaaaaactacacacacatccatgcaccgagcaggccaaacaaaatatgtctgtgggtctgattcattcattcattcattcattcattcattcattcattcattcattcaacaagcctttgttgcgcgcctacttggcacaaggcactgtttcaggtactggggagactgcatgaacaaaacctcaaagtcctgcccttatggagctgacactaggtcgagagaaagataacaagtgaaataagtgaactatctagtgtgttagattttgagagtgttaaggagaaaacgtaaagccaggaaagggtgtgggcagcaggtgttcatgtctagaagctcagcgtctgtcaccacgtggggtggtatccagccctaccaggccctgggggctccagggtggagatggtcctcctcccttctccagcctttctgccccctggctcacatcctcttttgctctctgactcctcaacaggcataatcaccagcaacacccgggacaataatacgggggccacctacccccacctgaacttcagcattcccatcacggtgctccagccggccctgcagcagtacagccagacccaagacctaggtggcctccgtgagctggaccgcgctgctgagccagtcagggtggtgtggcggttgcagcggcccctggcagaggccccgcggagcaagctctgaggctgtgttaccacctttggaaagaagagtgacctttttctgctgtaggaagtgatgttgaggtgacggtggcctcaggattcagggcccagcccctgcaggggcccaggctgcctctcatctccacccactgactgcagactgggctttgggctctggggcaaacttctcttcagccccatggatccttaacctggcagcccgttttggggtgctttcttgagcccccagttctctgtcccctagcactagactcagctgtattgtttttccttctggggagcccactccaactgcacagaagttctgggcctgacaggtagattccagctggaaggcaggcccgtgcctggttttgcgtctgttcccctgagggccatcgtcatcctggagcttcaatggggccttggctcctgtctgcctctcagtcagagtcagggctgacaaaggactcagcttccttagcatctcagcagaaaccttgctctgaagaccagagacagaagggacagaaacaggagtgcctcctgctgtgccaggcccatgggcagtgcaggcagatccctgaaggtcagcactcctgggtcttcatatgccaacaggggcgctcttgacactgtgccttcattttccagcccacagcctgggtctcagggatcttgaggggtagaacatgtctggttggggcttgggaataaacatgatctattgaaaaacctctgtatttatatatcaaattgtttctttttttcaggagttgaactgggaataggcaagtaccaggcaaagaaacacaccctttccttttttttttttttttttctttagagctgtggtcttgctctctcacccaggctggagtgcagtgttgcgatcacagctcactgcagcctcaaactcctgggctccaggagacctcctgcctcagcctcctgaatagctgggactacagtcgcgcaccaccacgcctggctaattttttatttttgtagaaatggggtattgctttgttgcccgtgctggcttcagccttctggtttcaagcagtcctcctgcctcagcttcccaaagtgctgggattacaggtgtgagccactgtgcccaacccagaaatacaccctttctgtgctgttttctcagcagggtgtgagctcacgggatacggtcctgccagactggccctcatagctggtcatgtgccagtcagagctgggtggggcttgcaggtcccggaaggtggtggtcttgacctggcagcagatgcttaaagaatgcctaaggtgggtggcagttggggagttcaagggtgaatgaggccagggcagcccccaggagctgaggccaactctttgagtcaggactgtgccgtgtgcccagggccttgcatgtgtgggccctcgagtgatttctactggcaggctgaaagccctgtgaggggcggctgtgggcggaggccacgcaggaagagtgcttaggagtaacttgtttctaacacctgtgtgctgagtgccaatgctgggtgtggtgttatgatatatattggttttcatccagcattcctgactcgtaactctcatagtccttgttccagtctttgttagaatactgggtatgttagggcttgggacaggcctctgacctctgggtatcctttcactaatgttcgcccacctttttcacagtgggtcctaaagaccttcccatgagagggtctcaatcctaggggaaggaatgttgatgtcatgaaccttccataaaaacccaagaggacagggttcagagagcttctggatagctgaacacctggcacttcctggagtgtggcgtgcccagggagggcacggaagctctgcactccttccccttccctcattccttgctctatgtgcatctcttcatctgtatcctttgcgatatcctttataataaaccggtaaacataagtaa

SEQ ID NO: 1160 - DNA, 360 bp, Homo sapiens
cctggatgcctgtgtgaagggagacagcctcataaaccagtccactggcctggaactcatgccctagcaagaagtgcacttctgttgtatttgagccattacatttggaatctattggtcattgcagcagaacttaccttcattaatatagcctctccctagctgggaacactataccaaatcatgtgttgggggagagaggaagaaacgaggatattcctctcttctttgaagcttacaaatttcgttggaactacgtatggaaaaggagaacatttaccaggctcttcagatctaagagttgcctgttcttcgagtgggcatactgcctctgtttctctgggctcctgagatgaccca

SEQ ID NO: 1161 - DNA, 6265 bp, Homo sapiens
aaggagcgtccctgcttcacccccaacttggctggagaagaaaggacaagaggcagcagggtgaagaagaagccccccatcccagctggtggagatagttctggaactggaccccgcagctgcgtgggcagccgacacacccaccccagcactggcaccagaccagagccagagccaggacctgggcaaagtgcagccgtgcaccctgcctggtcactgctctcccagccctgcctgggcctacctcctgcccagctctgcttgggaccctctgggcatgcagcagcagtagcctaagggctctggtcacttccagggctctacagggcagcagagcagagcaaaagggtgcatatgctgggagctgtcacctccactcctaggcttttctgcctagagcagaattataggggcagtatacatccaggggtctgtgcggtggggctgggggattccttaagtgactttgggaaggatttgttttcccgagcatcaatttcacacctgggcattgcaccccaggctatgcagtctttcagtgtgaggaaggggcagaacaagaatgaggcggccccgtggcctcaaggaagcttgtggctttggaggatctgactccagcagagtctgtgccaatgtggggtgagcagggcccctgccatggagcagcaggaatttgagggatggagcaggttaaagaatgggaaacatcttcacttgtttttttttcttgcaaactactccctgctactcattgagactggttactggaagcaacttgttaagatttttctttctgggcgggcgcggtggctcacgcctgtaatcccagcactttgggaggccaaggcgggtggatcacctgaggtcaggagttcgagaccagcttagccaatatggtgaaaccccgtctctactaaaaatacaaaaattagccgggtgtggtggcatgtgccagctactcgggaggctgaggcaagagaatcacttgaacctcggaggctgaagttgcagtgagccaagattgagccattgctctccagcctgggtgacacagcaagactctgtctcaaaaaaaattttttatttctttcttttccatggaggcctagagtccctgtgaaggctaggaaggggctgctgatcccaggagtgcccacgaggagtggggggcactgttggcccataatcaggcaaacacccatcatttcatgggggattcatgaaatcatagtcaggcaaacacccgtcatttcatggctaagcatttgcagaaggtggaggattctcccccgagtccccaaatcagcagcctgtgctagggaccagagcaccgggggcaagaagacagaaccaatgtgggagtggggatggtcactaaatctgactgtgccacacaagcccatgatgaccttggcactggtttgggtggcaggatatgaaggaagctgtaggcattattgaaaaaatcattgttcagccaacagggtgaggctcccagcaaggccgtgccatcttcccacctccctgtgcccagagggttagactgtaagctcccggagggcgaggctggggctgagcgtgcctccacgtccccaaggcacagggtgcacagtgggtgctcactgaatatagtggactagtgagcagaggatgagaggactaccctgtaatgagccttggacagtctggcatttgccttaactcccactcccatgccctgggatcactgttggatatttactccatgaggacaaatactggggaggtgtggagaggagggagggcaggttcctcttactttcacccattgctgagaatgagcgcctgttggcactgcctttgtgagcctccgggagcaggtaacctgcggcccaagcccgcctaggactccacatcaggcaggcacaggactggccccttgtcctcataaaaactctcagtacagcttaaactctgtaagatctaaccagccaggaggaccctcgcttcctctccgccatgcttgccacctcttgcttctgagagtccatctcagttcgcagttctgtgacttgcattgacctggctccaatcaagctacaactcaagcagtcacggggagaaggattgtagatgggccagtgactcacagggtcaggcactcgggggagcctgagtcaggaggtcagtgggccctggaagggagggggcaagcctgggtgggtaaggttctgggccccaggcaagaaggcagagtttctccgcaggggtgtgtgcaagagctagctgcgcagaaggtctccgctggctctccaagccgggcttgtgaaataggaacgccaacatcctcctccacaggcagtggcaggcacctcctcctcaggtgccccccaagccctatctgatgggcaaaggtgaacgcagggcggtgggcttttcctgtgcagagggagactgattcaaagggtcatttatgacctttcacaagtcccacatcctgcccaatggccaggtcttgggatgctgttgcaagatggttctgtgactccatgtgactgtctgatgattgccccagctggggaaaaggctcccatgtctctttctcataaaaccagtgggcaaggccgggcgcagtggctcacgtctgtaatgccagcacttcgggagaccaaggtgggcggatcacctgaggtcaggagttcaagaccagcctgaccaacatggtgaaaccccgtctctacaaaaatatggaaattagctgggcatgacggcgggtgcctgtaaccccagctacttgggaggctgaggagggataatcagttgaacccaggaggtggaggttgcagtgagccgagatcgcgccactgcactccagcctgggtgacagagcaagactccatctcaaaaacaaacaaacaaaaaactagcgggtgaaatgattcagtgacctaaggacagccagagcactaagctgctgggaacccatctgtgctgaaatgtagatttcccaggaaactcaggcttgggacaggcgcctacctgctcctcgggcaccaggtgattaggagaggtcgaatctcatttccacgtgagtgaggataaagactgggctgccaaggaggactcctcataaacattgacaaattgctctgccccgcctgtgatcccagacgactcctgcagtctgggatcctgagtgtcctgtgggttcatctcggatgggcgctgcataaacagcctgcagggaacgtctgggagaaccagcttcacaacagatataataaggaagaagtttgaaatattgcaagaattgcgaaagtgtgacacacagatacaaagtgggcacatgctcgtgggaaaatgttgccaatagacttgcttgactctggagttaccccgaaccttcaatttgtttaaaaaaaaaaaaaggcaatatcttgacgtgcaataaagtgaactgcaataaaatggggtgtgcctgtacttgttttgagacagggtcttgctctgtctggagtgtagtggtgcaataatggctcactacagccttgagttcctgggctcaagccgtcctcccacctcagcctcctgactagctgggactacaggcgcacgctgccacgcccggctaatttttttattttttgtagagatgccctgaggtcttgctacattgcccatgctggtcttgaactcctgggctcaagcgatcctcccccacttcagcctcctaaaatgctggaattacaggtatgagccacctcgcccagcctgcctgtactttaaaaaaaaattccaggtttctaaagccattgtagagaggagctaacccagccaatgatgttgtttctgctagcttaacttcttgtctgagcctccttcgagtgtggatggatctctgggggctgagtgggagtgcctgcgtgtgtgtaggtgtgcatgtgcgtgtgtttgtgtgtccctgtgtaaccgtgtggctgtggctgcccttcagagagctgcccgggcatgcagtatcagggagaaggcagccacacaccgaggcttcccagtgagtaactagtttcacctggggttttcaaaggctctgatgaagccccgggcgcttaaagcagctgtaaggctcaataatggtttcaggatcgtgagaacggatctagagaacacgccccacacacgtggtgtcttgttacccgaggtccattggggggcagcagggagcaggggctcggcagctggtccaggaccaggcgcaggaatgaggggttccctgtcctgggggtgaggcctgaaggaagaagattccaggctgaatacgtgtccaccgctggttctgtcgtggagggggaaccagagagccccacatcttggtgttcgttatgttaggatttttcacgaacctcaggcagcacaggacaatgttaaagaagaatgaaccaggctgggcgtggcagctcacgcctgtaatcccagcacttcgggagactgaggtgggtggatcacgaggtcaggagtttgagcccagcctggccaatatggtgaaaccccatctctactaaaaatacaaaaattagctgggcgtggtggtgcgcgcctgtagtctcagctgctcgggaggctgagacaggagaatcgcttgaacccaggaggcagaggttgcagtgagctgagattatgccactgcactccagcctgggtgacagagcaagactctgtctcaaaacaaaacaaaacaaaacaaaacaaaacacgaacctttgtagacctcaaaaatcagaggcattctgggcgcggtggctcatgcctgtaatcccagaactttgggaggccgagagaggtggatcacttgaggtcaggaatttgagaccagcctggtcaacatggtgaaatcccatctctactaaaaatacaaaaattagctgggcaatgtggggggtgggtggtggcgcatggtggctcacacctgtaatcccagcactttgggaggtcgagacagccagatcacttgaggccaggagtttgaggccagcctggtcaacatggcgaaatcccagctgtaccaaaaatacaaaaattagctggacatggtggtgggtgtctgtagtcccagctatttgggaggctgaggcaggagaatcgcttgaacccagaggtagaggttgcagtgagccaagatcacgccactacactcccgcctgggcaacagagtgagactctgtctcacacacaaaaaaaaatcagaggcagatccaggtattgtaggaactaaattttgaggccctttgtaggagaactaatctaaaattacgaatatagacttctaagtatgaaaatgaatattcagaatgaaaataagtcatattaactagtggtgcttggagattcacatctcatccttttggcctctcttttcataggatgcttctggctggcacacctggcttcccctccatgctcagaactgcttcctactctacatccaggctcctgagcagcccccagcttaagcttcagcagctccagggtaaatccatctccgcccagagctgactccggatctgccccagtgacaataacaagataaatgccttccattctcttcgtacttacaggatgtaatccacatatttacacagtgtttcatttgcggtaatgtttgttttgtttcttgttccttcgtacctatctgggaagcctgtgcaattcagatgtccaggcccacttccagaagttctcattccctgtgcttgagtcaatggccgcagaccatacacctgagagcaagttaatctgctctaacaaagatatcacatctaagaatggtggttggcaggggctggggggtgggaagaatggggagttggtgcttcatgggtacagagattcagttttgcaagaggaaaagagctctggagatggatgctgctgatggctacaccgcaatgtgaatgtgcatgatgcttaaatatggttaagatgggccgggcgcggtggctcacgcctgtaatcccagcactttgggaggccgaggcgggcagatcacgaggtcaggagatcgagaccatcttggctaacacggtgaaaccccatctctactataaatacaaaaaattagccgggcgtgggggcgggcacctgtggtcccagctactcgggaggctgaggcaggagaatggcatgaacctgggaggtggagcttgcagtgagccgagatcacgccactgcactccaggctgggcgacagagcgagactccgtctcaaaaaaaaaaaaaaaaaaaaaatggt

SEQ ID NO: 1162 - DNA, 5629 bp, Homo sapiens
aaggagcgtccctgcttcacccccaacttggctggagaagaaaggacaagaggcagcagggtgaagaagaagccccccatcccagctggtggagatagttctggaactggaccccgcagctgcgtgggcagccgacacacccaccccagcactggcaccagaccagagccagagccaggacctgggcaaagtgcagccgtgcaccctgcctggtcactgctctcccagccctgcctgggcctacctcctgcccagctctgcttgggaccctctgggcatgcagcagcagtagcctaagggctctggtcacttccagggctctacagggcagcagagcagagcaaaagggtgcatatgctgggagctgtcacctccactcctaggcttttctgcctagagcagaattataggggcagtatacatccaggggtctgtgcggtggggctgggggattccttaagtgactttgggaaggatttgttttcccgagcatcaatttcacacctgggcattgcaccccaggctatgcagtctttcagtgtgaggaaggggcagaacaagaatgaggcggccccgtggcctcaaggaagcttgtggctttggaggatctgactccagcagagtctgtgccaatgtggggtgagcagggcccctgccatggagcagcaggaatttgagggatggagcaggttaaagaatgggaaacatcttcacttgtttttttttcttgcaaactactccctgctactcattgagactggttactggaagcaacttgttaagatttttctttctgggcgggcgcggtggctcacgcctgtaatcccagcactttgggaggccaaggcgggtggatcacctgaggtcaggagttcgagaccagcttagccaatatggtgaaaccccgtctctactaaaaatacaaaaattagccgggtgtggtggcatgtgccagctactcgggaggctgaggcaagagaatcacttgaacctcggaggctgaagttgcagtgagccaagattgagccattgctctccagcctgggtgacacagcaagactctgtctcaaaaaaaattttttatttctttcttttccatggaggcctagagtccctgtgaaggctaggaaggggctgctgatcccaggagtgcccacgaggagtggggggcactgttggcccataatcaggcaaacacccatcatttcatgggggattcatgaaatcatagtcaggcaaacacccgtcatttcatggctaagcatttgcagaaggtggaggattctcccccgagtccccaaatcagcagcctgtgctagggaccagagcaccgggggcaagaagacagaaccaatgtgggagtggggatggtcactaaatctgactgtgccacacaagcccatgatgaccttggcactggtttgggtggcaggatatgaaggaagctgtaggcattattgaaaaaatcattgttcagccaacagggtgaggctcccagcaaggccgtgccatcttcccacctccctgtgcccagagggttagactgtaagctcccggagggcgaggctggggctgagcgtgcctccacgtccccaaggcacagggtgcacagtgggtgctcactgaatatagtggactagtgagcagaggatgagaggactaccctgtaatgagccttggacagtctggcatttgccttaactcccactcccatgccctgggatcactgttggatatttactccatgaggacaaatactggggaggtgtggagaggagggagggcaggttcctcttactttcacccattgctgagaatgagcgcctgttggcactgcctttgtgagcctccgggagcaggtaacctgcggcccaagcccgcctaggactccacatcaggcaggcacaggactggccccttgtcctcataaaaactctcagtacagcttaaactctgtaagatctaaccagccaggaggaccctcgcttcctctccgccatgcttgccacctcttgcttctgagagtccatctcagttcgcagttctgtgacttgcattgacctggctccaatcaagctacaactcaagcagtcacggggagaaggattgtagatgggccagtgactcacagggtcaggcactcgggggagcctgagtcaggaggtcagtgggccctggaagggagggggcaagcctgggtgggtaaggttctgggccccaggcaagaaggcagagtttctccgcaggggtgtgtgcaagagctagctgcgcagaaggtctccgctggctctccaagccgggcttgtgaaataggaacgccaacatcctcctccacaggcagtggcaggcacctcctcctcaggtgccccccaagccctatctgatgggcaaaggtgaacgcagggcggtgggcttttcctgtgcagagggagactgattcaaagggtcatttatgacctttcacaagtcccacatcctgcccaatggccaggtcttgggatgctgttgcaagatggttctgtgactccatgtgactgtctgatgattgccccagctggggaaaaggctcccatgtctctttctcataaaaccagtgggcaaggccgggcgcagtggctcacgtctgtaatgccagcacttcgggagaccaaggtgggcggatcacctgaggtcaggagttcaagaccagcctgaccaacatggtgaaaccccgtctctacaaaaatatggaaattagctgggcatgacggcgggtgcctgtaaccccagctacttgggaggctgaggagggataatcagttgaacccaggaggtggaggttgcagtgagccgagatcgcgccactgcactccagcctgggtgacagagcaagactccatctcaaaaacaaacaaacaaaaaactagcgggtgaaatgattcagtgacctaaggacagccagagcactaagctgctgggaacccatctgtgctgaaatgtagatttcccaggaaactcaggcttgggacaggcgcctacctgctcctcgggcaccaggtgattaggagaggtcgaatctcatttccacgtgagtgaggataaagactgggctgccaaggaggactcctcataaacattgacaaattgctctgccccgcctgtgatcccagacgactcctgcagtctgggatcctgagtgtcctgtgggttcatctcggatgggcgctgcataaacagcctgcagggaacgtctgggagaaccagcttcacaacagatataataaggaagaagtttgaaatattgcaagaattgcgaaagtgtgacacacagatacaaagtgggcacatgctcgtgggaaaatgttgccaatagacttgcttgactctggagttaccccgaaccttcaatttgtttaaaaaaaaaaaaaggcaatatcttgacgtgcaataaagtgaactgcaataaaatggggtgtgcctgtacttgttttgagacagggtcttgctctgtctggagtgtagtggtgcaataatggctcactacagccttgagttcctgggctcaagccgtcctcccacctcagcctcctgactagctgggactacaggcgcacgctgccacgcccggctaatttttttattttttgtagagatgccctgaggtcttgctacattgcccatgctggtcttgaactcctgggctcaagcgatcctcccccacttcagcctcctaaaatgctggaattacaggtatgagccacctcgcccagcctgcctgtactttaaaaaaaaattccaggtttctaaagccattgtagagaggagctaacccagccaatgatgttgtttctgctagcttaacttcttgtctgagcctccttcgagtgtggatggatctctgggggctgagtgggagtgcctgcgtgtgtgtaggtgtgcatgtgcgtgtgtttgtgtgtccctgtgtaaccgtgtggctgtggctgcccttcagagagctgcccgggcatgcagtatcagggagaaggcagccacacaccgaggcttcccagtgagtaactagtttcacctggggttttcaaaggctctgatgaagccccgggcgcttaaagcagctgtaaggctcaataatggtttcaggatcgtgagaacggatctagagaacacgccccacacacgtggtgtcttgttacccgaggtccattggggggcagcagggagcaggggctcggcagctggtccaggaccaggcgcaggaatgaggggttccctgtcctgggggtgaggcctgaaggaagaagattccaggctgaatacgtgtccaccgctggttctgtcgtggagggggaaccagagagccccacatcttggtgttcgttatgttaggatttttcacgaacctcaggcagcacaggacaatgttaaagaagaatgaaccaggctgggcgtggcagctcacgcctgtaatcccagcacttcgggagactgaggtgggtggatcacgaggtcaggagtttgagcccagcctggccaatatggtgaaaccccatctctactaaaaatacaaaaattagctgggcgtggtggtgcgcgcctgtagtctcagctgctcgggaggctgagacaggagaatcgcttgaacccaggaggcagaggttgcagtgagctgagattatgccactgcactccagcctgggtgacagagcaagactctgtctcaaaacaaaacaaaacaaaacaaaacaaaacacgaacctttgtagacctcaaaaatcagaggcattctgggcgcggtggctcatgcctgtaatcccagaactttgggaggccgagagaggtggatcacttgaggtcaggaatttgagaccagcctggtcaacatggtgaaatcccatctctactaaaaatacaaaaattagctgggcaatgtggggggtgggtggtggcgcatggtggctcacacctgtaatcccagcactttgggaggtcgagacagccagatcacttgaggccaggagtttgaggccagcctggtcaacatggcgaaatcccagctgtaccaaaaatacaaaaattagctggacatggtggtgggtgtctgtagtcccagctatttgggaggctgaggcaggagaatcgcttgaacccagaggtagaggttgcagtgagccaagatcacgccactacactcccgcctgggcaacagagtgagactctgtctcacacacaaaaaaaaatcagaggcagatccaggtattgtaggaactaaattttgaggccctttgtaggagaactaatctaaaattacgaatatagacttctaagtatgaaaatgaatattcagaatgaaaataagtcatattaactagtggtgcttggagattcacatctcatccttttggcctctcttttcataggatgcttctggctggcacacctggcttcccctccatgctcagaactgcttcctactctacatccaggctcctgagcagcccccagcttaagcttcagcagctccagggtaaatccatctccgcccagagctgactccggatctgccccagtgacaataacaagataaatgccttccattctcttcgtacttacaggatgtaatccacatatttacacagtgtttcatttgcgg

SEQ ID NO: 1163 - DNA, 198 bp, Homo sapiens
caacctccacctcctgggttcaagagattctcctgcctcagcctcctgagtagctgggattacaggcacccactatcacacccggctaatttttgtatttttattagagttggggtttcaccatattggccaggctggtctcaaactcctgacctcaggtgatccacccacctcagcctcccaaagtgctgggattac

SEQ ID NO: 1164 - DNA, 313 bp, Homo sapiens
aagatgggccgggcgcggtggctcacgcctgtaatcccagcactttgggaggccgaggcgggcagatcacgaggtcaggagatcgagaccatcttggctaacacggtgaaaccccatctctactataaatacaaaaaattagccgggcgtgggggcgggcacctgtggtcccagctactcgggaggctgaggcaggagaatggcatgaacctgggaggtggagcttgcagtgagccgagatcacgccactgcactccaggctgggcgacagagcgagactccgtctcaaaaaaaaaaaaaaaaaaaaaatggt

SEQ ID NO: 1165 - DNA, 372 bp, Homo sapiens
caccaaggtgccacctggccagcctgcatggaccagcttgcccatgtggctgcaagtcccaaggaacagctggtcacctccatccccacagggaaagagggaaccgtcatggctgcactgcctgaagggccaaaggtcagcctctcctagaaacacagttcctttatctgaggagacagctgtctctctcctaccctctgtatgcttcttggcaacctcaagtgccagccactttgtgtatggagacaccttgcttctgctgtcttctcaattcaggtggcagtgtgcaccaccccacccaccacgaagtgagctgtggcaccttgttacaggactggccctagtgctgggggctgagggccatccccaagg

SEQ ID NO: 1166 - DNA, 372 bp, Homo sapiens; identical to SEQ ID NO: 1165

SEQ ID NO: 1167 - DNA, 164 bp, Homo sapiens
ccattttgctggtgccacttgatgacgctgaggagtaattaccagtgattaattacttacacggcctgcgtgtttttattccagtccaattaaaatgcagtgcacaactctcagtgctagggcctgccgcctcctgggtccctctcctgcaaatcccagtctgc

SEQ ID NO: 1168 - DNA, 164 bp, Homo sapiens; identical to SEQ ID NO: 1167

SEQ ID NO: 1169 - DNA, 616 bp, Homo sapiens
  SITE (376): n equals a,t,g, or c
gtgatcgtagctcactgcagccttgacttcctgggctgaactgatccttccacctcagcctcctgagtagctgggactacaggtgtgtgccaccatgcccagctaattttgagttgttttgtagaaacaaagtcccaggctggtcttgaactcctgggctcaagcatttctcctacctcggccttccaagggctaggattacaggcatgagccactgtgcttggtccagatgtattactttttatgtttggtattattctgccaaaccaatcatgttattggttttaatcattgaatcattggatctttaaataggagtgagtatataataataaggctcttctgttgtcaacatctgtgctgggtcatgcattancattgattactacaatgattctgtggggtaagtgttgtcctcatagacaagaaagctgaggtttacaggttaaaatgacacattgggggtaaataacagacactatatgtggggagttgggaatcagatccaagtttgactccaaaccccacttttaccacatggcttttgatctaaacttctattttggtaaaaaacccctgacggctagagcatccctatcagggaagcgctcatgaa

SEQ ID NO: 1170 - DNA, 635 bp, Homo sapiens
  SITE (40): n equals a,t,g, or c
  SITE (62): n equals a,t,g, or c
gtgatcgtagctcactgcagcttgacttctggggctgaantgatccttccacttcagcctcntgagtagctgggactacaggtgtgtgccaccatgcccagctaatttttaattgttttgtagaaacaaagtccaggctggtcttgaactcctgggctcaagcatttctcctacctcggccttccaagggctaggattacaggcatgagccactgtgcttggtccagatgtattactttttatgtttggtattattctgccaaaccaatcatgttattgtttttaatcattgaatcattggatctttaaataggagtgagtatataataataaggctcttctgttttcaacatctgtgctgggtcatgcattagcattaattactacaatgattctgtggggtaagtgttgtcctcatagacaagaaagctgaggtttagaggttaaaatgacacattgggggtaaataacagacactatatgttggagttgggaatcagatccaagtttgactccaaacccacttttaccacattgcttttgatctaaacttctattttgctaaaatacccctcacagctagtcatccatatcattgaagcgctcatgatttgatagattaacctttcattttt

SEQ ID NO: 1171 - DNA, 2528 bp, Homo sapiens
gaaaataggggatggatgagtgggaagggcatgggatattcctggcaagatctctgatttcataatacttttttgggctcatgtagtggaattaaatatacctcttacttcaggaacaaagttaacaaatatgtttgatgatccagccgactttgacactgttatctccgtaatagctttaccattaggctaggatgtaaaatgtacatttatcagttgataagtacctattgagcaccagttgtatttccaactttgagctatttgaatcttctttgaataaggaagttagccttttaactagaaagcctaagagttctggcacatttatttcttcttttgttgaaatttattcacctagataaaggcagcagtttgggactcagatctttattttatcccaccttcttgtcttctgtattccactcttcttatgttctttcccttcatctgtttccttggcctggccagagcagcagtgctgatcttcatttgggaaaggatgttcctgggtattaccaattagtatacagataagtaaagactagttttccagatctaatacttttttttgaagtggttttgctctgtcatttaggctagagtgtagtgaagtgatcgtagctcactgcagccttgacttcctgggctgaactgatccttccacctcagcctcctgagtagctgggactacaggtgtgtgccaccatgcccagctaatttttaattgttttgtagaaacaaagtccaggctggtcttgaactcctgggctcaagcatttctcctacctcggccttccaagggctaggattacaggcatgagccactgtgcttggtccagatgtattactttttatgtttggtattattctgccaaaccaatcatgttattgtttttaatcattgaatcattggatctttaaataggagtgagtatataataataaggctcttctgttttcaacatctgtgctgggtcatgcattagcattaattactacaatgattctgtggggtaagtgttgtcctcatagacaagaaagctgaggtttagaggttaaaatgacacattgggggtaaataacagacactatatgttggagttgggaatcagatccaagtttgactccaaacccacttttaccacattgcttttgatctaaacttctattttgctaaaatacccctcacagctagtcatccatatcattgaagcgctcatgatttgatagattaacctttcatttttttaggtgactctagttagaaagtcttatttcacaatctgattgtttctttaacttaggatccaaacatgtccaaaataatgcagagtacatatgcaatcactcgtttatgctgtctagtcatgcacttaaagcaattttcaaatgtactcaaagtctctaggcttcggtacccagggttgcttcaagtatttgttcatgacacgtcaactcgatgattaaaatccttcaacacttctcattcacaataagaataaaatctacatcccttaccattcagtatgcaaaacttaaaatacataactttacccttaaatattttttctttctctgacttcataagtataggttatacctctataagaaagaaggtaaaaaactctcaacaatcccttctttcagagagaactactgttaacattttaacagacaacttcattcttttcctattcttttttataatgcttacaggaatgttaaatacttagacagatcttaagtacactagaattatctgtccctgaaataagttaggttgccctgccgcagaatttgtatctatagtttatttggattatttttgaaaaaagtaaaataacaatacccttacgaattttttggtgcatagcatctcagcttcttttatcattaaagatgtatgtataaaaaaaaaatgagtgtatatcaagttgttcatttcttagtttctggggtcttcttaaccagtacatagaactctttatgaattaactttagcttatgttggaagtagtagtttgtttatagtgtcatggattttaaaatcaaactcagtttttatttcttcactaaaacctattttcatatgatatacatgttaaatttcccttttattttggtcatgcatcaaaataaatttactaagtactaaagagccaacattattttataagtgcctggcaataggtattcactagttgaatagtttaatttgaaatgaattaattttaaatgggagttgttcaaaactatgccactttttcttttgtcctttgtgttattaaaatttaattgataattgtgtatattatatatatggagtacaatgtgatgttttgatatatgtttacagtgtagaatgattaaatcaatgtaataaatttattgcctcataccattttttgtggtaaaaaaaccacttaaaatctactcttaatatttttgaaatgtacaatgcattatttattatactcaccattctgtgtaatagatcagtaaagtttattcctcttgtctaactg

SEQ ID NO: 1172 - DNA, 842 bp, Homo sapiens
tctctgcaatgactgtaatggacgatccactgttcagtttcatatattaggcatgaaatgtaagatttgtgaatcctataatactgctcaagctggaggacgtagaatttcactggatcagcaatgacgagcctacacagtactggagaacttggcattttctgatatagaaaaaggctttccttggtatcgtgttatcatgtgtcgtcatctatgcattagagttgatgtgttttgtactagtgtcacagcataaaatcatattacaagtacgtaaggattcagggtctcttgatagacttatcatagctctatattgaatgaaagccactgtgcttgtgttttgattggaaattcctttagtgtcagttttttggaagccaatgatgtttgccactgatacattcatagaagtgtattatattttcatgaagctttgctttaagtgacactacgcgtgcagttcatttctagttcttgatagaactgcacttaattttcagtagtagtcttgactttttaagggctgtgttatattaagttctcccttactgttaaaacctaattaaatatgctttagaattttctaagacagtcctctggatcctctaaatgtgaattttgatgtaataactgctaataaaattatattgaaactgttttatagaaagttttttccaaagttttctatgtttggctcaattagggcagtatcatcagttctataatgtaaaagaaattttctttcttttgaggtattccataaaagtagttgggaaaattattatgtaaaataataagactcttccaaagccttaataaaaacatcaacattgaaaaca

SEQ ID NO: 1173 - DNA, 7683 bp, Homo sapiens
gaggtggatactgttcattggggcccttattgggtccagcatctgtggccaagaaaaattttttgggtaagttccttttggacttattatttggttatttcagaaatatgggagccaaatggaactgaaaatgaatggctgataatagctcacatggaggaagaagacctgggctcttgttccagctttgcccctgtgtcatcctggacaagtccactctcttctctgagaccccatttcatctgtgaaatcaggactagatgatcattgcagtctctccccagctccctcatctcctgccagttctttttctgcctagttcttacttataaggtcagttccaggcatctactttcttactcctaccttattaattactaagagttactggttactaagagctacgttattaattactaagagttactggttaccagaaatggtttgtttccaatttccgccatgcataaagggaaaccctgggtctcaagcttgttggtttcacttctttgttaatggcgaaggctttgcagagctggtgccttctcttgatctgcagtttaatgctctacccctgagctacaccctcttctgagctggtgctttcttactggcttctgggacgtggagatttcacaggtcttgcctagacacagctatgaaaatgacatgcagagacacatgcctgaacaccgtgtgtgtgtgcgcgtgtgtgtgtgcacacacacacgtgctcaacacgctccatgcagaatactttgaggtttgcaggggagaggacatttgggtggtaggagagataaaagggataccatggtgccctgttagaagactgaattataataactcattactgcataatactttaccatttgcaaagagctttcatgtacattatctttttgatcacacaacaactttgccaggcaggggtgttattttcttccacttaaacatgaaaaaaatcagccttagaatgttaaggaacgcgctcaaggccacttagctgggaagcaggggagctggaactctgaacgtaaaactcgtacccttttgctataacacaagttcatctccaaataaaatcctatatctcttggatctgtctcttagttttctttctattttactatctggctaatgagactttggggttgttttttgaggtaattacttatatgagattgactaagttttatgatgatgacttctgttcacacctgtgtctctgttgccaaatagctcagaggggttaggagtggcaggtggccagggaagattttcccacaggcggctcagcagtaggtgtgtagtgactagacttgctgccgtgtgggctgacgcatggaactgtcaggctcccactgcagctattcatgtggctgaaaaatctctatttcgcaagatacagacctctcttgcaatgtggtgggcacctgggctgcgacagctgggccaggccctagaatgctctctgcaggaattttgcacagaaaaagctgtgtgcctgagctgactgcagatggtttgaactgatagtgtcattctcatccccaaatccattctcacgccatagtaggaaacctagcaaaggtagtggaattcttcctgggctctctagaggtgtcccagacacccagcttttagagcaaggggaacatttagagcaaggggaagctggcctctgagcattcaagtggttgggaagccaggctctggattggctgctgaagatgaggatgatggtttctccccaccacccaccacccattcccctcccttccatctgcctcacctatctccccagtctctcttgctctactggagtcttctgccctggtcttcagagatcttcaggatgggacaatggccaggatgcctagaggcaccaggcaggcagagaacaggaaccagttgcagagctggttacagcatcaacagtagctggcaggcatctaagagttctatgaaaccatctcttaatattctttgtggtggctgctaagcctggctagggaggcagatgagaaaggcacaaaggacgggccacttggctgtcagcatggtgaaaggggagggatagatgctcagtcaccaaagtgggtattgactgtccaaagcacagactcctgtgagggtgagggagtgggagtgccagccattgcaatggcagcagctggacgccctgtctattggagaggatcaagttaagaggagctgtgagaacacctgtgtggagcaggaggggcagacatggccacctgtgaatcccaacacgtccccctcccaggccaatttccatcttcagaaagagctcaaggtctttgagtgaatttctggatagtggagataggatgtgctccaccatcttgagcctcatgaactgacgagggcatttttcaaatacagacaaggacagtgagggcaagaaaaaggctgcccttcgcattgcaccccgcaatgtcctccctcctttcaggtgttgctgtgcttctgttcataaggataatgctaccgctgggtgcagtggctcacacctgtaatcccagcactttgggaggctgaggcaggtggatcacctgaggtcgggagttcgagaccagcctgaccaacatagagaaaccccgcctctactaaaaatacaaaattagctgggcgtggaggtgcatgcctgcaatcccagctacttgggaggctgaggcaggagaatcacttgaaccccggaggcggagattgcagtgagctgagatcgtgctattgcactccagcctgggcaaggcaacaagagcaaaaactccatctgaaaaaaaaggataatgctacccactaccacaaccgccaatgttcagcactatctgaagactgttaggactttgcttcctctggtcaggaaaagcttcatgggtgatgtgagttggtcctaaagattagatgggactagatgggcctgacagatgagaaaaaggatggattgcaggcagtgggaacagcgtgtacaaaagcatacaaaagtacgcggtgagtttgggctgggtccgagatggggcagaagggagaggtgaagaagagacagatggaacgggcttcactcggcacccgctcttctgccctgccgctttgcatgctacagatattttgttgacctctgtagcttggctgattagagcaggatgaaatgggtttgtggatttaatcatcctcagggccagtcagagacacggtgtcccattgtcctgggactgcgcccaggaatgtctacaagttctgttgtgaagtcaccactttggaaaaactaaaacgcatgtgttgggtgaatgcgtaacatgattttcatactcaaagagcttcttattcttatgtcctccttttttctcctcctgtcccttctttctccttttcctctttgtgattgctgtagccagtgctgcattttacacacgcttaactgtgctaataaatatgtcaccacacaagatctttctagcagctcccctcactttttttttttttttttttttttttgagacagggtcttgttctgtcaaccagactggagtgcggtgatgcaatcatagctcactgcagcttttgaactcctgggctcaagcaatcctcctgccttagcctcccaagtatagaatccccactttaaagataccccctctttggagtgttggaggtaggttatgatagagcgtgagttcagcggacgggcccttgtccccatccaggagtaaagatttcctttctgttttttaaatttatttatttttaattttagttttttgagatgggagtcttgctctattgcccaggttagagtgcagaggtgtgatcatagctcactgcagcgttgaactcctgggctccagcgatcctcctgcctcagcctcctgagtagctggcctacaggtgtgaaccaccacgcccagctaattgtttttcatttttttgtagaggcaaagtctcactattttgtccaggatgatcttgacctcctggcctcaagcaatcctctcaccttggtttcctgaagcactgggatcacaagtgtgagccacggtgcctggctccattctgtcttacatcggtccctttttttcaatggtgcttgccgaggtcagggaacgatcaggtttgatgcctcatcttcccagggcggtaggtccaactcttggcaagcctgttgggttcagactgagacctgcccacccagtggtatctcttcagggccctcggcagtgcccacagggtgcagttacccgctgacctccaggaccctttggggaccaggtgggttgggagaaagggaaccttcagcactgtcatctcctccagaccagccacctgcagcaggagtggctctgcagtggaccttgactccttaagtctggcctagacccactggagagcccctagaaccttccagaacccagcaaaaccctgaagagccatctggatgaaaccggttttctgatgaggagctgccccatgaggctgcacactcagctccctgtgacagccattcactctcaacaggtccttgagcccacagcggctctctttgcattcacttgtgtcaaagagatgacacagtgacaacatcgagtgaggattctttggagctgtcacctagcaacagcctaatggctcccatctcccccagccagctgagagcataaaggcagcatttcaggccctgctttctcccacccacacacaggacttcgggggccactacccctgccgccgctgcagaagctaaatcacgtatatgaagcaagctcaggacaaacgacaaaggggactgagactggccggccccgtctgtgtcctttaagggtcccctctcaccccgtagggaggagtggatcctacatccagcctcagcaccatgggccatagtcagtttccacccaaacgagcctctgtgtggggttctggagctggaagggactgagcgagcacccagcctcgcctgttttaagacggcacagctcaccctcccagcatggagatgctgttttctttccagcatggaggttccgtcagggtttcagtcctcagccctgacagtgaagaagtgcttctttatgtcttgagttagctttgcgtgtaactcaggcacattccttcctgtaaaatatatgtgtttttcattataaagtaatatgatcacattacagaaaacagatacaagggggaaaaaagtaagtcatccataatcccacgacccgaacataagggctgtcagcatttggtatatttccgctgtctgtttttcttccaatgcatctgctttttccatacttataatcatggcatacatacaattttgtgtcctgctctttcacttaatatttcccttaaagttatgccataagcactttttcatagttgccatgtagcctcatttttaatggccatacattaaaaccaaagactagaccatttcctttcttttggcctggttacgtctgggataggaggcttgggggtttctttgccagctgaaagctcatcattatcttttgctcttttttccttttcgcttcttccccagggaccaagttttgaggattaatgtcagaaatggagacgagatcagcaaattgagtcaactagtgaattcaaacaacttgaaggtacctggttctttttagctctcctgagtgttttctaactttgctgggagaagactcttgctctactggcattattatttttatttctgaggagtctctgaatataatcctgtgggagtccacttgccatttatacaattgagggggctgatgggagagagggagcacatcacagctgtggtgtcctgggagaggggatgcttgaacagtataggctccatccttctagctgccatccacttatgactcttggtctctgccagatactgcttgttgggcaggtccaaccagacacaattgtgaaatgggcaaactttgcccttgggcagagcctagcctctcagggatcaccctggcttttggcagtgttctagaagaataacctcattgtgcattttacctgaacggtcctttaacctggtttcatttctgttcccttcagctcaatttctggaaatctccctcctccttcaatcggcctgtggatgtcctggtcccatctgtcagtctgcaggcatttaaatccttcctgagatcccagggcttagagtacgcagtgacaattgaggacctgcaggtaggtagactatgcctcctgcctcctgctcttgcataggaccaggcagccagtccagagtagaccggagtgatttgcaagttctggttttatccttttctattttatagaccaggaaatggaggcaaatggaagtaaagtgcagtgacttgttagaggaacaacattttgtagtagaaagggcataaataggccagggaaccacacagatttggatccaaatcctgattttgctaactactagtgctatgtgctgtgtctttggacaagttattaacccgctgagcctccgtttcttcatcagtaaaatggtgatagtgagaccttcgtcatgtgatttgttgagaagactcaggattaaatgtatgtaaaatgtctaacagtgcctggcatatcctacgtctgccattaagtcataagtccctctttctttccttctttgaagtccttccaggtggcaagagcagagatgagggagggtgttggggaccagccacagaggcaccctttgagacagggggaatgtcatggatagccccagcagagggaatgccgtcctctggcctcacgacctgtatctgaacatcaggacagggtctggctcatgctctctccttcaccgaggtgggttatggactaattggtgatctggcctgggagtttcctgatggcgttagcagctatgagcttattaatcatcctcacatgtcacagacatctgccaggaaccttcaaagcacgagtggttataagaatttctttgtttctgaatggtttcccaagctgtgtatttcagaggcactggataccagatgcgggctgatgtctacagagttcatactataggatagccaaagagcgcatatgttgcttccagggagtaagtgggttttgaatgaggccatgtaaattgggccccaagaagtaaatttttttttttttttttttttgagatggagtctctctctttcgccaggctagagtataatggtgcaatctcggctcactgcaacctctgactccctggttcaagcgattctcctgcctcagcctcccaagtagctgggactacaggcacgcaccaccacgcccagcaaatttttgtatttttagtagagacagggtctcaccatgttggccaggatggtctcgatctcctgacctcgtgatccgcccgcctcagcctcccaaagtgctgggattacagacatgagccaccctgcccagccaagaaataaaattttataaagatatgaaagaaatctaacccccttttaaaccttgacatttgtgctgcttgatatgctgaaagggccgccatcttggctgacccatatgcaaagatatggcagaaaaaacataaacctgcgtctgcaatggatcacttcacaacattgctgtgtgttttcaggcccttttagacaatgaagatgatgaaatgcaacacaatgaagggcaaga

SEQ ID NO: 1174 - DNA, 106 bp, Homo sapiens
tttatttatttgagatggagtctcactctgtcgcccaggctggagtgcagtggtgcgatctcggctcactgcaagctccgcctcccaggttcacgccattctcctg

SEQ ID NO: 1175 - DNA, 343 bp, Homo sapiens
catgaaaataattgcaatcatttctagtccttgtaattcaaccttcttctaccctaccataatccctctattttactcacccagaataaaatgttacttattccaggcaagtagacaaatgatgatttcgaaggttaaccaaatatttccactcatttatcatgactacttataatgtatatatttgttccatcatgcattttggtgctgtgtttagctagaaaccacttgatatagatggctgactttcaaggtaagccaaaccttcaaatgaaaaacttgaagcagaataatttcctaggatactgggacttaagaaatcaagagaggctgtagaatagaa

SEQ ID NO: 1176 - DNA, 3243 bp, Homo sapiens
tgctgttctgccagggagcctgattttggcactggtgtatttccagaaccaaggtgggtgcccggtctgaggccctagcgggtgtctgggtcccttcctggaggccccttgcctccctcagccctggcttttgggacttagcaggggaggaagttttttgttttgttttgttttgagacgaagtctcactgtcaccaaggctggagtgcagtggcacaatctcggctcactgcaacctccctctcctgggttcaagcgattctcccgcctcagcgttgcgagttgctgggactacaggtacgtgtcactacacaggctaatttttgtattttttagtagagatgaggtttcactgtgttagccaggctgaactcctgacctcatgatccgcccgcctcggcctcccaaagtgctgggattaccggcatgagccaccgcgcccggcctatgggaggaagttctgacatggatggcaggggtggggagggcagctgaggactctggagcagaggctggggccccactctggctttccctggccctaaaggaagggtggggtctgagagtgtggaggcctgagagcaggggcagcacagacacccactctgagaccacttggttgtcccagccaccgggttccaggtgtctggggccaggtggggttttctctccaagcccagagtgacctccccactcccagccttgcccagagcaagtcttgctgagttctaaggtgaactcccacttgttccagaccagggacacagggtcctgcaggcctcccggagcaagcactcttgagagggcttctccacgtggccacaggacagactgtgcttcatccagcactgtacgctcaaacacacacacctgaaacaaaggctccacgaacaggcctgcccttacagcacaccatgctcttgtttagtcttccttatgttttttgttttcgttttgagacggagtcttgccctattgcccaggctggagtgcagtggtgcaatcttggctcactgcaacctctgccttccaggttcaagcgattctcctgcctcagcctcctgagtagctgggattacaggcacacagcaccatgcccggctagtttttctatttttagtagagaaagggtttcaccatgttggtcaggctagtctcgaactcctgacctcgtgatctgcccgcttcggcctcccaaagtgttgggattacaggcatgagccaccacacccggctgtcttccttatttttttaaatgccagctgttttatgcacaattgtcccaaactagaaacaacccaattatccatcaactggtaaaggaataaactaatgtgttatctttgtttgtttatttaattttgatacagggtcccactctgtcgcccaggctggagtacagtggagagatcacaggtaactacagcctaaacctcttgggctcaagtgatcttcccacctcgggcacacctggctaatttttttttttaattgaatgtggtatattatttaaaaggaatgctggccaggtgtggtggctcatgcctgtctgtaatcccaacactttgggaggccaaggtgggtggatcacctgaggtcaggagttcaatatcagcctggccaacatggtgaaacctgtctctactaaaaatacaaaagttagccatgcgtggtggcgcacgcctgtaatctcagctacttgggaggctgaaacacgagaattgcttgaaactgggaggcagaggttgcaaagtaaaccaagtttatgccactgtgttccagcctgggcgacagagcgagactgtctcaaaaaaaaaaagaaaaaaaaaactataatggtaaattttgctatgtatatttttatcagtgtttaaaaaaaaacataacaaactctcccttggctctgccatgctccttatagggcaggctactgtaaaatgaaactacgggccaggcacggtggctcatgcctgtaatcccagcactttgggaggccaagatgggtggatcacctgaggtcgggagttcgagaccagcctgaccaatatggagaaacccccgtctctactaaaaatacaaatttagtcgggtgtggtggcacatgcctgtaatcccagctacttgggaggctgaggcaggagaatcacttgaacccaggagtcggaggttgcagttgagccgagatcatagcatgccattgcactccagcctgggggacaagagcgaaactctgtctcacaaaaaaaaaaaaaaaaaaaaaaaaaggaagaaaggaaggaaggaaagagagagaaagaaactacagggactcttgttaaaaaattattaagaatttcaagatggcaacagcagcatattaaaaccaagtgtggtctcttctaggctcaggaccctatgggattgcacaggtcgcagcccaagcgcagtacttgcgcacaggtcccagccccttccctctctgggacttgtcttctggcccctcactcctgcgatgagcttttctttcagctggtgaaaggccgcagacttcgaacctctgggcctttgtccaggacgttccctcagcgctcagtgcccttcctggtggcctcctacatcttcagatcccggctgagctctgcttaaatccgggaccgggtagtcactggggcagccacttggctggggcgaggccacctcgctttgggtcttgtcgcgcccaggccagcgccagcccaggcttgccatggactggctcctgggcgttagatgaatgaatcgactcaacccgggccgccacgttgtgttcagaacaccgacagtcgctcccaggcaaccagcacctgctgcgccccgtttccagcgacctccccaaccgcgtggactcgcatccacgtgcccggcggggccgcagcagaaaggctcggaccccccaggacgatcggccggtgggggccggtggggccgcagactcggggggcggggggcgccaggcttccgggtcctgcccccgccccgtggggaacagcaggacggcgccgaggccgtttcgctttcctccgcgcccatttgccgggaggggaccccgtgctccgacctgaaggtgacggcagagcctgcgggaggcctaggccggtcccgccctacgggtcccgggggcgaccctcgcgctgacattggcgtccaggccgcggcccctgcctccgcgcccacccacgccgggcctggccctcgctcccccgggaaaagccccgccggcggccg

SEQ ID NO: 1177 - DNA, 119 bp, Homo sapiens
ccagctacttgggaggctgagtcaggagaatcgcttgaacccaggaggtggaggttgtggtgagccgagaccgtgccattgcactccagcctgggcaacaagagtgaaactctgtctca

SEQ ID NO: 1178 - DNA, 286 bp, Homo sapiens
ctccagagctcccggacagcagccggatcccggccggctcctggggcactaggacagacccccgcggctagcagcccggcctggggggcggaacactctcttcttgtcccgccccaccttcctccgggccgcaaccaccccagcccatcgctgggacgtggccgcgggtgccgagagcgctgccggcgccgtgggggccatcccggtcctggccccgacggcgccccaggacctgcgatagccgtaagtagcgactatgggggctaggagagtccaagaggggggg

SEQ ID NO: 1179 - DNA, 292 bp, Homo sapiens
ctccagagctcccggacagcagccggatcccggccggctcctggggcactaggacagacccccgcggctagcagcccggcctggggggcggaacactctcttcttgtcccgccccaccttcctccgggccgcaaccaccccagcccatcgctgggacgtggccgcgggtgccgagagcgctgccggcgccgtgggggccatcccggtcctggccccgacggcgccccaggacctgcgatagccgtaagtagcgactatgggggctaggagagtccaagaagtggggagctgg

SEQ ID NO: 1180 - DNA, 313 bp, Homo sapiens
ggggcaaagagatttggaggccgcaattattcagacagttccacgaagtggttgaggtttctctctttctcctgattttccagaaacttttgcagagtttggacaggcaaaggaaaacgtgcagcccgcggatctccgggcctcagagagcagggagtcggggagactgaggccccgctccgagagcgcggaggaagcgcgcccagccggcttcctgtgggggctcgggcctcgggcgccccgcggacagacgtgtccggctcctggctgggccaagcccggcgcgggggaggggacccgcagaggggcgact

SEQ ID NO: 1181 - DNA, 1483 bp, Homo sapiens
atttatcatctacgtatgtaaattgagtaatgatattcagtgataattatgtagatgcgttttttgacttgttagctacattctgtggtactatacttgctttctttattaagttctacattttgtcctacattaatatgaatcatttgaagtactttattctaatttaaatttgaaaatactattttctgaaaaaatgtattttattttggaagctcttcatttttaaaaatttgtggtttatattctgagcaaattaaaagtagctgttttggccatttaaaaatgttaaaagaatatgagtgcattaagagatataatgaccactataactattacttgacctgtttttatattcactacctaacatttatttaatgcctgctaaatacaaggcagtataattgagccagtttgtgtgatagaatatatatttgattctttaaatttttgtttttttattataacagtgtgctcagtttaaactgtgaaacaaagacaagaacagctgccatcattttaagataactgaagttagaaatgtgataatggttgttttaaaatctttacctctgcaattacctataaggccttttaagatcctgtaatgatctgcctacccacaccacttcttaaacctctctggccttgttttttattactctttctcttagtcaccttgctctatccatactgaccatcctctttttgtttgtgctgtcagcagcatcttccatgaatgtcccttagatgtcctcatgttttagtttcctcttcacaagcacttttctgctcttctctgctttatttttcacttttcaacattctaaatattgtattcattcaaaatacttaattatcttgtttgtctctattactagaacataaaatagtgtctggcatatagtaggcactcaataaatatttgttgaatgaataaatgttcacactgattgtgatggtgtactttttttaaaaaacagaatcatgcaaacatattactctaatacttgctttcccctctcttagtaactgatggatattgtcatttgatagtgattttaaataactgcagaatagtccataataagtttgtttccagttttttgtcacgacaaataatattgtaataaacacccttatacatattttttaaatattttgctccttttatttttatgaaataagttccttcatgtgggtcaacatatagtagtccctttatttgtggttttgctttccctatggtctgaaaatattaaatggaaaattccagaaataaacaattcataagtttcatgttgcatgccgttctgagtagtgtgatgaaattttgcgccgtccttttctgtcccacctgggacatgaatcctccttttgtctggtgtatccacttagtagccctcagttatcagattgactgttgaggtatcacagtgcttgtgttcaagaaaccctaattttacttaataatggccccaaa

SEQ ID NO: 1182 - DNA, 10256 bp, Homo sapiens
gtggcactgtctcaggaatggggtcagtaaatccttaactgtcctcgtgagtggtggggagggggactttatcagaaagaggctcctcgccatttataatacaaaaaaattagttttaaaaactgtttagagaatagacctcaactgtggtttactaaagtctgatagtacaacataattaaaaaataatttatgatattaaaaggatatagtactatgattataatttaaattataatttataacagttacatacggcctactgttaccactcagaaggggtcatgagtgcaattattggacagatgtaacagggtggagtctaagggcacagaggtctccctgcagttgtgctgatgtgcacaagagaaggaggggcagttcttttgtgtgtttcacctgggcccgagtctggggagcgtcttccctctctgatagctgcacccccttccctagggctgaacatgcttcagagtggcctgcacaagcagcacatgaaggacctctttgtggagctgtgtctcaccgtccctgtgcggctgagctcgcttttgccgtacctgcccatgcttatggatcccttggtgtctgcactcaatgggtctcagacattggtcagccaaggcctcaggacgctggagctgtgtgtggacaacctgcagcccgacttcctctacgaccacatccagccggtgcgcgcagagctcatgcaggtaggattttagtgaggttgttagctggctgcttccctggaagcagtgggccgtcattgggttctctgtactcaagagtgggctctgcaagatggaccagtgcagctctctgtttaattcatcttcgtgagtcttctggtggattgaaatatgtaaagaaggccgggcacggtgtctcctgactgtgatcccagcactttgggaggccgaggagggtggatcacttgagcccaggagttggagaccagcctgggcaacatggtgaaaacccatctctacaaaaaatacaaaaattagccaagcatggtggccgacacctgtaatcccagctacttgaggctgaggcagggggatcacctgagcccagggaggttgaggctgcagcgaggcatgatcacactgctgtactccagcctgggtgacaaaatcagaccctgtctcaaaaaaaaaaaaaagaggaaatgtgtaaagaaatactgttggtactgaatggacattattttgcagccttgcctgtttttcagagagccttcacgagggttatattctttttttttttttttttttttgtgatagagtcttgctctgtctcccaggctggagtgcagaggcgcgatctcggctcactgcaacctccgcctcccgggttcaagcaattcttctgtctcagcctcctgagtagctgggactacagacgcgtaccaccatgcctggctaatttttgtattttagtagagatggggtttcaccatattggccaggctggtctcaaactcctgacctcatgatccgcccacctcagcctcccaaagtgctgggattacagccgcgagtcaccgtgcctggcgagggttatattcttaataagttgatgactgattaaggcaggtgttatggttactatacggccaccattgcttccagtgagaacctctctatccaggaaagatcttcagttgcatagtaaagggatattgactctaaaggaaagatataggtgtttgctccaccctacccaaagggaaaaagaagcagataataaaggaggttgttttgaaaacacttgtatatttgtttattaaagttcatatgttggccaggcactgtggctcacgcctgtaatcccagcactatgggaggctgagacaggcagatcacttgagtcctggagtttgaaaccagcctggccaacatggcgaaaccctgtctctactaaaaatacaaaaattagccaggcatggtagcaagccccctgtaatcccagctactcaggaggctgagcaggagaatcgcttaaactgtctcaaaaaaaaaaaaaaaagaaaaaaaggttgatatgttaaagttagtttttcctacatattttgctgttgttactgatttgtgatctggttggtaattgttggagggttagggtgtgtgtctcaaagcatctgcccctttaatagcaggtagttggccccagataggagtcagagtatgagctttagatgatggaggctcagttactcctaggagtctctgttcaaattagattggagactgcagctaggactgagtttgaggttgggatattttccctccctgtcctgagatttagatcttgggcttcatctaggctggaagaagatggcgtaggggccaggtgtggtggctcacacctgtaatcccagcactttgggaggccgaggcaggagcattgcttgagcctaggagttccagatcagcctaggcaacatggtgaaatcccatctctactaaaaatacagaaaattagctggatgtggtggtacatgcctgtagtcccagctactcacgagtttgaggtggaagaatccgttgaactcaagaggttgaggctacagtgagacatgattgaaccactgcactgcaagctgagtgacagaacaagaccctgtttcaaaaaaaaccaaaagataaagatggcataggccgtgggtcagagtccctgctggtcacctggaggattgatgagagcctgcctttagaacagtagtattggttctacaaggcaaaccctgcggctgacccagggtgcatgagcagcttgtgggagaggaggaggaggtggttcttaggccttcttaccatccatgaggcagatagcccaaaagagacacacacaggctcaaggccacaggaaccaccacaggcctccagatgaatggcacagggtcagcctctcccagtcccatcaaccagctaaggccatgcgagcacagcaggagggcatgcttgttcccagggctgccccctcctgaggacacccaagggttgggtgggcctggtggagggtagatgaggtgagaggtcttagactacttttctgacaattattaagaagcctgtttgaatctacgggaacgtaagagaaattggaattttgcttggtttagagaaaagtaccaagattttatgttaaggagtattgctagacatgaatatttggcattgttaaatggaaggtgatttaagaaaatagatttatggccgggtgcggtggctcacgcctgtaatcccagcactttgggaggctgaggcgggtggatcactggaggtgaggagttcaagaccagcctggccaacaaggtgaaaccctatctgcactaaaaaaaattagctgggcatggtggtgcatgcctgtaatcttagctgctcaggaggctgaggtgggaggattgcttgcttggacctgggaagtagtggttgcagtgagccgagattgcaccactgcactccagcctggttgacagagcgagactccgtctccaaaaaaaaaaaaaagaaaagaaaatagacttacatagtgacctgtagtaatttttaggacctctgataattcagacaaaaaatggggggaaatttacagttttttgcgacagttgagtgcggatatttcttaaatgcggagtccacattaacttaattcttttccatagtcctgtaatggaggtgccttcgtgatctgtgtttttcctttgccaccctttctaatgtaagatttgaagtgtatgagacaatttatgtcatgtttgtaagttataaagcctaataaatagacttaaaaacctgagaagttgccatcccacccaggactggaacctcactgctaagtcgcatccacctgcgtgctcctccccacccatttttttttttgagatgaagtttcgctcttgttgcccaggctggagtgcagtggcgcaatcttggctcaccaaaacctccgcctcctgggttcaagtgattcttctgcctcagcctccccagtagctgggattacaggcatgtgccaccacgcccagctaattttgtgtttttagtagatggggttactccatgttggtcaggctggtctcgaactaccgacttcaggtgatccgcccacctcagcctcccaaagtgctgggattacaggcgtgagcagcatgtgcctaaacaagatactgcttagttttcttgttttggagctctgcagcacttataatatgctgctatttatattccaggagcatggatgaacatttatgtttacacaggtactttctttataaagacataaaacttccttggaagaacatgcaagactaataacattggtttctccaaagaagggagaacggtgtgtttgggtaacagaggtgggaggaaggattgttgccaagcagtgttccatcactttgagggttttttttgacatggagtctcgcccttgtcacccgggctggagtgcagtggtgtgatctcagctcactacaaccttcgccttctgggttcaagtgattctcccacctcagcatcccaaatagctgggattacaacagcctgccaccacgcctggctaatttttgtatatttagtagaggtggggttttgccctgttgaccaggctggtcttgaactcctgacgtcaggtgatctacccgccttagcctcccaaagttctgggattacaggcatgagccactacgcctggcctcccttttgagttttgatccgaacctcgtgaaggcattaccttaagaggaccttaatgaaagcacgctgattttcaggctctgtggcgcaccttacgcaaccctgctgacagcatctcccacgtggcctaccgtgtgctcggtaagtttggcggcagtaacaggaagatgctgaaggagtcgcagaagctgcactacgttgtgaccgaggttcagggccccagcatcactgtggagttttccgactgcaaagcttctctccagctccccatggagaaggtaagctctgtgacaatgtcgtttcgttttaagccttgtgaagatactatgtttcagtctatgtgaaatgttaattagacctgtgtcttaggcaatctctgagtagaaccagttgtatcaggtgatcggcctggttggcacaggggctttcctaatgccaggagaccagtggaggggtgtcacctgagaacttggtactctggagcagccccctctcctggtgaccaagaggagatgccagcccatcccgccgtgaactccttccattctgatgcctggcaggcttactgagaacctgagttgagtccatgcctgtctgtcttcgcagccacacgcagtgcctcgctttctcccattctctatccaaacgcagctcgcactgtctcattcctggctctcatcccactgccaacagctcctgggtctctgttaggccctttagagatcctcgtttttactgtgtaaaaagcagacagtgcccccgcaccctgctggagtgtcctgcctgctgcctttgccctgtctgtgttgaacacccaccgtctctcctccctgccctgctgacttttctgctccctgtcctagttctgtgtcagcatcattccatcgtcacgttggcttttccctctgactctgtcaccagtccttccccacatggtggcagcatttgtttccatgtctttgcaggacatcatctagctgttgtgtattgggtatttttttaaggatattatcgtaatgtttgagcggatccacgtgagttgggcatttcagtaagctggctgcctgctggggtcctgagcctcttgcagatctgatcttcagccagcatcgtgtggcctggaactgctccaggccctccctttgctctggctaactcctccctgccctgttgcatcattgtgtagtactgggtgtgtttacctttgtagaagacgtgtgcccatgtagtggcttctgtgtccataagtaaacattggggagggagaagctggtacagataagcgtcactctggagttgttttctgtcatcatctcagtcagcctgtcccccgcaacttcctcaagcctatgcctcatccccagccctccccaactcctgccttatgaagcactgttccctctccagcctcagggtgggtgcagtctcagcttctaacccaaaccttcatccacatactttccaaatgaatgctactctcctaagagaattggatggctaaaattctgtcttttgcgtattttatttgactctgtatagacaaaaagctccccccacccccaaaaaattccctttagaagtagttttgccccaaagcagctgaagtctggaagaaatcaggttttgcagaggtaggatcgtaaaggtctgggcccccttacagaggctcaccatggtgcctgtcaaggcattctttctgagcaggacgccatcctgccggcactggctgcagcacacctggtatagctcatagctaaggagcccatgaggtaaagggaaagatgagcgtggctaagccaagtgccagtgagtttccattaaaccattctgcttttggcacacttggcagtccttgattctttttggcaggtaattggctcatatgttatattgattctgaaaaataaaattttagaaagtaccaccatttacaactgctactgatcagatcacatgcagttccgcaataccctcgaagagcacggacactcaagctggggttcatccggggaggagctgttgtcatgcttgtgtgcactgcgtgtctctaagcctggcaggggctggtggggagggcctctgtccctgtcatcaccctctcctggttcctcacacagggcctgggtaaatttttaacaaagattagttatttgatttatatgtacataattattgttaaggtgaatgtcttggctgttaaaggcttcagattacttttgtgtgtggttgtgtcttcgccactatctcagtcaaccccatgagaatgaatagaataaaaatgtgtgcatgtagctatgtaggctttctgaaaaaaatgatgtcaacctttttctttcttaaagaatgagtttagtaaaagcttaagaaagccatctttcagttttgaacctaggcacaggaaagtctgctttgcagaaagttcattattattcttgttaggatcttgaagagcatgtaggtgaggcagaatctggtttaacccagcaaatcttccacaagaggctctccgagctcacttagttcctgtaatctgccattggctatttgaacatgaaattgttaaactccatcttggcattttaatttgaactgtgcaattccttgttttgtaatacttccaccgcctcttttggaagcttcaccaggtgaatacctattaaagctgtattaaagctgtattgtattaaagctgtaaagtgtgtacccactgtgctctcttcaaaagaaaatatgcatgagactggtgccgtggcttagttggttaaggcgcctgtctagaaatgtgcattaagattcttctgggtgattgagaccatcctggctaacacagtgaaaccccgtctctactaaaaatacaaaaaaaattagccgggtgtggtggctggcacctgtggtcccagctactcgggaggctgaggcaggagaatggcgtgaacccgggaggcagagcttgcagtgagcggagatggcaccactgcactccagcctgggcgacagagcaagactccgtctcaaaaaaaaaaaaaaaaaaggttcttctgggtgtggctgggcgcggtggctcatgcctgttatcccagcactttgggaggccgaggcgggcagatcacgaggtcaggagatcgagaccatcctggctaacacagtgaaaccccgactctactaaaaatacaaaaaacttagctgggcgtggtggcgggcacctgtagtcccagctacttgggaggctgaagcaggagaatggcgtgaacccgggaggcagagcttgcagtgacctgagatacgcgccactgcactccagcccaggcgacagagcgagactccgtctcaaaaaaaaaaaaagattcttctgggtgctgcagatgctttcagtgaaagcttttcacaatcatgtaatttcagcacaaactgtagtttctttgtgtcttggttgtaggccattgaaactgctctggactgcctgaaaagcgccaacactgagccctactaccggaggcaggcgtgggaagtgatcaaatgcttcctggtggccatgatgagcctggaggacaacaagcacgcactctaccagctcctggcacaccccaagtatgtcggccacttccttctgtgtggttgggtggatcctgttttaggaattggggctgcagagggcctcccaggtttcctggtgctaggagcaggctccttgaagtccagcagatgccatattatctacctactccttcttgttggggccttagagaaaatggaaaggagaactgggtgcttgagaattagaagggatcacagttgtcgcctgcctttattgtgtcttgtcacctcctccattagtttgtaagtgtgaagaaatcaagggtcatgtcccttctccctccctttgtctcaccattctgtccacagcagctggcgcctgaaaggcatgcagtggaccctctgcattttcatttcacagtgatctttctccagatatttctcatgtgatgtctgtatcttgctcttacctcttgagactgtgcatgaccttaatgtaatgatcttttgaggtaacacacacataccatttttctgcattgtaagtttcaggggatggatttttcctatatattttcacattcttcactgcatcagaagtgatgctgagtatatagtaggtgctcagttgtttaaaggacattgaagagagaggagtcaaggtaaccaaatgcacaaggaagtaaagcaacatgagtaagagccagcagaatcaatggaaggcagaaatagacccacacaggcttcaggtgttaggattatcagaactaggttgtaactatgcttagaatgtttaaattaatgaaagacaaactggaaaatacctccaagaaacagaaacctataaaaattgcccaaaaacttagagagaacctttaagaagttgtcgaatacttatccagaacacatgcagagagagaaaagatggaaaattcaagagagagtaagagacatgaagagtagagggaagtagcatcatttacttttaacccctcaaaaagagcagagagacataatgactgagaatttcccagaactgatgaaaaaattaaacagtgtgcagatccgagatgttgagtgaatccaaagcaggataaataaaaagaaatccacagagacaaactatagtgaaacaactacaaatcagaaacaaagggaaaatcttaaaagatggcagaacaaaaagatgacattcaaatgaatgatcacttggaagctgtgaaagccactgaactgtggaataaacctttagtttgaaaaaagaattgccaacttagagtcatatatctggtgcagtatgacccatgaataaggatgaaataaagatgttttcagataaaaacagaaatctgccaccagcacatcttcagcaaagaacattctaaaggatgttcattcagacagaaagttcctccatggaagattgaggatgagggaaggaaaaagagccaagaaaatgataattcgtgaccaaatctaaatgggatgcagctaaagtgacactcagagggaaacttacagcctgaaaaaacgtgctgtaatcccagcactttgggaggctgaggcgggggtgggtcacctgaggtcaggagttcaagaccatcgagaccagcctggccaatatggtgaagtcccatctctactaaaaatacaaaaaaaattagctgggcgtggtggtgggcacctgtaatcccagctacttgggaggctgaggcaggagaatcgcatgaacctgggaggtagaggttgcagtgagccaggatcgcgccattgcaccccagcctgggtgacagagcgagactccatccaggtgttgctgaaattaaagcagataaattacccaggcctgtctgaataagagggaagcaagcagattaaaaatttgaaaagaagtcctagtggagtcatcagctcaggagttgggtgtcgtgacaccagatctgattttgcctttcagctttacagaaaagaccatccccaatgttatcatctcacatcgctacaaagcccagg

SEQ ID NO: 1183 - DNA, 1672 bp, Homo sapiens
agcaggccctgacaggcgccttcatgtctgctgtcattaaggacctgcggcccagcgccctgccctttgtcgccagcttgatccgccactatacgatggtggcagtcgcccagcagtgtggtgagcacgggggcacggtggggcacgggattggttctttgacttttataggtgctttaaaaacttgctcaggacattttgttgttctagaaaaagctgagtttggctgattgattttcggcttttattttccaattttccatttacgacattgataattggtatttcagtggtgggcactatatcagcttgaaagttactacctaccaagttttgtttgtaagatagacccaatttaataatacttctgtgtccaagtgctttgggacaagctgcctgtgaaacagacagtttgtgttcatactcactgctcaccttcctctgcctggctgtgttttccaaggccagtcttgccctccagaaacttctccatcacctgctccctgctctccaacccatgcctcgcagtctcccctgcgatgcccgtttctgctcccaggatcctcattctgctgttcctcctgcctggaacggctgctcacctccgtttcagtggctctcacactcttggtggtgaagggccacttgtatttgttcacttttatttccgatccattgtaggtgatgtctttgtaaaagacaataaaaatggccaggcacggtggctcacgcctataatcccagcactttgggaggccgaggtgggcggatcacctgaggtcgggagttcgaaaccagcctgaccaacatggagaaatcccgtctctactaaaaataccaaattagctgggcatggtggtgcatgcctgtaatcccagctactcgggaggctgaggcaggagaatcgcttgaacctgggaggcggaggttgtggtgagcagagatcgtgccattgttccagcctgggcaacaagagcgaaactccgtctcaaaaagaaaaaaaaagacaaaaaaaatgtcatgccactgccagttgctacataagtttctgaaaacctactgtcaatttcagcatctcctcccagaccagtcacagttcgtctgcagaccgcactggagtagcactgcccagttggtgtcctcaaagcccctcacccttaagatcaaccagcagagcacatagaattttcccctttaacttttcttggcctgacgggtcaatactgtacaatttagcactttgattgtttctcagtgtttgttctttgttaacattgtctttctggcaaaactaagcttctcagtaacttccaccttggacctgggtacctccgaggcattacctaataatgctgtggccgactgttctctgccatagctggatgccgttgctttttgttgttgtatgttaggaatatccggagcataacccatggtcattcccatattctgccccttggcctatttaataatttttttaaaaaatgttaccccattgtggttttctttattttttttttaatttttgttttgttttgctttttagatacagagtctcactttgttgcccaggctggagtgcagtggcgtggtcatggctcactgcagcctctacctgctgagctcaagtgatcctcctgcctcatcctcttgagtagctgggactacaggc

SEQ ID NO: 1184 - DNA, 443 bp, Homo sapiens
gactgacatgtcatttcctctctgaagtttttcctgcacagacccctttccctggaagcgtggcttggtaaccatgcacgccgtgtttccatcacaccccaggctcaccttgtcataggagttccacactctagggcagttgctgatcttatctgaagccctcattgggtggtaagctctagacagcaggagcatgatttatactgtggtactggattgtgtgcttagcaggtgcgtgtgtgtggctgtgattcaggggatgctgtgggggtgggctgaggtttgaaatccggccgtgaaagtaggtgagatgcagccgtgcacggatgggcgtcgctgccttagaagccgacataggaagagccagtgatggacttgagcagggagcaagaagcgacaaaccatagcctgtggcccgtagctgcccccactccgtgcttttg

SEQ ID NO: 1185 - DNA, 323 bp, Homo sapiens
cacccacccaagcagacacacatcttcagacccggcgattgtgcataggtttatatccaacaggtacgcattgcttatcttccctagcaatgttctgcctgcctacctaacccgtgcctaggtatctctccttttcctgagacatccttctttcaggattaagctaataagaccaggctagcttgagaaatttgcatgtgttcttgtgttttcatccccaaaacaacagtgtactgtgctttcaactatagtctctgaaattgtgtagaccacaggctctgtatgggcctgggagttagatgctttgggtaggtgggcatttg

SEQ ID NO: 1186 - DNA, 484 bp, Homo sapiens
tgcttttggatttttttactataacagctttatcgggatacaagtcacatagcatacagttcacccatgtaaagtatacattcaatggcatttagtgtatttacatccccacagtccattttagaatgttttcctctcctgaaaagaaatcatggcccatttgcagtcactgcccatccctgcccctgccctcatcgccatgacctgctcccccaggccatctctttcttttgggcatctcccgagggaggggtagacagattctccctgccgagggccacaagcctcttttctgaccctgaggccctgatcccttccccaccggcactctctgcttttgctctcctctcctcccctcccagggaaggcagatccgggttcactgtggaaggtggcttcgtcccccaggattaggcagcggacagcccacagcatggctggccctgccttgggactcagggcacaaggccagactgactacaga

SEQ ID NO: 1187 - DNA, 12555 bp, Homo sapiens
agtatttaggtcagttaacgtccataccaggatacctgaatccctccagtaggactgaaatcctgcatttcatagacaatgcaaaggtaaccctatcctcttaaccctgtgcactagccctcagcccccaccagcccttggtccctgtactcttggcctcgtggctgtgaggaatgagccagtcccatcacattatgggtacacttggctcttggccataaagactattccttagtatggacattaagttgattctcgacacttgctccatgtgattttgggctgtttccaaaatttacactttcaagatatttcaaaccatgtgccgtaagtctgaatctgaaggcagttccagaagaatctcccaaatggtttgaacacattggtgtccctggaataagcactgttctgaggggaataacactgaccttattcactcagcatttgtcacatgtgtgacatcggccagcacaatattctcaggagaagcgccccatgccggttgacagctgagtctgtatttctgatgccctgtggttccttccagagagcccaccagcttccgggacacttgactcaggagcacgatgctgtgctcagcctgtctgcgtacaacgtcaagctggcctggagggacggggaggatatcatcctcagggtgcccatccatgacatcgccgccgtctcctatgttcgggatgacgctgcacacctggtggtcctgaagacaggtacaggaggtcaggggtcaggagggtccttgtcctaaggagtacatgtgtgaattttatgaagttctggagacagtttttgcagcttcgtgttgggtgctgctgtttgtcacgaccaataattgtctttcctgtctctgagatcagccagaagagggcttgagatcagttaccagacactgggggtgactgtcacactaagagcctttggggactcaataatactgggatacagtatttaggactggtatcctgttcctctgcccggtggggctcctattgactccctctgggtacagtggagttgcccctctgcccaggtgtggtggagcctagagagagtgcagtggatagggacctcacctcagcttgactgatattttgagctctgcacagtgtcctcaaacctgggacagaaaagatgagacccagacctcccaggagctcttggtcatagaggttactctctgtgtgtccttgccgtctgctgctttcacaatgggatagaattgggcagaattgggcagaattgggcagaatgttatttttggctgtggtgagtacagtgctgcctcactggacccaagcccaagctgcccgttaatttccagcagcttccagcccaggcattcaggccactgaggatgaggggagagaccatggttcgccctacctgtattttgcccctcccagtcctgagtttcgaggctggtgttgcagtggggacagtatcctgggctccttggatctctgctggtgactgggttgatcccaaagcctttcatttccagagggccagtggcagggtgtgaaggggtcacagtgggtctgcctagaccacacactgtgttttaggtagcagagaggggaatttgttgttccacttaaggtcagtagttcattgagaatctggcgagtgtgttcattattgaccccttgagccatgaagctgccagcttgagtgcgctcttgagagcagtccactgaaagcctgtgagtctagatgcttggggttgctgtggtcataaactacacagggaacactggcggggtttatgaaggtggctgttgctctgttttgttctctgtgtagcagtagcttagacttgcgtacaccctccccaacgcaggcacacaccacacctacacacatgtacattactcaccctatctggcttagaaggctgggttggtggctccttccagccatactatccgacaccatggtgaccctcctgtttttctacctttggaccctgcgggaggccttaggcctgggacatccttagggacaaggagtgaggagactggtttctgactcgcttcttgcaggtgtttcaagctggtagggaggggagataggctcctccctttatttcttctgctgcatgacagtttctcagctttaattattagaacacattgctaaaggaaatggatgacagattttttttaatggagagagaatgagcgccataggagaaactttccaaaattagatgaaaaacaggacttctggtctttgagagaacttttgatttaaaggaagagagtgaatccctgtgtcctgggggccatcttccttgtttttgtggatgcaccggagcagttgtgtgtcccctgtgttacataaggtgtgctgtgtttattttttaatttttaaaatattttaaaaatttttgtaaggatgaagtctctctatgttgcccacgctggtcttgaactcctggcctcaagcgatcctcctgccttagcctcccaaagtgttgggactatgggcatgagccactgcactgggccgccatgctgtatttaggattaggcatccagagttctcagcataagagactagcaggtgaatagctaacgtttacttggtgcctgctatgtgcaagcaagtctctgtgcctctttggaccaaaagtacgctggtatttgggatagcacaggagtggggaagttgggggccaggtctagctgcaatagggtccatgtggcaggagctgcttggagggtgatgacttgagttggtgccagatggggcagggtcacccgtgcacccgtggtagcacttcctggatgatataggagaggcacacaactcgctgcccgcatccttaggctgcccaccctgcttccttgagaactaccacaggcacacaccagggagccaacatttaaaaatgtttaaaaggtagagatttcttaccaaactcataccaaaaaaagaaaaaaagtaaagggaaaccagtaaatttttttttttttttttgagacggagtctcgctgtgttgcccaggctggagtgtagtgccgtgatctcagctcactgcaagctctgcctcccaggttcacgccattctcctgcctcagcctcctgagtagctgggactacaggctcctgccaccacgcctggctaattttttgtatttttagtagagatagtatttcaccgtgttagccaggatgatcttgatctcctgaccttgtgatccgccaccttggcctcccaaagtgctgggattacaggcatgagccactgtgcccgcctttttttttttttgagacaagtttggtgcttgttgcccaggctagagtgcaatggtgtggtcttggttcactgcaatctccgccccccgagtagctgggattacaggcatgagccaccacgcccagctaatttttttgtatttttagtagagatggggtttcaccatgttggccaggctggtcttgaactcctgacctcaggtgatccacccgccttggcctcccaatgtgctgggattacagccatgagccactgcgcctggccaattattttcaataatatattttatttacccctccgtacccaaaacattattacatcagtatataatcaatataaaaatcgttgagctacatagcattctttctttgcctacctctgaaaccctgtgtatagtttgcactcacacatttcaatgtgggctcatcacattttgcatactcagtagtcctgtggccagtggctgccatagggacagagcagccccaggagtctcactgtggggtttgaggtacagtttcttatggagcccttgtctctgtgcatgcgctaactttgcatgtggcctgggacggccttcttctccctcctgaggctggcctgccctctgacaccctggcactagtggcacttctaggttttgttttcagtcttgaagtcctcccagggtggtccgaactgatggtgagagccctgcttcctggggattggcctcacttctgccatcaggaaaaccactgagttactccatgtatttcaggagaacctcatttgtctagggaggcaatgggtaggatgttagaaacaagggcactggggtctgaccgtctagattgccatgtggacagtgcaactcacacgccctcaggccaggcctttcactttcccatgcctcagtttacccatctgtaagaagggaactccccagaacacatggaaacctcctggaggtgactgttctcagggttgtatatgtggtctgttgtatatgaacttgaagcgtgtgaaactgcaggatgacatgcagctctggtgcccttggagctcaggggtcgcgtgttcccacccttatttagagaagcgaagtgtgtctggtgcaggcccttcacctgagtcgttctgtgggtgcctgagccaggtaaaggtcctctcagcctgtttccatggcggcctcagctgtttcctcaagtgcccccatgcctgcccttccactgtgctaaactgagatggtgttgacttctcagcccaggacccagggatctcccccagccagagtctgtgtgcggaaagttccagaggcctcagtgcaggctccctgtcggagagtgcagttgggcccgtggaggcatgctgcctggtcatcctggctgcagagagcaaggtgagactttctcgccccacttactcagaactggctcctcccagaccctgctcatggccagccccaccctggccacacccagcacagtgctgggcactgctgggtgccccagctacttcctctgccattgcctgtccctgcctcaccctagtctccacccagccccacctctctctgctcaaccctgccccaggcattgcccccatcctggccctgcccacagctcctctgcgcatgactgcatcccaggtcctgccccaggcccaggctccccaccggttcccacccctgtgccttctgaccctcctacctccaacccccagcaacttctctgagaccacctggccactgagctttttgcttatcattcttcaaggtgcccccacgctgatgggcgggcagcggcggtcacctgtgcatcctagacctgcctggtgttaaggactgtgcttgcagattcctcacaacctggaagagccaagggctgggcccttgtaggctaggatttggggccccctcagccacccaatagctgtggggccttggcagtcacttaacacctttgtttaatttccatatctgtaaaatggatgctagtgaccacccaccttaaatatcctctaatgagcatttctcagtgttggtgctactgtcatttttagccggataattttccattgtgggaggctgccctgtgcactgtagggtgttgagcagcatcccagcttctccccttgtgacagctgaaaatgtctccagatattgctacatgtcccctgggaggggtacaaaaattgccccagttgagagcctctgctttagacagcacactgttataaaactgttttatagctgttagaaatgcctccaggtgggctgtgatactgatggtatctcctctcacctctttcctgggctgggatagggttgtgagggtgttgataggtcaggttaatggaaagaagacgttggactggcagctaacacttgtgccctgcacagtcccctcacacttgcaataccacccctgggccacatggcagtcctagatagagtcctggggcagttggctgggtctctcttttgacacccctttgggtcagtgaaaggcagagggacacattctggtatccactcttcattcatgtttattgagcatctgggctgccccaggtatcctggaagccgcctgggaaggcgcagtctccagccagactgaccgagcagctgctgtcccccactgcaggtcgctgcggaggagctttgctgtctgctaggccaggtcttccaggttgtttacacggagtccaccatcgactttctggacagagcgatatttgatggggcctctaccccgacccaccacctgtccctgcacagcggtatgttgagtgagagtgggcagcgggtgggagcagggacaggaggggctactgcagtggcccccagctccccatgagttactcctggaatagcgcagttactgccgtgacatggtggccttttgtttccagactttgctgttcacattagcccatagggtttcatgaaggcagaagtgtcacctgtccttgagagagttgcaccaggtcagcgctatggcttcctggaataaatttggggtctgtgaacacttttttggaaccacttgtggctaaagtcacttcacttaactcggaacaaagagcttggagaaggctcctagcactggggcctgtgatggaattggggaggctgagagtgggtctggggagcctccttttcagtatgcccagactatggctgctcttaatgtgaaactccttccaggaccatggccagacccatgggaagctgctcaggctgccctgggaggccagctggcagtggtggagcagtggcagatggggaagaatggaaggtaccccagagctgtctcttcctgcatggcccacacagcattttcaggagtctgttagtccattgaaaacacttcatcagcaagctcacttgagttaagtcttcaaaaacatcatctgtttttcagatgtattacttattgaggattaatgggttatataaattgaggtgcataaaaagctgttggaggctgggtgtggtggctcatgcctgtaatcccagcactttgggaggctgaggcgggcggatcacctgaggtcgggagttcaagaccagcctgaccaacatggagaaaccctgtctctactaaaaaataccaagaaaaaaaaaaaggctgttggaaacagtgcggcttgttgagtacaatttcttctttttacggagataagtcccagccctctgccctttccccagtaactcgcacatctcagtgaagagagtaaatggtggagaagcctgtgctggtgtgagggctgctcctcagtgcctccttcttccctttcttgctgctggtgccagagccctttgtgggcactacacgccttgtgttggcccagcagctgcagagagacagctgctgagctctcaggcatcctctctatctcatttagtcctcggtggcccagcgagataggtgcaatcttcatccccattttagagatggggaagtggaggcttagaagtcaacagcttatccagaggaatgtaccatatgagtagcagatgatttatcgagctgtaattaaacattcagttttagtgcgactggtttggcccttgtgctttaaaattcccaaagggcctttttttctttaataattttttttttactgagaagtacacaagtcatacatgtacagttgaatgaattttcataaagtaaacacatcatgtaacaccactactgggggttgctgaagtgggcttcttcccctgccagcctttcccaagacctccccgtgggatccacacacagatgtgcacacgttacgcacatgcatgcattctctgcttatttctgccttggagttttgcttgctgtgttctctctactacagctatgccaaaacatagcagcataaacagcagaaatatattctcttataattctatacgttaagagtccattgtgggtcccactgggctaaagttgaggtgtccacagggctggttccttctggaggctccagagaagaagccatttccttgtctttccagctcctaaaggcggctgcatgccttggctcatggcccttcctctgtcttcacagccagccacgtgacctcttccacagtcacatcttcctttgactgtcagcttcctctgcatttcaggactcttgcaatcacattgagcccacccaaattctccagggtcatctccctatttcaaggtcagctgataagcatcctttactcccctttgaaattggtaacatattcaccaattccagggattaggatgtggacgtctttggggggtcattattctgccctccatacttaccttgttcctagtgccagaaatgtcccttttatctctcagcctctccctctgcttcatttaaaatcttaccctctctgcaacactcacctgcctcgctcacaaagctttcactcactgtctgtgctggtgtgaaatgtgccttcctcaggtttgaaatagcaaattacagtctgtgtcacacggacctaatgtcatttgttgaatgtagctgctcagtgccagaccctttgctggtctgagggtcttgggaatcctgtggcttcactgggttcagatggggagtcagactgcccggctctgactgtggtttctgctgtgtgacctgggccaagttgtgtaactctctgacttacttcctaatctacaagtgaagacaggggtgatatatgcctgggttaaaggagacaaagccccagtaaccctgcctggcacatgagtgatacctcaaagacagcttttgctggctctggccatgggtgaatgtgtacttcagcccagcgtgcagcaggatttgcatttgccaggatccccaggaggggtgtatgtgggctcaagtctgggaagccctgccctgaggcacacagcacattccagagtgcgggcagcttgatgaaggacagcagggtccctgaagaccagggctgccgctgtctcctgtaaatacagcagtgggctggactcaaaatgcctccccactatgtccctgaaagtcatcttagttttctgcatcttccttacagatgactcttctacaaaagtggacattaaggagacctacgaggtggaagccagcactttgtgagtgcacatgccaccaagccctgcggtgggacacgcaccaaatgcgttgtctggtgttgtccaggctgcagccagtcagctcccccatctcagctcaccctcgctaagccatccccagacccactgtacccagcttagtgaatggctgaggcctggctcgccgccctctcctcgtagacttctagagcccttgctgtccctcttgtctctccctgcctaccttcccatggcctcccaagagtgagcttgtaataggcatgttggatggagctgttcccctgcccgagcctgccgaggcgctggccttccagcccatctctgccaccacctggggctctgtagtagttcacccactcgcgctctccattcctgccacctccccaaccctggctccttcccctgcccaacaatgctgcccactgccttgacctgtgtactccctctcttcactcagagcccaactcagagccatgcccccggggagccccaggaccaggccaagctgaccaccctgcatgcccagtcagctctcctctcatcatcatcatcatcacttacattcctctgttcaaggacagggacccacacacacggcatggactaggtttcctgaaacgtgtgtgggatggagggtcggggaagccacccgctcacataccacattctttcgcagctgcttccctgaatctgtggatgtgggtggtgcatcaccccacagcaagaccatcagtgagagcgagctgagcgccagcgccactgagctgctgcaggactacatgctgacggtaggcctccgctgcagggacgctgggctgcatgagggagggggtgccccagggaggatggggggaaggggaggaggaggaggagcagtgcagggcaggctgcagtgagtgaggtcacctagagcactcttggtcaattttgctgacatcactgccttttcctggggatagtctaggagagcatcagtcagtggggctgagttgggagtgctgtggccgtcagggctggactgtgggcctgtgcttgggtcctgggggaggggagggaacggtggcccctgcaaggccacatggccagacatttttatcctccccatcttatatagttctgtcattgcaaactcaagtcttcctgatttgcctgtgtgcctgtgtgtagcctaagggcacaggcattggccccgggccaggttgccaacttccaccctgccctgctggctcctgtccctcccatgcactctgtgttccagctcaggagagtggagctgcccgggtgccttggtctcctctgggtggccccgtgccaggtctggtaggatggggacacattgtggtcattctgatgccccagcctgtgcagaggtgaagccagagacagctggtgctctggctggggttagtggctgtggcaaggtgggcccgactgccgactcttgcctactgtgcccagccccctatctggctctgctctcttgcagctgcgcaccaagctgtcatcacaggagatccagcagtttgcagcactgctgcacgagtaccgcaatggggcctctatccacgagttctgcatcaacctgcggcagctctacggggacagccgcaagttcctgctgcttggtgagtgggccctggaaagagggtggcttgtccaaacctggcttggagaggctgatccctcctgggaatgtgcacacggacccctcagtgggtgcagcaggggctccatcagggatgggagatttgaaccagagatggcatgagagcagagtccagagatcggggaatctgctgtgattagtcagaagggcttttcccaggtactgttgggggcccaccgacaggccttcattctcctgggaactcaagctgagctgggtgggccctgccaggaagtagcagagatcccccaggagcagggctgggagtgaacacaaccctgagatttaggaaaacagtgctggaggagccagagaggcatgggttttggtgaatgtgtaggacttcaaggcggaaggaccagcgtttgccaagacccctaaaatgctcggcacattaggtcagtgcggctagagggctgtgtggtctgagcagcagagttggatgttggccccacacctctcaggggcggtgacttagctgtggtttccctctgccgacacttagaacacagcaagtttgcggtaatgtgttgctagtagccagttgaaggcttctgggtcctggcctgttttccctgcaaaccaaggaaggtgggtttgttaaccatcgtaccgacctggcagtggcaaacgtggattgcctgcccagggctccccgctcttaggagcgtgaagggctggaggctggggcagcctgtctgtacaataggttctgtctaagcagtgcctgccccttctgtgctgggccctgcgttgcctcctggcatgggactctgtctgcccctccacatcggggagtagagattctgagagacacactaggcttcccaaataagagggcagccctctgagttgggacagtcacctaggtcatggcagggaaactggactttggcatgaggcctgcctctgaggactgcacccttgttgccgggtgccagcaggtggctttgagcactgctctgggcctcagctttccccactgtaaaatgggtcctttgtgaggactaatagagaatgagaggaggccacaggttcttggcctgtgctggtgccttgaggccagggagtgtgcatgtggcagaggcagtaagctgtcagggccagcagcagtgtctgtcaagagttgaggttttagccaaactgtctggccccaggaagcatgatttcaaccaggatgctagatgcagtgagcatggcatcagggtccccaaggccatgcaccaggggcagctgtggccctgtcagggggctttgagccctgagagaagagctgagtgggctgagccgaactggaggtgccatgctgggtgttgtgtgtctgcaggtctgaggcccttcatccctgagaaggacagccagcacttcgagaacttcctggagaccattggcgtgaaggatggccgcggcatcatcactgacagctttggcaggcaccggcgggccctgagcaccacatccagttccaccaccaatgggaacagggccacgggcagctctgatgaccggtcggcaccctcagagggggatgagtgggaccgcatgatctcggacatcagcagcgacattgaggcgctgggctgcagcatggaccaggactcagcatgatggacagtggatgggggggcacccacaccttccgcgcagtcgtcataggccttcccagaaggagctgcccagacctgcgtgtcagcccttggtggtggccagggagaggcgcccggtgcagatggccccgggcggcccaggtcctctactgtgaaggagcagggagctgccgagggacacgagcctcagtgcggggtggaaggctctttgccttgtccaccagggctcagccaagccctgcagtgtgtccccgctcggggagggcccggccgagcgggcagggagagccagtcctgtcggctgggcccttggacggctgtcagttttgcacatgatgttcctattgtaactctcagagaccttaaaaagaagtttactgcaatgtgaataatttaatctctggttgccaagca

SEQ ID NO: 1188 - DNA, 261 bp, Homo sapiens
ctctgtccctgggtccccatctgccctgcagcacctgggactcggcagtggtccctgggggctggggtggaggaggcaacaggctcttgtgccacaggaaggacttgatttggacttgagcagtgtggatgtggggcaggagcgggtgttctgaggcctttcgtgggcagcgtgtgtgagggtagcgtgtgtggcatgtgttgggggcaccttgatctttacatcctgtgcactgaatccttcaaggtcactggctgtgcc

SEQ ID NO: 1189 - DNA, 536 bp, Homo sapiens
gggattacaggcatgagccactgtgcccagcctgaattttcatttaaactaatcttcaagcttgatggaacctttatctactgttgacataccacctgtatttctaatgaagacatctatctcgtcttttcagaagtctccatttgtgtatatgattcaatatattggcctttcctttaaaaatatcagagaacaacaggttaaaactaagcacagctctagtttgtggggcattaacaagagaacagatttcaaattaccaagttttctcttccttttgttccactctgttgtcaggttatcatgcagcttggaattgaccaagtggctcagtttaggatcattgatagtactgtgataagactttctcttttagcaatcattgttctttaatgactattgacattttgcatctgtatatacgtaatcacatccagagattatttctgtctccctgctacagacccttgtaagttttggagtctttcagaaagaggtctgtttcatggccagaatgttgaccatgtaagctttat

SEQ ID NO: 1190 - DNA, 536 bp, Homo sapiens
gggattacaggcatgagccactgtgcccagcctgaattttcattgaaactaatcttcaagcttgatggaacctttatctactgttgacataccacctgtatttctaatgaagacatctatctcgtcttttcagaagtctccatttgtgtatatgattcaatatattggcctttcctttaaaaatatcagagaacaacaggttaaaactaagcacagctctagtttgtggggcattaacaagagaacagatttcaaattaccaagttttctcttccttttgttccactctgttgtcaggttatcatgcagcttggaattgaccaagtggctcagtttaggatcgttgatagtactgtgataagactttctcttttagcaatcattgttctttaatgactgttgacattttgcatctgtatatacgtaatcacgtccagagattatttctgtctccctgctacagacccttgtaagttttggagtctttcagaaagaggtctgtttcatggccagaatgttgaccatgtaagctttat

SEQ ID NO: 1191 - DNA, 443 bp, Homo sapiens
ccttttggtcctctttgcttcaggtatttacctctggcatccctggaatctctgattccctttatttcaactgcttcttagaggggcataggatacctttttctaggccatgcaagaaatgtccagagaacactatgctctttgaataacagttaaatgtcctttctatgctggaatgcttttctttgtaggtaacttcacagaaatgtataaccctttatttctgtggtcagaagagtgtggagttccatggaggtggttgctgtcatatagaatcttaccacaatcacttcctgagtctatgctgcagctgacagcagctgtcttgcggtagagcctttgacagtgccagctataactctaatgtcctcagtttgccttccctttcacctgtgagcttactcagactgaaccctcagttttacctttaccctccactcctt

SEQ ID NO: 1192 - DNA, 443 bp, Homo sapiens; identical to SEQ ID NO: 1191

SEQ ID NO: 1193 - DNA, 770 bp, Homo sapiens
  SITE (20): n equals a,t,g, or c
  SITE (30): n equals a,t,g, or c
  SITE (186): n equals a,t,g, or c
  SITE (200): n equals a,t,g, or c
  SITE (201): n equals a,t,g, or c
  SITE (202): n equals a,t,g, or c
gaccagcctgaccaacatgngtgaaacccncatctccactaaaaatacaaaagtagctgggcatggcggcgcacgcctatagtactagctacttgggaggcagaggcaggagaatcgcttgaacccgggaggcagaggttgcaatgagcctgagatcgcgccactgcactccagcctggcaacaangagcgaaactccannntctcaaaaaagaaaaaagaaaagttctgtggggacacgggagaagggattatcatttctaaagtctttgcttattgggggacacctgagccttgttggctttgaaagaataaaccttgacagacccacgtctggggactgtggaaggaaagaacccggaagggatgttgcctgcagcaggaagtgaatcctgagacaactgttcatagaggatctgattgtcatcctcaaagagttggaatttttttcatggggcggtggaattcacattgtgtcccgcagggctctagggctctgagaagagaccaccaggccaaggcagggagaagtgaaggaaggaggaggccagcactcagggccctcacccggactgtgtccctgcagcctctgctctctgccaggtgacatttgcaggagctaatgagtggcttgagggggctgtagttacctcccaccctgtgtgcatcagctgtccccaaaccttcccaaataaacatgcaaacaaaggaaaagcgtgtgtgctctaggccacttagctatatcgacaactgacaataataggcatagag

SEQ ID NO: 1194 - DNA, 767 bp, Homo sapiens
gaccagcctgaccaacatggtgaaaccccatctccactaaaaatacaaaagtagctgggcatggcggcgcacgcctatagtactagctacttgggaggcagaggcaggagaatcgcttgaacccgggaggcagaggttgcaatgagcctgagatcgcgccactgcactccagcctggcaacaagagcgaaactccatctcaaaaaagaaaaaagaaaagttctgtggggacacgggagaagggattatcatttctaaagtctttgcttattgggggacacctgagccttgttggctttgaaagaataaaccttgacagacccacgtctggggacttgtggaaggaaagaacccggaagggatgttgcctgcagcaggaagtgaatcctgagacaacttgttcctagaggatcttgattgtcatcctcaaagagttggaatttttttcatggggcgatggaattcacattgtgtcccgcagggctctagggctctgagaagagaccaccaggccaaggcagggagaagtgaaggaaggaggaggccagcactcagggccctcacccggactgtgtccctgcagcctctgctctctgccaggtgacatttgcaggagctaatgagtggcttgagggggctgtagttacctcccaccctgtgtgcatcagctgtccccaaaccttcccaaataaacatgcaaacaaaggaaaagcgtgtgtgctctaggccacttagctatatcgacaactgacaataataggcatagag

SEQ ID NO: 1195 - DNA, 767 bp, Homo sapiens; identical to SEQ ID NO: 1194

SEQ ID NO: 1196 - DNA, 760 bp, Homo sapiens
gaaagaatttattgttggaaaacggggcggcaagatggacaacattctctgggaccaacgggatgtgcagcctcctgggctcaggcctcaccagctcctgcacagtggtgggggtgaggactgagggacacatcacatctcctgggagcagaagacgatgtctgcgaacccagctcaatatgcatggccttgtccccaggcaggggcggcctcagctggccaggtgtccccgtcactgcagagttctggtcttagactggctgcacacggagactccagggcagcaaaacatcttctttcctcaccctcaggctctctgagccagcacctcctgatccagatccatttctgaactcctggatccaagaccaaggtcattctcatcaacccttaagccagtgaaagactcttcctggggcctcgtgtgctggtgcggcttccagataatgatagccaaggtcacacttgccgagagccctggtgattcaggcactcttcttagtactttatgcaaattatctcattgaatccttacaacaaacctctgagggagctggaattaccatattctttccatggaggaggaagcgaagggcagagaggtggagccacttgccctgctcacagagctaggaggaggcaattcgcaatgtgaactgggtggctgcgtctccctccacgctcttcactgctctgcccacctgttctcagtccactggccaaccagaatactgtcccagatagcaagtgtgacactgtt

SEQ ID NO: 1197 - DNA, 5080 bp, Homo sapiens
gaaagaatttattgttggaaaacggggcggcaagatggacaacattctctgggaccaacgggatgtgcagcctcctgggctcaggcctcaccagctcctgcacagtggtgggggtgaggactgagggacacatcacatctcctgggagcagaagacgatgtctgcgaacccagctcaatatgcatggccttgtccccaggcaggggcggcctcagctggccaggtgtccccgtcactgcagagttctggtcttagactggctgcacacggagactccagggcagcaaaacatcttctttcctcaccctcaggctctctgagccagcacctcctgatccagatccatttctgaactcctggatccaagaccaaggtcattctcatcaacccttaagccagtgaaagactcttcctggggcctcgtgtgctggtgcggcttccagataatgatagccaaggtcacacttgccgagagccctggtgattcaggcactcttcttagtactttatgcaaattatctcattgaatccttacaacaaacctctgagggagctggaattaccatattctttccatggaggaggaagcgaagggcagagaggtggagccacttgccctgctcacagagctaggaggaggcaattcgcaatgtgaactgggtggctgcgtctccctccacgctcttcactgctctgcccacctgttctcagtccactggccaaccagaatactgtcccagatagcaagtgtgacactgttgccaatagcagggttcttggtaagatgccattccagagaaggagtctgctaaaaaagaaaataataaaaaataaacctgcgactgcagggaatggaaaacacatggatgcatttttttaatgtgagatgaatctttcctgaacagttcaaagtgcctatgcctgctcactgttaataagaaaagagttgaagggtgaaaaattaaacaaaaaaaggccttcttttccagaagagagggaagaagaaataagagagagccacacctaggtcgggcgtggtgactcacgcctgtaatcccagcagtttgggaggccaaggcgggtggatcacttgaggtcaggaattcaagactagcctggctgacatggtgaaacctcatctgtactaaaaatagaaaaattagctgggcatggtggcatacgcctgtcatcccagctactctggaggccaaggcaggagaatcacttgaacctgggaggcagaggctgcagtgagccgagattgtgccactgtattccagcctgggcgacagagtgagactcagtctcattaaaaaaataaaaaaaaaagagagagccacacctagattcccattactgatccaaagaaaccaagttagcggttccattcctgctgcttctgcactgattgggagggaagcaggactgcggcagtcctccttgttcctcatcacacaaccgaatggtcctaggagaggccgagagagaaggctacagcttgctccggtgccccattcttcccagggctgcagtctactggtctacttgggatagcactcgagccttgggagagcaatgaggagaatcgttggcgtctcagaagtggagaacaggttcccatccaagctgagctgaggggacgatggctcaggtcagagctggctacactccccttgccatttgttatctttttagtgcagggatgtgaaagggaggggctggggtgggagggtgagaaaggccattttgttgagtgcttattattgtgcagccagcaggatgctgggcattttaaaataggatgtcgcaggcgtcgtggtgggtgagtactggctctgttttacagatgaggaaactgaggctcaagattttctgttaataagtgttgaggcccgagtctacttgaccttaagccatctgaccttaagacccttaaggtcttttccgggagaccttggtagccaaaactaatcagtgaagagcttcatgagaacattcttcccctacttccatgcctccatgcctgaagcagcctctgggatgtggcattctttcttgtgactggtggaaattaaactctaaggaagaaccctggaagaaacattccagagttgttttgcttttatctgcaaattagcagcaaacagagagcctcttcatccacagatttcatcattgtgcttataatgttaaaaatacactccatgcgtgtggttaacagcaaatggcccagtcatacacatgctcggattgccagagcatcttctcttccctttcgaggcaccgccttttgcacgtgccgagctttagggcttccttctttcggaggagatgagcccgaattctttttccgcacccatgtttcttctgggggagacagcaggtgttatagaaggagcacaacttgggattcagccaaagttggctttgaattattgctgtgtctgtgggcatgtcacttagcttctctgagcctctgtagaatacgggaaacaggttactcaaagaattacatgagtgggtacaaataaatgtctcagtccttaacgtcttgacattccttctctacctggagccaggggcctcttttgattctcaagcccttgacattttataaagctatggagatcaaagatttattcctccctacctagacaaatgagatttccctgaaattacaaatgatttttctgcatctttccagctatcagttaggaattggcaaacattttccgtaaatgcccacatagtacatgactgtgcgggtcacgctgtctctctcactgttactccactttgctgatgcagcctgaaagcggtcatagatgatacataactggctgagtgggactgtgttcccataaaacttcgtttacaaaaacgggctggatttggcccaggagccatagttgctgacccctgatgtagagtatggagaggtactgggtttaggtgctggaaatgcaaaaatgaatgagagtccttgacctggagggttctgcctgtaacacacttgcacgtagtgttggtaagggatattctatttgcaagaggacatttaaggtaacaggaaaggcaggtgcctttggttgttcttacaggctggtgtcactagaggatcaacccaggtgtatctaaatctgctcctgcctgcaagggtgagctcctcagacctgccgcttaaacatccttgatatctctcagtgctattaaatactgctcagtggtcccaggccaatttttacatcatagttttccttgggattgtagcgtatcttaggaaatcctacatccactccccatgttactgtaacactagcgcgagccagttcagattctcggttttggacagctgcctttctttggcatcatctggttgacctgtgcctcagtttccctggctgttaaattggagttaaggatgaaatagtgcatgagaactgatatggattggctgtgtccccacccaaatttcatcttgaattgtagcccccaccattcccacatgttgtggaagggacctggtgggaaataatcgaatcacgggggcggtttcctcccatactgttctcatggtagtgattaagtctcatgagatctgagggttttataaggagtttccgctttcgcttggctctcattctcctgcctgccaccatgtaagatgtgacttgctcttccttgccttccaccgtgattgtgaggcctccctggccatgtggaactgtgagtccattaaacctctttcctttataattacctttattagcagtgtgagaacagattaatacaagaacatttgttccctgttttctaaacttaaaaaaaaaatcatgtttgtgtaaccctttaagaagaactcctccttagcaactcagtaggggtaatgggtcaaagtagaacctaccctcataggagaacacagggagggctctggccaatgagccttgaaacatctcctggaaaccctgggacctgggaggagaggctaaaaacaaccacagatgtagggcagagcaggagaagtctgcagcccagggacccagccactgtaaggctgctcattgactcttcaaaccttgtttccctcatctgaagcaggagcgagtttgggttagttgaatactttccactcattgcagtaggtctgagtgtttcaccaattggttgaaaattcataacttaagaatagttctatattggtagcttcagcctggaggaattctaggcagttgttgatttgtgcttttcttataggtgatccttaaaagtctgttgatataaagaggatggcagagagtttggcatgttaccccgtgcgtgcaattgaggggtgtgtgtgtgtgtgtgtgtgtgtgtgtgtgtatgtatatgtatatgtgtgcacgcacagcctcttggcagtttgcctcttgcctcccatctctgctctgcagccagagtgactgaagtgtgagctggaccagcctctctcttgcttaaatccctcataggtttcccccgtcggagcacagaccaaagccgtgctcatctcccttatgcttcaggctcctcccagatgcctcatccatccctgtcctccgtggacttttcacagccttaactgtctaatgaattgtgctgactgctgtgtggagactgtctctcctggtggattgtatgctctgcaagccccgggacttcctctccccctgtcacctgcagagagtctgactactcaatggaatgtagtgcaaatctgtggaataaacgtatgcataactagtgtgcatttgtggaatggagcagtcagcccctcattctgggcgagggctgccaaaccccaaaaccaccatgccctcagcgggttttccacagagcccagaatgtttctctgccaggtgctgggctgggatggttcttgcaggatcctattggagcttcctaacaaccccaccagggcagcttctgttgtccccattttccaggagggaagtaaggcccagagaagtggagtggcttattctcggccacgcagctgagtcagagctcaggcccagctgactcaagtcttgttcagtctttaaaaaaaaaaaaaaag

SEQ ID NO: 1198 - DNA, 5080 bp, Homo sapiens
gaaagaatttattgttggaaaacggggcggcaagatggacaacattctctgggaccaacgggatgtgcagcctcctgggctcaggcctcaccagctcctgcacagtggtgggggtgaggactgagggacacatcacatctcctgggagcagaagacgatgtctgcgaacccagctcaatatgcatggccttgtccccaggcaggggcggcctcagctggccaggtgtccccgtcactgcagagttctggtcttagactggctgcacacggagactccagggcagcaaaacatcttctttcctcaccctcaggctctctgagccagcacctcctgatccagatccatttctgaactcctggatccaagaccaaggtcattctcatcaacccttaagccagtgaaagactcttcctggggcctcgtgtgctggtgcggcttccagataatgatagccaaggtcacacttgccgagagccctggtgattcaggcactcttcttagtactttatgcaaattatctcattgaatccttacaacaaacctctgagggagctggaattaccatattctttccatggaggaggaagcgaagggcagagaggtggagccacttgccctgctcacagagctaggaggaggcaattcgcaatgtgaactgggtggctgcgtctccctccacgctcttcactgctctgcccacctgttctcagtccactggccaaccagaatactgtcccagatagcaagtgtgacactgttgccaatagcagggttcttggtaagatgccattccagagaaggagtctgctaaaaaagaaaataataaaaaataaacctgcgactgcagggaatggaaaacacatggatgcatttttttaatgtgagatgaatctttcctgaacagttcaaagtgcctatgcctgctcactgttaataagaaaagagttgaagggtgaaaaattaaacaaaaaaaggccttcttttccagaagagagggaagaagaaataagagagagccacacctaggtcgggcgtggtgactcacgcctgtaatcccagcagtttgggaggccaaggcgggtggatcacttgaggtcaggaattcaagactagcctggctgacatggtgaaacctcatctgtactaaaaatagaaaaattagctgggcatggtggcatacgcctgtcatcccagctactctggaggccaaggcaggagaatcacttgaacctgggaggcagaggctgcagtgagccgagattgtgccactgtattccagcctgggcgacagagtgagactcagtctcattaaaaaaataaaaaaaaaagagagagccacacctagattcccattactgatccaaagaaaccaagttagcggttccattcctgctgcttctgcactgattgggagggaagcaggactgcggcagtcctccttgttcctcatcacacaaccgaatggtcctaggagaggccgagagagaaggctacagcttgctccggtgccccattcttcccagggctgcagtctactggtctacttgggatagcactcgagccttgggagagcaatgaggagaatcgttggcgtctcagaagtggagaacaggttcccatccaagctgagctgaggggacgatggctcaggtcagagctggctacactccccttgccatttgttatctttttagtgcagggatgtgaaagggaggggctggggtgggagggtgagaaaggccattttgttgagtgcttattattgtgcagccagcaggatgctgggcattttaaaataggatgtcgcaggcgtcgtggtgggtgagtactggctctgttttacagatgaggaaactgaggctcaagattttctgttaataagtgttgaggcccgagtctacttgaccttaagccatctgaccttaagacccttaaggtcttttccgggagaccttggtagccaaaactaatcagtgaagagcttcatgagaacattcttcccctacttccatgcctccatgcctgaagcagcctctgggatgtggcattctttcttgtgactggtggaaattaaactctaaggaagaaccctggaagaaacattccagagttgttttgcttttatctgcaaattagcagcaaacagagagcctcttcatccacagatttcatcattgtgcttataatgttaaaaatacactccatgcgtgtggttaacagcaaatggcccagtcatacacatgctcggattgccagagcatcttctcttccctttcgaggcaccgccttttgcacgtgccgagctttagggcttccttctttcggaggagatgagcccgaattctttttccgcacccatgtttcttctgggggagacagcaggtgttatagaaggagcacaacttgggattcagccaaagttggctttgaattattgctgtgtctgtgggcatgtcacttagcttctctgagcctctgtagaatacgggaaacaggttactcaaagaattacatgagtgggtacaaataaatgtctcagtccttaacgtcttgacattccttctctacctggagccaggggcctcttttgattctcaagcccttgacattttataaagctatggagatcaaagatttattcctccctacctagacaaatgagatttccctgaaattacaaatgatttttctgcatctttccagctatcagttaggaattggcaaacattttccgtaaatgcccacatagtacatgactgtgcgggtcacgctgtctctctcactgttactccactttgctgatgcagcctgaaagcggtcatagatgatacataactggctgagtgggactgtgttcccataaaacttcgtttacaaaaacgggctggatttggcccaggagccatagttgctgacccctgatgtagagtatggagaggtactgggtttaggtgctggaaatgcaaaaatgaatgagagtccttgacctggagggttctgcctgtaacacacttgcacgtagtgttggtaagggatattctatttgcaagaggacatttaaggtaacaggaaaggcaggtgcctttggttgttcttacaggctggtgtcactagcggatcaacccaggtgtatctaaatctgctcctgcctgcaagggtgagctcctcagacctgccgcttaaacatccttgatatctctcagtgctattaaatgctgctcagtggtcccaggccaatttttacatcatagttttccttgggattgtagcgtatcttaggaaatcctacatccactccccatgttactgtaacactagcgcgagccagttcagattctcggttttggacagctgcctttctttggcatcatctggttgacctgtgcctcagtttccctggctgttaaattggagttaaggatgaaatagtgcatgagaactgatatggattggctgtgtccccacccaaatttcatcttgaattgtagcccccaccattcccacatgttgtggaagggacctggtgggaaataatcgaatcacgggggcggtttcctcccatactgttctcatggtagtgattaagtctcatgagatctgagggttttataaggagtttccgctttcgcttggctctcattctcctgcctgccaccatgtaagatgtgacttgctcttccttgccttccaccgtgattgtgaggcctccctggccatgtggaactgtgagtccattaaacctctttcctttataattacctttattagcagtgtgagaacagattaatacaagaacatttgttccctgttttctaaacttaaaaaaaaaatcatgtttgtgtaaccctttaagaagaactcctccttagcaactcagtaggggtaatgggtcaaagtagaacctaccctcataggagaacacagggagggctctggccaatgagccttgaaacatctcctggaaaccctgggacctgggaggagaggctaaaaacaaccacagatgtagggcagagcaggagaagtctgcagcccagggacccagccactgtaaggctgctcattgactcttcaaaccttgtttccctcatctgaagcaggagcgagtttgggttagttgaatactttccactcattgcagtaggtctgagtgtttcaccaattggttgaaaattcataacttaagaatagttctatattggtagcttcagcctggaggaattctaggcagttgttgatttgtgcttttcttataggtgatccttaaaagtctgttgatataaagaggatggcagagagtttggcatgttaccccgtgcgtgcaattgaggggtgtgtgtgtgtgtgtgtgtgtgtgtgtgtgtatgtatatgtatatgtgtgcacgcacagcctcttggcagtttgcctcttgcctcccatctctgctctgcagccagagtgactgaagtgtgagctggaccagcctctctcttgcttaaatccctcataggtttcccccgtcggagcacagaccaaagccgtgctcatctcccttatgcttcaggctcctcccagatgcctcatccatccctgtcctccgtggacttttcacagccttaactgtctaatgaattgtgctgactgctgtgtggagactgtctctcctggtggattgtatgctctgcaagccccgggacttcctctccccctgtcacctgcagagagtctgactactcaatggaatgtagtgcaaatctgtggaataaacgtatgcataactagtgtgcatttgtggaatggagcagtcagcccctcattctgggcgagggctgccaaaccccaaaaccaccatgccctcagcgggttttccacagagcccagaatgtttctctgccaggtgctgggctgggatggttcttgcaggatcctattggagcttcctaacaaccccaccagggcagcttctgttgtccccattttccaggagggaagtaaggcccagagaagtggagtggcttattctcggccacgcagctgagtcagagctcaggcccagctgactcaagtcttgttcagtctttaaaaaaaaaaaaaaag

SEQ ID NO: 1199 - DNA, 299 bp, Homo sapiens
attttatctctgaagcaagattcatataagatttaaaataatttgttatgatctgtaatactaaaatgaacagataaattggcgtttttaataaaaaaattgagaaaacttattcacatattcactaaattggtcacttcataaattatcagaactcctgtttaaatataatttcatattttgtggacccataatacttgttggtaatttgtgttgatacttaagttgcataattctgtcagtatcatcacttcctggtgaaaattttaagccattgttgaaaatccaacaaatttttc

SEQ ID NO: 1200 - DNA, 299 bp, Homo sapiens; identical to SEQ ID NO: 1199

SEQ ID NO: 1201 - DNA, 212 bp, Homo sapiens
gctcactgcaagctccgcctcccaggttcacaccattctcctgcctcagcctcccgagtagctgggactacaggcgcccgccccgtcgcccggctaattttttgtatttttagtggagatagggttttaccatgttagccaggatggtctcgatctcctgacctcgtgatccacccgcctcggcctcccaaagtactgggattacaggcgtg

SEQ ID NO: 1202 - DNA, 299 bp, Homo sapiens
tacccattttttttttctgagacggagtcttgctctgtcacccaggctggagtgcagtggtgcgatttctgctcactgcaagctccgcctcccaggttcacaccattctcctgcctcagcctcccgagtagctgggactacaggcgcccgccccgtcgcccggctaattttttgtatttttagtggagatagggttttaccatgttagccaggatggtctcgatctcctgacctcgtgatccacccgcctcggcctcccaaagtactgggattacaggcgtgagccaccccaccaggcc

SEQ ID NO: 1203 - DNA, 4255 bp, Homo sapiens
cattcccataccattggtgggctgcctgaatccgatgaccagtcagagctgccttctccccctgcacttcccatgtctctgagtgcaaagggccaacttaccaacataggttagtgttttcagtcactcactgtggcatggggtgaagcaggggtcaccctgcagggtgaggcaaggcaggtgggctttgggtttcatctcatgtttgactcatgctgtattgggttgtttcatggtgcctcagtttatccacccaaagtaagattgaaggtagagtactttgagatcctaaactgaaaagttgcccctaggcacaagttgtagggtccttttagcatcagagagcctgaatggtggcatggaaaagctgtaacccaaagcccagagatcagaccagtgcaagagcaggcacattgaactgccggaaaggagccaccacacccagtactactagggccagctaatgagagggcaatactgaaatgtcaggccgacggggaggaaggagggaaaggttgttgattgccaaggacgagatctgcctccaaactcagccaagtccagattcctcaactgctctggctgagcccaggccatcctaacgctgaaggcagggctgactcagatgtgtcctggccacccccttcctaaagcctagggagaaaggagagctaggaaataaggaagtgacttagagacagggaggagaggaagcatcaggtggagggtctggcctagcacagaagcacaccagctccggttctgtgaagcagtacgccatgattggcctactaggaatccattcaggaatagtgcctgggataggcctgttatctgcttgctgcatctctttaaatccatctcttctttcagctgagtaaaagaaatcagttaataaaagacaaggacctgtaacacacccatgcagtgactgtggggaatttgaggaaagactaggaattgggatcacttggcctagggaaaagaaccattgttcagacaggatcatctgccctctgaagggctactaaatggaggatggggccagcttgttctctatctccattgaagaccaaataagaagaattgcatttatgctgcagaatgaggggctgggctaagcaataattacctcaggaatttgaaaaggtcaacagagaggtgtgccatcttcttctgcacaggtctttatggacagattagacatccacctgcctgtatggaggcagaagaatagacaagggagctccttgtgggtatgaaaccctgaaaggctgtaatcccagcaatgggcaaaggggtaaggcatctgcaggttaacgggattcagctgaacccagcttcaaagcacattccacaagccttacctgacactttcacctgctctgtccatctgaccttcaagccggggcaatgctaggcaaagagggccatgtttcttgatgctttagcgccaacccagtcactcagagtgacactactttgtggggagattctcacgcccttccacaatgccagggcaacgggatcccgtagcccagcccccttctctagctggtgctttttcatcattcagatctgggtcttggtttgaattttcagtcctcctgagctggcagttgtgttttagagaaccacagcatctcattttcatcagcacatccgagtgatgtgaaggtctcagaaaagctgccaggcccccagcctaaccttcaaaagcaacaactctgaggcaggcagggttgagggaaggtctttattccagacagcagggtccttctccattagggcttgatctccccaggagggaccccgctcctaaccaccagctgcttgcacactcccaccaccgcacctgccccttcctctcctgccctctccccatttgcctctcatgctcccggtgctccatcccccaagggcccggagagctgatgaccctgcctcttttcctgccctcctgctccctctcctgtcccccttccctctgtccttccagtgagtcccactgcggccaccacgccaagaatcacccgctccaacagcatccccacccacgaggcggccttcgagctgtacagcggctcccaaatggggagcaccctgtccctggccgagagacccaagggaatgattcggtcaggatccttccgagaccccacggacgatggtgagacttcatgctagcgcggttcacgctcattccagctctgctgggtcccctcacccaccacctccactcccaccactcctaccaccacacacatatatgattcacagaacatcaagttgggccatttcagttttttctccccatccctttgaagggtctggggacccagaaaccttgggtggcacatctagcactggggcattgggatggagcatccatcactggggctgggggagggaaattgagcatggaagggttaaatggcatccctcaggatgctctgaaaaccacagcttctctcctcctcattctagccatagtctttcctccccacagtctctcaaatatatgaaaagaaaacaggacataatagtagctcttaataaatccttacaaataattaggcatctcatttctctttcaaaaatgttccaaagatgagcatcagggagggccatctgattgttggtggtgatctgggtgttagtactgatcagagctagaagaccaggcttatggcaggttagctctcccattattattttcaagatggtcattccaggaggcatctgctacagacatgctttagttctcaccataggttctactgaataatcagaatgcatattcctcacttaaatattgttttcatctgaatgatccccaagatcctaagcacatcccccagtgctgagaggaggaggcgcgggcagaatttcagtatttgttctgagcaactctgatgagaaactcccctctcctgcggctaaggtgctttcctgactgggaagataagatgatgactatccatgaaagtctcctttcccttctctgaaaccccgtgcccctcagagcgggctaagcaagggactgccatacccaggctgccagagaatgtaggctgaaagaggaggctagcttgactcaagaccttgctttgggctgttttgataccagctgggttccctactctgttctttctgtttgctccagatgccctccagaatcacaatccaaactcctgccttagggagtcttccaaaaaccccttgtccctggaacccactgttaactctttgtgttctccttctctttcagttcacggctcagtgctgtccctggcctccagtgcctcctccacctactcctcagtaagagcattaacttctcttcccctctcatcccctcccctctaccatcccatgctccctagaacctccttggagttgggtaactgggcgggggatgggggcactgctggctcttcactgtacccattggggtgggaatgggggaggcacctagagcttgtagcattcacttgggtgcctcaggtcctcagtggtctttctggccccaccaccagctcctgagcaactctggtgatttttgttcccctcctttgaaaaatggagaatccccatgttagcaagccctttctgtgccatggtagatgggaagcttttatgaaggtgagatgaatagatttctaggacccggactccagaaccctagaagtgaccaagtgtttattgtggggcaccagccacagcatttggctattaggcatttcttgattcgtagatttgttttgctcctaattctttactccaagttgctggcaataaccgttagttctcaaaccaaccaaagtctcatttcctagcctttttggcaatgacaaagtttgctggagatgagctccaaagaaatcttttattgaaaccctagtatagatctgagccgagtcctgtgaggagccagggccaggaaacaagagtttcagcctctctgcacctctgagtcatgcttcttcacatttcctaccctgccactgggacctgacttcttcacctccatagtaactacttcctttctctctctttctctccttctgtgctcccttcttcaggctgaggagaggatgcaatctgaggtagggtggaaagcctttgtctctgcttgttaacatcactgcacctcattttccttccaaatcttatacagcttctgcagccagtagtttgtatttctcttccttttacagcaaatccggaagcttcgtagggaactggaatcatc

SEQ ID NO: 1204 - DNA, 4254 bp, Homo sapiens
cattcccataccattggtgggctgcctgaatccgatgaccagtcagagctgccttctccccctgcacttcccatgtctctgagtgcaaagggccaacttaccaacataggttagtgttttcagtcactcactgtggcatggggtgaagcaggggtcacctgcagggtgaggcaaggcaggtgggctttgggtttcatctcatgtttgactcatgctgtattgggttgtttcatggtgcctcagtttatccacccaaagtaagattgaaggtagagtactttgagatcctaaactgaaaagttgcccctaggcacaagttgtagggtccttttagcatcagagagcctgaatggtggcatggaaaagctgtaacccaaagcccagagatcagaccagtgcaagagcaggcacattgaactgccggaaaggagccaccacacccagtactactagggccagctaatgagagggcaatactgaaatgtcaggccgacggggaggaaggagggaaaggttgttgattgccaaggacgagatctgcctccaaactcagccaagtccagattcctcaactgctctggctgagcccaggccatcctaacgctgaaggcagggctgactcagatgtgtcctggccacccccttcctaaagcctagggagaaaggagagctaggaaataaggaagtgacttagagacagggaggagaggaagcatcaggtggagggtctggcctagcacagaagcacaccagctccggttctgtgaagcagtacgccatgattggcctactaggaatccattcaggaatagtgcctgggataggcctgttatctgcttgctgcatctctttaaatccatctcttctttcagctgagtaaaagaaatcagttaataaaagacaaggacctgtaacacacccatgcagtgactgtggggaatttgaggaaagactaggaattgggatcacttggcctagggaaaagaaccattgttcagacaggatcatctgccctctgaagggctactaaatggaggatggggccagcttgttctctatctccattgaagaccaaataagaagaattgcatttatgctgcagaatgaggggctgggctaagcaataattacctcaggaatttgaaaaggtcaacagagaggtgtgccatcttcttctgcacaggtctttatggacagattagacatccacctgcctgtatggaggcagaagaatagacaagggagctccttgtgggtatgaaaccctgaaaggctgtaatcccagcaatgggcaaaggggtaaggcatctgcaggttaacgggattcagctgaacccagcttcaaagcacattccacaagccttacctgacactttcacctgctctgtccatctgaccttcaagccggggcaatgctaggcaaagagggccatgtttcttgatgctttagcgccaacccagtcactcagagtgacactactttgtggggagattctcacgcccttccacaatgccagggcaacgggatcccgtagcccagcccccttctctagctggtgctttttcatcattcagatctgggtcttggtttgaattttcagtcctcctgagctggcagttgtgttttagagaaccacagcatctcattttcatcagcacatccgagtgatgtgaaggtctcagaaaagctgccaggcccccagcctaaccttcaaaagcaacaactctgaggcaggcagggttgagggaaggtctttattccagacagcagggtccttctccattagggcttgatctccccaggagggaccccgctcctaaccaccagctgcttgcacactcccaccaccgcacctgccccttcctctcctgccctctccccatttgcctctcatgctcccggtgctccatcccccaagggcccggagagctgatgaccctgcctcttttcctgccctcctgctccctctcctgtcccccttccctctgtccttccagtgagtcccactgcggccaccacgccaagaatcacccgctccaacagcatccccacccacgaggcggccttcgagctgtacagcggctcccaaatggggagcaccctgtccctggccgagagacccaagggaatgattcggtcaggatccttccgagaccccacggacgatggtgagacttcatgctagcgcggttcacgctcattccagctctgctgggtcccctcacccaccacctccactcccaccactcctaccaccacacacatatatgattcacagaacatcaagttgggccatttcagttttttctccccatccctttgaagggtctggggacccagaaaccttgggtggcacatctagcactggggcattgggatggagcatccatcactggggctgggggagggaaattgagcatggaagggttaaatggcatccctcaggatgctctgaaaaccacagcttctctcctcctcattctagccatagtctttcctccccacagtctctcaaatatatgaaaagaaaacaggacataatagtagctcttaataaatccttacaaataattaggcatctcatttctctttcaaaaatgttccaaagatgagcatcagggagggccatctgattgttggtggtgatctgggtgttagtactgatcagagctagaagaccaggcttatggcaggttagctctcccattattattttcaagatggtcattccaggaggcatctgctacagacatgctttagttctcaccataggttctactgaataatcagaatgcatattcctcacttaaatattgttttcatctgaatgatccccaagatcctaagcacatcccccagtgctgagaggaggaggcgcgggcagaatttcagtatttgttctgagcaactctgatgagaaactcccctctcctgcggctaaggtgctttcctgactgggaagataagatgatgactatccatgaaagtctcctttcccttctctgaaaccccgtgcccctcagagcgggctaagcaagggactgccatacccaggctgccagagaatgtaggctgaaagaggaggctagcttgactcaagaccttgctttgggctgttttgataccagctgggttccctactctgttctttctgtttgctccagatgccctccagaatcacaatccaaactcctgccttagggagtcttccaaaaaccccttgtccctggaacccactgttaactctttgtgttctccttctctttcagttcacggctcagtgctgtccctggcctccagtgcctcctccacctactcctcagtaagagcattaacttctcttcccctctcatcccctcccctctaccatcccatgctccctagaacctccttggagttgggtaactgggcgggggatgggggcactgctggctcttcactgtacccattggggtgggaatgggggaggcacctagagcttgtagcattcacttgggtgcctcaggtcctcagtggtctttctggccccaccaccagctcctgagcaactctggtgatttttgttcccctcctttgaaaaatggagaatccccatgttagcaagccctttctgtgccatggtagatgggaagcttttatgaaggtgagatgaatagatttctaggacccggactccagaaccctagaagtgaccaagtgtttattgtggggcaccagccacagcatttggctattaggcatttcttgatttgtagatttgttttgctcctaattctttactccaagttgctggcaataaccgttagttctcaaaccaaccaaagtctcatttcctagcctttttggcaatgacaaagtttgctggagatgagctccaaagaaatcttttattgaaaccctagtatagatctgagccgagtcctgtgaggagccagggccaggaaacaagagtttcagcctctctgcacctctgagtcatgcttcttcacatttcctaccctgccactgggacctgacttcttcacctccatagtaactacttcctttctctctctttctctccttctgtgctcccttcttcaggctgaggagaggatgcaatctgaggtagggtggaaagcctttgtctctgcttgttaacatcactgcacctcattttccttccaaatcttatacagcttctgcagccagtagtttgtatttctcttccttttacagcaaatccggaagcttcgtagggaactggaatcatc

SEQ ID NO: 1205 - DNA, 251 bp, Homo sapiens
ttttttttttttttttttttttgagacggagtctcgctctgtcacccaggctggagtgcagtggcacaatctcagctcactgcaacctccacctcccagattcaagcgattctcctgcctcagcctcccgagtagctggggttataggtgtgcaccaccaagcctggctaaattttgtatttttagtagagatggggtttcaccatgttggccaggctggtctcaaactcctgacctcaagtgatccaccc

SEQ ID NO: 1206 - DNA, 562 bp, Homo sapiens
cacaaaagtaaccatgtctgcaatttccgcagtagtttctggttttctctctgcccttcctctctggggaacccagctgtcaggcctggggtctatccgtcggaattaggtagaagaatctccaccaagattctgaatgtttccaacacatttcagcagcagttccctcaccacactagttattctctcgattctcttttcccaaaccctcaattcataagttgtaccagtttgtttgaagctcatgttaagcactttttcccactcttggggggcccataagaattgtaacataaacaagaaccatcttttctctcccttgtgccacacccaccaaagcaaatggcctgggtcacgtcctgcacaccccaggaaattcatgtctgggagatgctgggggggagaggcgccagggaggcagagaacattattatgtctgattcatttacactgcaatctgtcagccaccatgctgtcaaggctgggctgaagccaagaaattgaatttagagggtgatttttcttagaacaggaagttccatttggctaagagagaacaaac

SEQ ID NO: 1207 - DNA, 5584 bp, Homo sapiens
agggacagcaccagactattctctgcgtgttgcactgcatagtgaacctgcagacaattcccgtggatgtggaggaagctttccttgcccatgccattaaggcattcactaaggtgggtcatactcttcctttcccctctctgaaccacagatcagcatcatctttgtaaatcagaatccagaggtcaccgtcctcctctaaaataaaacatgtatgtgtatgttttcccttcatggaaatctgtttgacatttcttctaagtagttgcagagtcttgaccaaaaaaaaagtttccaaacaatgatcttaggaaaagctgaattgtgagttttttgaaggagaacgttggaacaaagagcttttatataaaagaaagagagaaacaactgagtgttgaatacatatttttagatcatgtgcctaatcagagtcagagaatctttgcttgtcgagtcagttctaccttgggtgtaagtaagaagccatctattgagaattaaacatcccacattgctaattcagtactgagtcctggttggcaaatcctaaggaaagagttaaaaaaaaggtttcctttctaaaagcccatccttttggatgcagcagtttttcctggctgaagaaagaagaagcagccaggttcatactgagagaaaagtttccccttaccccatcagctataatttgtttattacttctcattgatatgaaagtatctataatttgtttgttacctctcattgatatgaaagtgtcattaaacaaagaacccagcttttgaatgacaacatctgtggtaacattaatgataagaagttattatttatactcattaacaagttataaagattcttcctttttaatatttgtccagtctccttcccctccactctttccggagtgatgttcttacttcaggccttccttgttcctcatctggattctatggcactaaccactgacatcttttcaatctgttctccactgtttccagagtcagtagtctcaaatccaaaccgcgtggtcctttacatctgtatttacactttcatagactgagaggctacccaccatgtgaagaaggttgtggtttggtgtttaagaaagtaaacagagctgggagtggtggcttacgcctgtgatcccagcactttgggaggctgagatgggtggatcatgagatcaggagattgagaccatcctggccaacatggtgaaaccccatctctactaaagtacaaaaatttagctgggcatggtggtgtgcgcctgcagtcccagctactcaggaggctgaggtggaagaatggcttgaacccgggaggtggaggttgcagtgagccgaaatcgcgccactgcactccggcctggcaacagagcgagactctgtctcaaaaaaaaaaaaaaaaaagtggccaggcatggtggctcaagcctgtaatccaagcactttgggaggccaaggtgggcagatcacgaggtcaggagatcaagaccatcctggataacatggtgaaaccccatctctactaaaaagaaatacaaaaaaattaactgggtatggtggcaggcgcctgtagtcccagctactcgggaggctgaggcaggagaatggtgtgaacccgggaggcggagcttgcagtgagccaagattgcaccactgcactccagcctgggcgacagagcaagactccatctcaaaaaaaaaaaagtaaacaattcacaccattattaatgttaataaggagttttttgcaaaggggatagataatatagttatagataaaattaaattcctgagcttaactgaaaaaaatccttacgattggtctctctgaaagcagtaggaattctttacaacttcttttggccttttaaggggatacgaatgaaaagttagagataacagttgttcaaaatctgtctatagaaaatgttaggagacagttttccttgggtctctcatgtctcttcatagtctgatgagcagatgccctgaccactctctttgaggatcaactcttcactaatgtctggagagctctgcctggagagcagaaggcacacgttctgacttccaggataataaaaatgtttcccttcagggcaaaggttggcagatttgcttgcagcccccttgtgaaacattggagtttcctaagcttggggctcctcagctatgaggcaaaccccgtgcttgtgcagcctccacctaggcccttctgcattgcctccatgagacttgagagacaaggagaacccatgtgaacatgaagcacatgcagctgtgagaaataaaagttgtctgtctctgacccaggaatctcgtatcttctaccagtatccataacactggcaagctaacaggttaaggtctcagatcctttacagttgttgacagagggaacaacctttcatttgtcaaaatttatcagagagggagaaattccagaagcagagaagcagtgattgtgtgaccctgattctttcccagggagttacacattactctgggaatggggttgagggtgggtacttgctctggttctctgtcctgccatcactgctaacccagagtatggtaaacttgggtgaaaaatgcaaatatgtgtaaatagtgcgctcccatcaaggggaaaggaaatttactttatcaaggtggggtttgtttgtttgtttgtttgtttgtttgttttttgagacaaggtctcactctgtcacccagtctggagtgcagtggcacaatctcagctcactgcatcctctgcctcctgggctccggcaatcctcccacctcagcctcccaagtagctgggactacaggcatgtgccaccatgcctggctaaatttttaattttttgtagagatgaggttttgccatgttgcccaggctggtctcaacctcctgggctcaagcaactctcccacctcggcctcctaaagtgctgggattacaggcatgagccaccacacccagccagttgaggtttgtatatatgtgccaaacatgttagactcatagatacgctatcctatgaaggtgggtatcattatctctgttttacaaaggaggagatcaaggtccagagaggttgggtatgagatgaggacatgtagctggcaggtggggagctgggcttctattcaggtcactctgaccctgtccagagtggccgtagggcctctcagcaggacgtatacagctgatgtgctgttttaatatgggaaacttttctcttataccatcaatgattagtctcaaaaaattcacttcacacccactgttgacttgcttcatgactgggtgtatataattagactaaatatccaggcactagatttaattttggggttttcattcataagtttgatattgacatggttggcagttctaatagtctttcaaataaaatgtgtgaaatttattatgtgtattttatatagagttttgtttgtaagtctgttttttttctccaccccctccttctctcaaaatagaaactagttcaaattcttgttacagtgtcctgaatataaatttctttgtcaccaggttaattttgattctgaaaatggaccaacagtttacaacaccctgaagaaaatatttaagcacacgctggaagaaaaaagaaaaatgacaaaagatggccctaagcctggcctctagctttcactcgtggtgaatatttcagacctaaagatccagatagtatctctgttcatatgtgaataagttgaagattgtggggctactttttctcatagcactttattttgaatgttgttagtttgtgctgagaatggtcgtccgtatttgaaccaattatttattttaaaatatatttaagctacatttttgttttgaaaaattgccataaatttggtgccactttcttttatttatttgactgagttaatattattgtattaacattttaagtatatggtgtttacattcttatttcttttgacattttggaaataatcataacttgtctttccaaaataaccattttcttgatggaactcttcctagagtttttaccaaatagctaactttagtagtaaaacctcattgtgtatccattcccccacagatgaactaagaaagtcaccaagtgtcttaagctgttttatatttgttacgaagaaggctattgctacaatatttttaaaggtttcttttttaactttgaaattttttgtttttccttttctttttataaatgtaacagagggtttcaaagcatattatttttcagagagatttagttttactttaatggagtgactgtgaagtggttgggattttttgcttgtagaaagtagacttgctctttgtcagatttccaaacaaccttgccagccttggctgtcaaaaggaggcaggagcagttctcaacacaccaagccttattcccactcccttgggttgctgctgagccaaatagcatctttacagaggaagtgggatcagaggcaggaagtgtggaaagttgctaagaagcagggcttgcctctgtcctcccggggactccacagggatattcgtgcagggcaggggctctgtgccagccctgctctctcagatgccacagccactctgcagaggtgactcttggagctggaggaagtcaaaactgggccactgtttgtactgatggtgtattagcatgagcagcgtggccctggccccacactcccaaatctgccactccatagacccacttgcctcaaggctttatatttggctgctttcttacaatgagaattaagatttttaaactgaagttgaccatacaggttgcattagccctaactggcttcatgtaagaagggtgactgcctaaactagttccttgtaagctgaaccatcaattatcagttgaagccatacttttatttaaattaatatacgtagataccagaggccaagccacagagaggataatagttcttcccaataaaggtgatattaatcagactaatttcgaactaaagaagttactgcttaaagacggaatttcaggggaagcaagactcatttagaacaaatgaaatttctccagtcctacatttctgaattgacttctagcacatcaaaaatatttcagtcattatcagtctcattaactgaaatgccaaatgctaaatgcagtgttctttcacactgttttaattttcttgggaaattgagtccagtggatgttaatggagtgggttgcccatccctgaaatgtcttattttcaagtgcctggcctgggaaagaaggggaagaaacaattgcattatatccaaagatacactataaaaatagagtttttaccaaaaaaagatgtttgttctcatctcagtaggcctcatttgggcaagtgacccacaggtcttttggcgagtttgctatttgcctgttgaaatacttgtttcaacttagagaacagttatgatgtgaccatagcatggcacaactaaaaatctaagcctgaaacctgaaaaaagagatatgacaagggaaattaatcaggctatacataagtattgtatttatttgaataaaaataaaaagagcaacccataa

SEQ ID NO: 1208 - DNA, 30515 bp, Homo sapiens
tttacatttttattttatttttttttaatttttttttattatactttaagttttagggtacatgtgcacattgtgcaggttagttacatatgtatacatgtgccatgctggtgcactgcacccactaactcgtcatctagcattaggtatatctcccaatgctatccctcccccctccccccaccccacaacagtccccagagtgtgatattccccttcctgtgtccatgtaatctcattgttcaattcccacctatgagtgagaatatgcggtgtttgctttttgttcttgcgatagtttactgagaatgatgatttccaatttcatccatgtccctacaaaggacatgaactcatcattttttatggctgcatagtattccatggtgtatatgtgccacattttcttaatccagtctatcattgttggacatttgggttggttccaagtctttgctattgtgaatagtgccgcaataaacatacgtgtgcatgtgtctttatagcagcatgatttatagtcctttgggtatatacccagtaatgggatggctgggtcaaatggtatttccagttctagatccctgaggaattgccacactgacttccacaatggttgaactagtttacagtcccaccaacagtgtaaaagtgttcctatttctccacatcctctccagcacctgttgtttcctgactttttaatgattgccattctaactggtgtgagatggtatctcattgtggttttgatttgcatttctctgatggccagtgatgatgagcattttttcatgtgttttttggctgcataaatgtcttcttttgagaagtgtctgttcatgtcctttgcccactttttgatggggttgtttgtttttttcttgtaaatttgtttgagttcattgtagattctggatattagccctttgtcagatgagtaggttgcaaaaattttctcccattttgtaggttgcctgttcattctgatggtagtttcttttgctgtgcagaagctctttagtttaattagatcccatttgtcaattttgtcttttgttgccattgcttttggtgttttagacatgaagtccttgcccatgcctatgtcctgaatggtaatgcctaggttttcttctagggtttttatggttttaggtctaacgtttaagtctttaatccatcttgaattgatttttgtataaggtgtaaggaagggatccagtttcagctttctacgtatggctagccagttttcccaccaccatttattaaatagggaatcctttccccattgcttgtttttgtcaggtttgtcaaagatcagatagctgtagatatgtggcgttatttctgagggctctggtctgttccattgatctatatctctgttttggtaccagtaccatgctgttttggttactgtagccttgtagtatagtttgaagtcaggtagtgtgatgcctccagctttgttcttttggcttaggattgacttggtgatgcgggctcttttttggttccatatgaactttaaagtagttttttccaattctgtgaagaaagtcattggtagcttgatggggatggcattgaatctgtaaattaccttgggcagtatggccattttcacgatattgattcttcctacccatgagcatggaatgttcttccatttgtttgtgtcctcttttatttccttgagcagtggtttgtagttctccttgaagaggtccttcacatcccttgtaagttggattcctaggtattttattctctttgaagcaattgtgaatgggagttcactcatgatttggctctctgtttgtctgttgttggtgtataagaatgcttgtgatttttgtacattgattttgtatcctgagactttgctgaagttgcctgtcagcttaaggagattttgggcttgagacaatggggttttctagatatacaatcatgtcgtctgcaaacagggacaatttgacttcctcttttcccaattgaataccctttatttccttctcctgcctaattgcccaggccagaacttccaacactatgttgaataggagtggtgagagagggcatccctgtcttgtgccagttttcaaagggaatgcttccagtttttgcccattcagtatgatattggctgtgggtttgtcatagatagctcttattattttgaaatacgtcccatcaatgcctaatttattgagagtttttagtatgaagggttgttgaattttgtcaaaggcttttttctgcatctattgagataatcatgtggtttttgtctttggctctgtttatatgctggattacatttattgatttgcgtatattgaaccagccttgcatcccagggatgaagcccagttgatcatggtggataagctttttgatgtgctgctggattcgttttgccagtattttactgaggatttttgcatcaatgttcatcaaggatattggtctaaaattctctttttttgttgtgtctctgcctggctttggtatcagaatgatgctggcctcataaaatgagttagggaggattccctctttttctgttgattggaatagtttcagaaggaatggtaccagttcctccttatacctctggtagaattcggctgtgaatccatctggtcctgtactctttttggttggtaagctattgattattgccacaatttcagctcctgttattggtctattcagagattcaacttcttcctggtttagtcttgggagagtttatgtgcagaggaatttatccatttcttctagattttctagtttatttgcatagaggtgtttgtagtattctctgatggtagtttgtatttctgtgggatcagtggtgatatcccctttatcattttttattgcgtctatttgattcttctctctttttttctttattagtcttgctagcggtctatcaattttgttgatcttttcaaaaaacaagctcctggattcattaatttattgaagggttttttgtgtctctgtttccttcagttctgctctgagtttagttatttcttgccttctgctagcttttgaatgtgtttgctcctgcttttctagttcttttaattgtgatgttaggttgtcaattttggatctttcctgctttctcttgtgggcatttagtgctataaatttccctctacacactgctttgaatgcgtcccagagattctggtatgttgtgtctttgttctcgttggtttcaaagaacatctttatttctgccttcatttcgttatgtacccagtagtcattcaggagcaggttgttcagtttccatgtagttgagtggttttgagtgagattcttaatcctgagttctagtttgattgcactgtggtctgagagatagtttgttataatttctgttcttttacatttgctgaggagagctttacttcccagtatgtggtcaattttggaataggtgtggtgtggtgctgaaaaaaatgtatattctgttgatatggggtggagagttctgtagatgtctattaggtctgtttggtgcagagctgagttcaattcctgggtatccttgttgactttctgtctcgttgatctgtctaatgttgacagtggggtgttaaagtctcccattattaatgtgtgggagtctaagtctctttgtaggtcactcaggacttgctttatgaatcttggtgctcctgtattgggtgcatatatatttaggatagttagctcttcttgttgaattgatccctttaccattatgtaatgtccttctttgtctcttttgatctttgttggtttaaagtctgttttatcagagactaggattgcaacccctgcctttttttgttttccattggcttggtagatcttcctccatccttttattttgagcctctatgtgtctctgcacgtgagatgggtttcctgaatacagcacactgatgggtcttgactctttattcaatttgccagtctgtgtcttttaattggagcatttagtccatttacatttaaagataatattgttatgtgtgaatttgatcctgtcattatgatgttagctggttattttgctcgttagttgatgcagtttcttcctagtctcaatggtctttacattttggcatgattttgaagtggctggtaccggttgttcctttccatgtttagtgcttccttcaggagctcttttagggcaggcctggtggtgacaaaatctctcagcatttgcttgtctgtaaagtattttatttctccttcacttatgaagcttagtttggctggatatgcaattctgggttgaaaattcttttctttaagaatgttgaatattggcccccactctcttctggcttgtagggtttctgccgagagatccgctgttagtctgatgggcttccctttgagggtaacccgacctttctctctggctgcccttaacattttttccttcatttcaactttggtgaatctgacaattatgtgtcttggagttgccttctcgaggagtatctttgtggtgttctctgtatttcctgaatctgaacattggcctgccttgctagattggggaagttctcctggataatatcctgcagagtgttttccaacttggttccattctccacatcactttcaggtacaccaatcagacgtagatttggtcttttcacatagtcccatatttcttggaggctttgctcatttctttttattcttttttctctaaacttcccttctcgcttcatttcattcatttcatcttccattgctgataccctttcttccagttgatcgcatcggctcctgaggcttctgcattcttcacgtagttctcgagccttggttttcagctccatcagctcctttaagcacttctctgtattggttattctagtaatacattctcctaaatttttttcaaagttttcaactgctttgcctttggtttgaatgtcctcccgtagctcagagtaatttgatcatctgaagtcttctctcagcttgtcaaagtcattctccatccagctttgttccgttgctggtgaggaactgcgttcctttggaggaggagaggtgctctactttttagagtttccagtttttctgttctgttttttccccatctttgtggttttatctacttttggtctttgatgatggtgatgtacagatgggtttttggtgtggatgtcctttctgtttgttagttttccttctaacagagaggaccctcagctgcaggtctgttggaataccctgccgtgtgaggtgtcagtgtgcccctgctggtgcctcccagttaggctgttctggggtcaggggtcagggacccacttgaggaggcagtctgcccgttctcagatttccagctgcgtgctgggagaaccacagctcttttcaaagctgtcagacagggacatttaagtatgcaaaagttactgctgtctttttgtttgtctgtgccctgcccccagaggtggagcctatagaggcaggcaggcctccttgagctgtggtgggctccacccagttcgagcttcccggctgctttgtttacctaagcaagcctgggcaatggcgggcacccctcccccagccttgctgccgccttgcagtttgatctcagactgctgtgctaacaatcagcgagactccgtgggcgtaggaccctccgagccaggtgcgggatataatcttgtggtgcgcagttttttaagcccgtccgaaaagcgcagtgttcgggtgggagtgacccgactttccaggtgccgtccatcacccctttctttgactcagaaagggaaccccctgaccccttgcgcttcccaagtgaggcagtgcctcgccctgcttcggctgaggcacggtgcgtgcgcccactgacctgcgcccactgtctggcactccctaatgagatgaacccggtacctcagatggaaatgcagaaatcacccgtcttctgcgtcgctcacgctgggagctgtagaccggagctgttcctattcggccatcttggctcctcccctcaggaaatgtcttaagtaacataaaatgtgctttgtgagtaaatgttaacagtaaagttactgggaatgtaaaatccctcttattttatgcagtgtatgcactgagatctacatgcctcagtctcagtgtagatctgtgtacttttcattagtgtttgtactttcattaatttcctgtatgttgattttcttttccttttcttttttcctagtttacttctacaatttcggatggaaggattatggtgtagcgtctcttactactatcctagatatggtgaaggtgatgacatttgccttacaggaaggaaaagtagctatccattgtcatgcagggcttggtcgaacaggtaggtcctaagaggtggtttattgcctgtaggcatatttaaacataaaaggaataagatttcctaatttgagggtaaatgtttctcagaatcctatcaaagctttggagtcaggtggaagaagggaataagttctagtgttctgtaccactgtagggtgtctatagttaaaatgatatatagtttcaaatagctagaaggaggatattgaatgttcccaacacaaatgcatgataaatgttgaagattatgcgtatactaaatacactgatctgatcactatacattatatgtattaaaacatcactatataccccatagatatgtataattattatgttaacattaaaaattaaatcaaaaaaaattttaagatatttgaaataccgtaaacaggtagttacaatgaccgtatatatatcattttaaagtctttagcaacaatgtgagttggagaaactgcaatttgagagaagtaatttgctacatttagtaagtgccagggccacactttaaatccatggttgtctgactccagagttcatgtgctttccatttttggaggtataaggattttgtttgtgaagaagagtctatctgtgcccagaattctattaaaaagtcagtgattttacttaaaacattcagctgaatttcattacagtgctgatattggggcaaaaatgaaggccgtagggctgaaattttcattgtcatctgatccaaccacatgcagctcagctctgtccgcagtgtacctgtgctcctgccaggggatctgccacatacctggaagcatgcgcaggggaggggactcagctctgcttgagattagtagctcttaggatcaagccaaaatctcactgtttctagacattgacatgatagctctgcagacattttacatttatactaagatcttctgtgtcctagtgagaaaggtatgttgttaccgactgtgaactggagagcatgcagttttcagaggttctgattttcatatgtaacaagatgttcacaaacttggggatcacacaggtgtatttgatttgccttttactttaatattaattgactgttatatttgaattaatttattaattattaccttttaactagtaataaccttactagttattccttttaattagatgttagtaagaatacctaatgtttataccactaagcctggcttccttaagattgcttaattttccataattgcttatggaaaaatagaattatatcatggtctgaaggaaaacacatattagtataggcacaatctggaaaaagaattgccaagaagaaaagtaggctgcaaatatgaataatccctaaagaagaaactgccgtggtagggagagtgccaagctgggatgtgccagcagttgatggcaaagatagcagggtgggaggttccaaacacaaagtgtatggattgattggatggaaattctcaagaactgttcagagtggaaaatagaaacaggatttgctttcttctgatggagttaagtagaacaaggaggatagatgggccagatgatcagtttcccttccctcctgcacacttactcacctaccttgtgcctgtgctggcacagctctgggctactgagatgactcagtcatggggaggcggtgccacatagacatttaataaagttctgtgcagtaaggaacgtgcaaaataacacctctacaaaaagtcacaaagttatcatcataattgtccttaaaatgtgtctctatttatatggtttcttaacacatattcaaattgtaaatcatcaaagagtgataaataaaataaataaaaatgtaagcttttctcataccagtcttctcttcttcactgtttaggtgttttaatagcctgttacttagtttttgcaacgagaatgactgctgaccaagcaattatatttgtgcgggcaaagcgacccaattccatacaaaccaagagacagctcctctgtgtaagggaatttactcagtttctaactcctctccgcaatatattctcttgctgtgatcccaaagcacatgctgtcaccttacctcaatatctaattcgccagcgtcatctgcttcatggttatgaggcacgacttctgaaacacgtgccaaaaattatccacctagtttgcaaattgctgctggacttagcggagaacaggccagtgatgatgaaggatgtgtccgaaggacctggtctctctgctgaaatagaaaagacaatgtctgagatggtcaccatgcagctggataaagagttactgaggcatgacagtgatgtgtccaacccgcctaaccccactgcagtggcagcagattttgacaatcgaggcatgattttctccaatgagcaacagtttgaccctctttggaaaaggcggaatgttgagtgccttcaacccctgactcatctgaaaaggcggctcagctacagtgactcagatttaaagagggccgagaacctcctggagcaaggggagactccacagacagtgcctgcccagatcttggttggccacaagcccaggcagcagaagctcataagccattgttacatcccacagtctccagaaccagacttacacaaggaagccttggttcgcagcacactttctttctggagtcagtcaaagtttggaggcctggaaggactcaaagataatgggtcaccaattttccatggaaggatcattccaaaggaagcacagcagagtggagctttctctgcagatgtttcaggctcacacagccctggggagccagtttcacccagctttgcaaatgtccataaggatccaaaccctgctcaccagcaagtgtctcactgtcagtgtaaaactcatggtgttgggagccctggctctgtcaggcagaacagcaggacaccccgaagccctctggactgtggctccagtcccaaagcacagttcttggttgaacatgaaacccaggacagtaaagatctgtctgaagcagcttcacactctgcattacagtctgaattgagtgctgaggcaagaagaatactggcggccaaagccctagcaaatttaaatgaatctgtagaaaaggaggaactaaaaaggaaggtagaaatgtggcaggtattattagtacttaatttaattatagatatgtgggaaatatttatgtcagggcaaaagtgtgatacattttcccaaacttatttattatagaaatgtgaagatacgtttgcataatactttctaacttcaggtttctcgtctctgatgcgaacctgatgttatagaaaaaacacagggtgtttgtatggtttcatttaaatctgcatactcaagaaagcacttggtgtgatgcttgacccacacaaggcattgatattagtagtttccttcttcctgggcctatgggggcaactggcccacagcagacagcattcgaaactgactagaagcatctttatgaggcctggcagagggaatcatactttgagaactactgacgtgcagacataaataaaatgtttatttttcaaagctcatcaacactggtgctgagcaaggtcagaagagtgaggctgtctctttggcatcctctccttcagacttgccaatcctgccctaatagggcaactatgggaaatcaggagagcaagtgggtgaaaccacagattactacgtgccattcactttagctgagttgaggtctttggggtccatttcttagcttttacttcaattagaatgtaaatgtttaactcttttttgtgttgtgcttttactaggatacagtcataagtcagccacactttctttgccctgaatgagcacctgttctcgagaaaagataggccttataaacctagctatgagaaacagctaaactaccccaaaaggaggctgacttggacagtcgtgaatcaccgagatcttgacttttgagcccataacctactgtgaattattttaatagctcgctttcatagtctgccattgattaaacaaggcatataaaatttctgagtgccagtatctcttcagttgcagaggcatgaaaattaagtttggagcttcacattaacttttaattatatgatgggaggagagaacttttgataaaaattttgttcttcagaattgtgtttcgcctatccaatagttaaatgtattgctttcttccaaaatgaattgttttctttattttctgctccaaactgaaaaagtctttcattcagtcagcaaatatttcctgggcattactgtgtgttaagagttagcaagaaagagagtcttctattttagatgaaaatctcgcacccccactcctgggtcagccccagtgcccatgcaagctctgctgtggtgatgaagcgttcaggacttggtttgggccagaccgtatgtagtgtatatgaaagcattttctggaggtgaacacagacctttaatcaggatagttttgcatttttttccattctagattttattttaggacttttagttatcaaaaaaatcagttgaattctggaaaagaataaaatgaacattatttgaatagtataatgccacccatgcctgtactagaccatttcacatatattatttcatgtgatttttcacagttatcatagaacatatctgtaaggcagatgatactatttctacagtctttgttaatcttgtgaattcagtatcacagatgaggatgctaaaggtcatgaaggttagagggtaagtgacttgctcagggtcacgtggcatgcgtgtggcagagtcagggtacagcacatgtgtttaacactttccattatcccaagattcttggctaacctccctggagagcctcaggaaacatcatgataagatagtcattttgctaagagcatttttgattagtgtcagttctgcccagcttgtctccttcataagattgaatcaagagctactttgttttatacatgatctatgggatatgaaggactgtgaataacaaagtattggtgtattcataagataataaagagaagcccagtaccagagggcccttgtggcataatagaaacagcacagactctggagtaaggcagaactgggtatgaacaccccctttgccattttctagcttttggctcctaggtgagttatttcatctttcttgagccccattatatgtattggtgaggaagctccctgctgggtgccatttgagagttagagataagacatgtattacagtctctgtcccactgtgtgcatgtagtaaatattgggtaggtgaatgaatgagtgaatggtagcaattattacacttaacttctattttgttaaaatgtatttgactcactaaaacataaatctgaaccctgtcagaaattcatgaaaatccttatctcacttttcccttgctctctgtgaggtaaagtattaaaatctcatgcttaaattttctctaggcatttggagtattagaaaaactttccagttatcttccctatgtcaaatttcaggactcggggcttattgttaaatcctacataggatgctaaaaagatatttcaaagaagtacatatgccccatttaccagctttcaagcacctttattttatttttgcagacttcgaagctcaaagcttttccttttccttagaccccaggttaatgtataaatgttcccttatttctactttctcatctaccatctactttattgcaaaaaaatagttctgttttgttcaccagaaggctgaaaaggaagactcttgtgaactgtttctgtggtttctgaataaagtagagaacttggattaactaagccctttccctgtgctataagctttaaccgaccttatctcagtcaatcagcccaacagcttgtgaagcaggggatgagtttcatagagagaaactggggcttacagaattcagtgtcttagtccagtgtccagcctggaagtggagaggctgggaggggtcccagttctgcactctggagcctgagtctttcactcttgtgggcagcgcaagaatcatgcagtgtcaaatggtgcacctccctctcctctccctgtctctgtctctgtctgtctgtctctttctcttcctttttagaaagagcttaattcccgagatggagcttgggaaagaatatgtggcgagagggaccctttcatcctatgcagcttgatgtggtcttgggtggagcaactgaaggagcctgtaatcaccaaagaggatgtggacatgttggttgacaggcgagcagatgccgcagaagcactttttttattagagaaggtaaagtggctgtaggaccagttaatgactgtaactgaggcccttagtttttcacgcagaaaaaaaaaatccattataaaaaaagagaattcacacagaatcccaaatctagatctaatttaatagtttttccaagagaagagaagaaactgatacccagtgtaaacacttagaaaatacaaaaataaaaacgagaactatccatagtcctgggagaggcactgcaaacattttcaaacattttaaacttaccaatatgtatattaacttgttaaaaatcattttaacatacaagtttatatttcatttttgcttaaagttataacatagctattttcctgtgaataatgtaagcttttcataaatattgactcttaacggatatgatgctgtaacacgagactgtgccataattaagcactgtttcactgttggttgtttgtttctacttatttgctgtgagcatgcatatgggaaaaattatgaattaggttgggatatgcactcattcgtatttttaaaaaggggtaggtgtcacacatatatacatgtatatataatttttatttgtaaaatatagatgttttctatattttatatataaaagatatatgtttaaaatagaggaaatatgtatatatgtataaaatatagaaggagaaataagaaactggtaatagtggtcacctttaggaaaagatattagaagacaatggatctaggaaacgggagaaattgtatgaatccttttatataatttatcatttttatccatacagagatactaaattttcagtttaaaacagggtttgtttttgtttttgtttttgtttgtttctttttttgagacatagttttgctcttgttgcccaggctggagtgcaatggcgcgatctcagctcactgcaacctctgccccccgggttcaagcgattctcctgcctcagcctcccgagtagctgggattacagcatgtgccaccacgcccggctaattttgtaattttagtggagacaggatttctccatgttggtcaggctggtctcaaactcccaacctcatgtgatccacccaccttggcctcccaaagtgctgggattacaggcatgagccaccatgccaggcctgtttttgttttaacaaacaatgttattgaataaccagccttgagttacctgctatgctccatgtaaacatctcctcagtttctaaatttcactaaaaatcttctgctgttactacacacacacacacacacacacacacacacggacacatggacggatgcacatgcagacatgcagatacatgtgttcacacacatgcacacagatacaatacacaatacacagacatgtgcgtgcctgcacacacacacatacactcacataccacagttatgcaatacatatcttttaagaagtgatttttcctgtatccgaagtccttttcttaggatattttctcagcaattaaatcacagagttaaaacaggagatggtgaaaaggcagattaatgtttggtaggtgactgggccaagcccttcaggacataatttacattttctcttctgtttatctcaataccccttagaggtagaggcccatttcacagacaaggaaagctgaggttgcatgcccaaggttggcaccacatgtcagagcagaattcaagctcagaccactttggcacaaagcccatgtgctttctattacataaggctgcctgttttatcctaattcaccctcgggcaattcacctagggcatttatattgcttcaggttttttactttcataggcgtcattgtaatgataatttgtgcttgcaggtgtttctttattatagattatgctcttagagtagattttcagagttgaaatttatgggtccctgtacattacatcttggatatgtattgctgaaggtgatggaatttcttctttgctaaggtaaacagcccccaggagtcaagtcagtggacacatttttaagtatcttacccccttaggttggaggctaagcacttaagcactgcattgctcctgggggactggggttgtccttgtccttttctttgtctacctgcctccctccatatcatatgcagtggctgggtacccagatcctgaccactcagtgcccagttaattagtccatgtatctctatgacatgtcaccatctactagactactgacatatccagaaacaacaagaatgggaaaatctattcagttcactgcaagagaaacacttggtttaaaagtgcactgatcttcaaatttagttttactttgtacaatagctagccagctttgatattatctcctgaaagcttttcaaattatattaacacataacaataaacatttgttgatgtttagatattttgttagatattttggcatttgacattatgagtacttggtcacaaaccaattcttgactctacgatagttttgaattgatttattgaggcattttttgaaaaattttttaaattttgatttctacaaaaacagggacagcaccagactattctctgcgtgttgcactgcatagtgaacctgcagacaattcccgtggatgtggaggaagctttccttgcccatgccattaaggcattcactaaggtgggtcatactcttcctttcccctctctgaaccacagatcagcatcatctttgtaaatcagaatccagaggtcaccgtcctcctctaaaataaaacatgtatgtgtatgttttcccttcatggaaatctgtttgacatttcttctaagtagttgcagagtcttgaccaaaaaaaaagtttccaaacaatgatcttaggaaaagctgaattgtgagttttttgaaggagaacgttggaacaaagagcttttatataaaagaaagagagaaacaactgagtgttgaatacatatttttagatcatgtgcctaatcagagtcagagaatctttgcttgtcgagtcagttctaccttgggtgtaagtaagaagccatctattgagaattaaacatcccacattgctaattcagtactgagtcctggttggcaaatcctaaggaaagagttaaaaaaaaggtttcctttctaaaagcccatccttttggatgcagcagtttttcctggctgaagaaagaagaagcagccaggttcatactgagagaaaagtttccccttaccccatcagctataatttgtttattacttctcattgatatgaaagtatctataatttgtttgttacctctcattgatatgaaagtgtcattaaacaaagaacccagcttttgaatgacaacatctgtggtaacattaatgataagaagttattatttatactcattaacaagttataaagattcttcctttttaatatttgtccagtctccttcccctccactctttccggagtgatgttcttacttcaggccttccttgttcctcatctggattctatggcactaaccactgacatcttttcaatctgttctccactgtttccagagtcagtagtctcaaatccaaaccgcgtggtcctttacatctgtatttacactttcatagactgagaggctacccaccatgtgaagaaggttgtggtttggtgtttaagaaagtaaacagagctgggagtggtggcttacgcctgtgatcccagcactttgggaggctgagatgggtggatcatgagatcaggagattgagaccatcctggccaacatggtgaaaccccatctctactaaagtacaaaaatttagctgggcatggtggtgtgcgcctgcagtcccagctactcaggaggctgaggtggaagaatggcttgaacccgggaggtggaggttgcagtgagccgaaatcgcgccactgcactccggcctggcaacagagcgagactctgtctcaaaaaaaaaaaaaaaaaagtggccaggcatggtggctcaagcctgtaatccaagcactttgggaggccaaggtgggcagatcacgaggtcaggagatcaagaccatcctggataacatggtgaaaccccatctctactaaaaagaaatacaaaaaaattaactgggtatggtggcaggcgcctgtagtcccagctactcgggaggctgaggcaggagaatggtgtgaacccgggaggcggagcttgcagtgagccaagattgcaccactgcactccagcctgggcgacagagcaagactccatctcaaaaaaaaaaaagtaaacaattcacaccattattaatgttaataaggagttttttgcaaaggggatagataatatagttatagataaaattaaattcctgagcttaactgaaaaaaatccttacgattggtctctctgaaagcagtaggaattctttacaacttcttttggccttttaaggggatacgaatgaaaagttagagataacagttgttcaaaatctgtctatagaaaatgttaggagacagttttccttgggtctctcatgtctcttcatagtctgatgagcagatgccctgaccactctctttgaggatcaactcttcactaatgtctggagagctctgcctggagagcagaaggcacacgttctgacttccaggataataaaaatgtttcccttcagggcaaaggttggcagatttgcttgcagcccccttgtgaaacattggagtttcctaagcttggggctcctcagctatgaggcaaaccccgtgcttgtgcagcctccacctaggcccttctgcattgcctccatgagacttgagagacaaggagaacccatgtgaacatgaagcacatgcagctgtgagaaataaaagttgtctgtctctgacccaggaatctcgtatcttctaccagtatccataacactggcaagctaacaggttaaggtctcagatcctttacagttgttgacagagggaacaacctttcatttgtcaaaatttatcagagagggagaaattccagaagcagagaagcagtgattgtgtgaccctgattctttcccagggagttacacattactctgggaatggggttgagggtgggtacttgctctggttctctgtcctgccatcactgctaacccagagtatggtaaacttgggtgaaaaatgcaaatatgtgtaaatagtgcgctcccatcaaggggaaaggaaatttactttatcaaggtggggtttgtttgtttgtttgtttgtttgtttgttttttgagacaaggtctcactctgtcacccagtctggagtgcagtggcacaatctcagctcactgcatcctctgcctcctgggctccggcaatcctcccacctcagcctcccaagtagctgggactacaggcatgtgccaccatgcctggctaaatttttaattttttgtagagatgaggttttgccatgttgcccaggctggtctcaacctcctgggctcaagcaactctcccacctcggcctcctaaagtgctgggattacaggcatgagccaccacacccagccagttgaggtttgtatatatgtgccaaacatgttagactcatagatacgctatcctatgaaggtgggtatcattatctctgttttacaaaggaggagatcaaggtccagagaggttgggtatgagatgaggacatgtagctggcaggtggggagctgggcttctattcaggtcactctgaccctgtccagagtggccgtagggcctctcagcaggacgtatacagctgatgtgctgttttaatatgggaaacttttctcttataccatcaatgattagtctcaaaaaattcacttcacacccactgttgacttgcttcatgactgggtgtatataattagactaaatatccaggcactagatttaattttggggttttcattcataagtttgatattgacatggttggcagttctaatagtctttcaaataaaatgtgtgaaatttattatgtgtattttatatagagttttgtttgtaagtctgttttttttctccaccccctccttctctcaaaatagaaactagttcaaattcttgttacagtgtcctgaatataaatttctttgtcaccaggttaattttgattctgaaaatggaccaacagtttacaacaccctgaagaaaatatttaagcacacgctggaagaaaaaagaaaaatgacaaaagatggccctaagcctggcctctagctttcactcgtggtgaatatttcagacctaaagatccagatagtatctctgttcatatgtgaataagttgaagattgtggggctactttttctcatagcactttattttgaatgttgttagtttgtgctgagaatggtcgtccgtatttgaaccaattatttattttaaaatatatttaagctacatttttgttttgaaaaattgccataaatttggtgccactttcttttatttatttgactgagttaatattattgtattaacattttaagtatatggtgtttacattcttatttcttttgacattttggaaataatcataacttgtctttccaaaataaccattttcttgatggaactcttcctagagtttttaccaaatagctaactttagtagtaaaacctcattgtgtatccattcccccacagatgaactaagaaagtcaccaagtgtcttaagctgttttatatttgttacgaagaaggctattgctacaatatttttaaaggtttcttttttaactttgaaattttttgtttttccttttctttttataaatgtaacagagggtttcaaagcatattatttttcagagagatttagttttactttaatggagtgactgtgaagtggttgggattttttgcttgtagaaagtagacttgctctttgtcagatttccaaacaaccttgccagccttggctgtcaaaaggaggcaggagcagttctcaacacaccaagccttattcccactcccttgggttgctgctgagccaaatagcatctttacagaggaagtgggatcagaggcaggaagtgtggaaagttgctaagaagcagggcttgcctctgtcctcccggggactccacagggatattcgtgcagggcaggggctctgtgccagccctgctctctcagatgccacagccactctgcagaggtgactcttggagctggaggaagtcaaaactgggccactgtttgtactgatggtgtattagcatgagcagcgtggccctggccccacactcccaaatctgccactccatagacccacttgcctcaaggctttatatttggctgctttcttacaatgagaattaagatttttaaactgaagttgaccatacaggttgcattagccctaactggcttcatgtaagaagggtgactgcctaaactagttccttgtaagctgaaccatcaattatcagttgaagccatacttttatttaaattaatatacgtagataccagaggccaagccacagagaggataatagttcttcccaataaaggtgatattaatcagactaatttcgaactaaagaagttactgcttaaagacggaatttcaggggaagcaagactcatttagaacaaatgaaatttctccagtcctacatttctgaattgacttctagcacatcaaaaatatttcagtcattatcagtctcattaactgaaatgccaaatgctaaatgcagtgttctttcacactgttttaattttcttgggaaattgagtccagtggatgttaatggagtgggttgcccatccctgaaatgtcttattttcaagtgcctggcctgggaaagaaggggaagaaacaattgcattatatccaaagatacactataaaaatagagtttttaccaaaaaaagatgtttgttctcatctcagtaggcctcatttgggcaagtgacccacaggtcttttggcgagtttgctatttgcctgttgaaatacttgtttcaacttagagaacagttatgatgtgaccatagcatggcacaactaaaaatctaagcctgaaacctgaaaaaagagatatgacaagggaaattaatcaggctatacataagtattgtatttatttgaataaaaataaaaagagcaacccataatcctagtcctgtacttctttaccttgatgctctaggacatctgatgataaagacaaggttttgtcttagattatcctaataggcagattgagttgtcggctgattcagtgagccaagctctagttagtgcagactccttccatcagttcagcatgaccaaacactggggggttgggataggtgagttctaagaggaatagctggggaaaatctccaagctgacaagattcctaacttcccatatttggatgaggagttctttgtagcccagaggacagaaatctcacatattgggagaagtgataaggttgaaaaattcagttcaacagaaataggaaggttaagggcacacacatattaagaacttaccatgggccagccgtatccattacctcactgaattatcttgacagaagtcttttttatttcatttatttatatatatttttttgagacgggggtctcgctccgtagcccaagctggaatgcagtggcatgatcttggctgactgcaacctccgctcccagcctgaagccatcctcccacctcagcttcctgagtagctgggactacaggcacatgcaatcacatctggctaattttttgtttttttgtttttttggtattttttgtagagatagggtttcaccatgttacccaggcttgtcttgaactcctgagctcaagtgatcctcccacctcggcctcccagagtgctgggattacaggtgtgagccaccgcacctggcctcagaagtcttaatcataactgtgtgacgtgagatgtggagtccaatggaccccgtgctgtgccctcctctctgctcatgttacctgcctataggactcttaacctggcaaagctgcccgtcaaagtgccttctcagggaccttgaggtccctttagcactaaattttatgatggcattaagagaacactgtgctgtccataacttagtgaaaatatcacacatctgtcctggaaaaggctgaaccagctctattattatcctatgatgttctctagtatatcacacttagaggaagtacatgatttcttgccactgttgccttttcttacttcagagagcttactaatgccctttgagacaaattgctgctggtggtagagctcgcttcatttatttatgtaactcagaaaatctgtgctgagttacttagtcatatcttcatccagcttgccagtcttatctgagaaaaagtacttgcttcatcgttctggattccatgaaaaccaccatatatcataattcaacagaggtaaagtgtctctattttctcttaaatggagaatgcttgctgatatgattgggtgctatttcaggctagtctccacatgtccgaaaaaatatccagggacagtgtaatgtagatagaatgcaagccccaagttcttgacatctgacagccccatgtaatttggggggtcaatttaaaaatgacagcttactcataggatctttattattattccaaattagcaagcattaatatattttcagtgcaggtaaatcaagaacaatgttctctttgatgctttttatgaatggcacaagattagcatgttacctaagagagcttttctcaatgctagatggctgcaaattgtttatagataaagtagcaggagaaaaattcaacaaaatcctgtttctcagtgggtcattatttttttagttatgcttttaggcatgagctaatctctgattacctcaacactgacaataaaactgatttataaataatcacaatggaaccattcagtattggagcttgacaagcctttgttcaaagcccttcagtcactaaaaataatgtcccaataagacttaaatgtcataaaaccttttgcaacgaaaataaaagtttcatacatccactgaaacttgtacagtaagagaagcctgctaagcccttacctctcggctttcttgattaaaatgaaaagatattttactcttgagattgcctattttagagaaaaattacattttgaggatgggctcctgcttacccgatctctagaaagtggtctgacagtagcctctggttttgatttaatgagttgctttatcatttttttttctccttttaaaaatgaaaacagactgggcacggtggctataatctcagcactttgggaggccaagccaggcagatcacaaggtcaggagtttaagaccagctgggccaatatggtgaaaccctgtctgtactaaaaatacaaaaatcagccaggcgtggtgggcacctgtattcccagctacttggaaggctgagacaggagaatcgcttgaacctgggaggcggaggttgcagtgagccgagagcacaccactgcactccagcctgggcaacaaagcgagactccatctccagaaaaaaaaaaaaagaaagaaagaaaagaaaagaaaacaaactactcaggctcttgatttaggctgaaccatagggagtggccattttttttttggtaaaaaaatgatcaagtactggccattttatgtggttcaacctaaaatcaaactcagtatttccaggacaagtaggtgacatttcctgaattaattttggtaagtttagattaggtgatcaattattttctaagactatcctgtatgcttacagtagagttccaatacaactgtaagtgacaaatatgaaacattcttttagcaacacgtctgtgcctattctgcttggccctctgctaattctggggacacacaggaattatttattcagtcattcatccctctaggagtcacgttgcctatccctcaaaattcatgtgttggaaacttaattcccaatgcaatagagtaggaaggtgcagccttttaggaggtgtttaggtcgtcagagctccaccctcatgaatgaactaatattattagtaaaagacctgatggagggaattctttttttgcccttccactttctgtcatgtgaggacacagcatgctcccctccagatgatgcagcatgtaaggcaccatcttggaagcagagagcagccctcaccagatggcagtgccttaatcttggcctatccagcctccagaactgtgagaatcaatgtctgttgtttaagttgcccagcctgtgctattctgttatagcagcacaaaatggactaagacagcgattggtaccaggggagtggggtgttgctaaaacatacctaaaaatgtggaagcggctttggaactgggtaatgggttgaggctagaagagttgtgaaatgaaagcaggaaaaagcttgtattgccacgagtggagcattaagagtgattctggtgagggctcagaagaagaggagagctgtaaggaaattatcactcattcttctgagaaactacgtaagtggttttgaacagaatgctgataaaaacttggacagtaaagaccattccgattaggtcatagacagaaatgaggactatcattggaaactggggaaaaggccatctttgttacaaagtggcaaagaacgtggctgaattatgtccatgtccatgttctaggactttgtaaggggcagaacttagcgatgaaccagaatatttggcagaagaaatttctaagcaggaaagtgtgcaggatgctgtgtggtttctcttttttttttttttttttgaattgtgttgtcttttttttttttttttttattatactctaagttttagggtacatgttcacattgtgcaggttagttacatatgtatacatgtgccatgctggtgcgctgcacccactaacgtgtcatctagcattaggtatatctcccaatgctatccctcacccctcccccgaccccaccacagtccccagagtgtgatattccccttcctgtgtccatgtgatctcattgtttaattcccacctatgagtgagaatatgcggtgtttggttttttgttcttgcgatagtttactgagaatgatggtttccaatttcatccatgtccctacaaaggacatgaactcatcattttttatggctgcatagtattccatggtgtatatgtgccacattttcttaatccagtctatcattgttggacatttgggttggttccaagtctttgctattgtgaatagtggccgcaataaacatacgtgtgcatgtgtctttatagcagcatgatttatagtcctttgggtatatacccagtaatgggatggctgggtcaaatggtatttctagttctagatgcctgaggaatcgccacactgacttccacaatggttgaactagtttacagtcccaccaacagtgtaaaagtgttcctatttctccacatcctctccagcacctgttgtttcctgactttttaatgattgccattctaactggtgtgagatgatatctcatagtggttttgatttgcatttctctgatggccagtgatgatgagcatttcttcatgtgttttttggctgcataaatgtcttcttttgagaagtgtctgttcatgtccttcgcccactttttgatggggttgtttgtttttttcttgtaaatttgtttgagttcattgtagattctggatattagccctttgtcagatgagtaggttgcgaaaattttctcccatgttgtaggttgcctgttcactctgatggtagtttcttttgctgtgcagaagctccttagtttaattagatcccatttgtcaattttggcttttgttgccattgcttttggtgttttggacatgaagtccttgcccacgcctatgtcctgaatggtaatgcctaggttttcttctagggtttttatggttttaggtctaacgtttaaatctttaatccatcttgaattgatttttgtataaggtgtaaggaagggatccagtttcagctttctacatatggctagccagttttcccagcaccatttattaaatagggaatcctttccccattgcttgtttttgtcaggtttgtcaaagatcagatagttgtagatatgcggcattatttctgagggctctggtctgttccattgatctatatctctgttttggtaccagtaccatgctgttttggttactgtagccttgtagtatagtttgaagtcaggtagtgtgatgcctccagctttgttcttttgtcttaggattgacttggcgatgcaggctcttttttggttccatatgaactttaaagtagttttttccaattctgtgaagaaagtcattggtagcttgatggggatggcattgaatctgtaaattaccttgggcagtatggccattttcacgatattgattcttcctacccatgagcatggaatgttcttccatttgtttgtgtcctcttttatttccttgagcagtggtttgtagttctccttgaagaggtccttcacatcccttgtaagttggattcctaggtattttattctctttgaagcaattgtgaatgggagttcactcatgatttggctctctgtttgtctgttgttggtgtataagaatgcttgtgatttttgtacattgattttgtatcctgagactttgctgaagttgcttatcagcttaaggagattttgggctgagacgatggggttttctagataaacaatcatgtcgtctgcaaacagggacaatttgacttcctcttttcctaattgaataccctttatttccttctcctgcctgattgccctggccagaacttccaacactatgttgaataggagcggtcagagagggcatccctgtcttgtgccagttttcaaagggaatgcttccagttattgcccattcagtatgatattggctgtgggtttgtcatagatagctcttattattttgaaatacgtcccatcaatgcctaatttattgagagtttttagcatgaagggttgttgaattttgtcaaaggctttttctgcatctattgagataatcatgtggtttttgtctttggctctgtttatatgctggattacatttattgatttgcgtatattgaaccagccttgcatcccagggatgaagcccacttgatcatggtggataagctttttgatgtgctgctggattcggtttgccagtattttattgaggatttttgcatcaatgttcatcaaggatattggtctaaaattctcttttttggttgtgtctctgcccggctttggtatcagaatgatgctggcctcataaaatgagttagggaggattccctctttttctattgattggaatagtttcagaaggaatggtaccagttcctccttgtacctctggtagaattcggctgtgaatccatctggtcccggactctttttggttggtaaactattgattattgccacaatttcagctcctgttattggtctattcagagattcaacttcttcctggtttagtcttgggagagtgtatgtgtcgaggaatgtatccatttcttctagattttctagtttatttgcgtagaggtgtttgtagtattctctgatggtagtttgtatttctgtgggatcggtggtgatatcccctttatcattttttattgtgtctatttgattcttctctctttttttctttattagtcttgctagcggtctatcaattttgttgatcctttcaaaaaaccagctcctggattcattgattttttgaagggtttttgtgtctctatttccttcagttctgctctgattttagttatttcttgccttctgctagcttttgaatgtgtttgctcttgcttttctagttcttttaattgtgatgttagggtgtcaattttggatctttcctgctttctcttgtaggcatttagtgctataaatttccctctacacactgctttgaatgcgtcccagagattctggtatgtggtgtctttgttctcgttggtttcaaagaacatctttatttctgccttcatttcgttatgtacccagtagtcattcaggagcaggttgttcagtttccatgtagttgagcggctttgagtgagattcttaatcctgagttctagtttgattgcactgtggtctgagagatagtttgttataatttctgttcttttacatttgctgaggagagctttacttccaactatgtggtcaattttggaataggtgtggtgtggtgctgaaaaaaatgtatattctgttgatttggggtggagagttctgtagatgtctattaggtctgcttggtgcagagctgagttcaattcctgggtatccttgttgactttctgtctcgttgatctgtctaatgttgacagtggggtgttaaagtctcccattattaatgtgtgggagtctaagtctctttgtaggtcactcaggacttgctttatgaatctgggtgttcctgtattgggtgcataaatatttaggatagttagctcctcttgttgaattgatccctttaccattatgtaatggccttctttgtctcttttgatctttgttggtttaaagtctgttttatcagagactaggattgcaacccctgcctttttttgttttccattggcttggtagatcttcctccatccttttattttgagcctatgtgtgtctctgcacgtgagatgggtttcctgaatacagcacactgatgggtcttgactctttatctaacttgccagtctgtgtcttttaattgcagaatttagtccatttatatttaaagttaatattgttatgtgtgaatttgatcctgtcattatgatgttagctggtgattttgctcattagttgatgcagtttcttcctagtctcgatggtctttacattttggcatgattttgcagcggctggtaccggttgttcctttccatgtttagcacttccttcaggagctcttttagggcaggcctggtggtgacaaaatctctcagcatttgcttgtctataaagtattttatttctccttcacttatgaagcttagtttggctggatatgaaattctgggttgaaaattcttttctttaagaatgttgaatattggcccccactctcttctggcttgtagggtttctgccgagagatccgctgttagtctgatgggctttcctttgagggtaacccgacctttctctctggctgcccttaacattttttccttcatttcaactttggtgaatctgacaattatgtgtcttggagttgctcttctcgaggagtatctttgtggcgttctctgtatttcctgaatctgaacgttggcctgccttgctagattggggaagttctcctggataatatcctgcagagtgttttccaacttggttccattctccacatcactttcaggtacaccaatcagacgtagatttggtcttttcacatagtcccatatttcttggaggctttgctcatttctttttattcttttttctctaaacttcccttctcgcttcatttcattcatttcatcttccattgctgataccctttcttccagttgatcgcatcggctcctgaggcttctgcattcttcacgtagttctcgagccttggttttcagctccatcagctcctttaagcacttctctgtattggttattctagttatacattcttctaaatttttttcaaagttttcaacttctttgcctttggtttgaatgtcctcccgtagctcagagtaatttgatcgtctgaagccttcttctctcagctcgtcaaaatcattctccatccagctttgttctgttgctggtgaggaactgcgttcctttggaggaggagaggcgctctgcgttttagagtttccagtttttctgttctgttttttccccatctttgtggttttatctacttttggtctttgatgatggtgatgtacagatgggttttcggtgtagatgtcctttctggttgttagttttccttctaacagacaggaccctcagctgcaggtctgttggaataccctgctgtgtgaggtgtcagtgtgcccctgctggggggtgcctcccagttaggctgctcgggggtcaggggtcagggacccacttgaggagtcagtctgcccgttctcagatctccagctgcgtgctgggagaaccactgctctcttcaaagctgtcagacagggacacttaagtctgcagaggttactgctgtctttttgtttgtctgtgccctgcccccagaggtggagcctacagaggcaggcaggcctccttgagctgtggtgggctccacccagttcgagcttcccggctgctttgtttacctaagcaagcctgggcaatggcgggcgcccctcccccagcctcgttgccgccttgcagtttgatctcagactgctgtgctagcaatcagcgcgattccgtgggcgtaggaccctctgagccaggtgtgggatatagtctcgtggtgcgccgtttcttaagccggtctgaaaagcgcaatattcgggtgggagtgacccgattttccaggtgcgtccgtcacccctttctttgactcggaaagggaactccctgaccccttgcgcttcccaggtgaggcaatgcctcgccctgcttcggctcgcgcacggtgcgcacacacactggcctgcgcacactgtctggcactccctagtgagatgaacccggtacctcagatggaaatgcagaaatcacccgtcttctgcgtcgctcacgctgggagctgtagaccggagctgttcctattcggccatcttggctcctcccctgt

SEQ ID NO: 1209 - DNA, 428 bp, Homo sapiens
ccactctttccggagtgatgttcttacttcaggccttccttgttcctcatctggattctatggcactaaccactgacatcttttcaatctgttctccactgtttccagagtcagtagtctcaaatccaaaccgcgtggtcctttacatctgtatttacactttcatagactgagaggctacccaccatgtgaagaaggttgtggtttggtgtttaagaaagtaaacagagctgggagtggtggcttacgcctgtgatcccagcactttgggaggctgagatgggtggatcatgagatcaggagattgagaccatcctggccaacatggtgaaacccccatctctactaaagtacaaaaatttagctgggcatggtggtgtgcgcctgcagtcccagctactcaggaggctgaggtggaagaatggctt

SEQ ID NO: 1210 - DNA, 145 bp, Homo sapiens
gcaggcgcctgtagtcccagctactcgggaggctgaggcaggagaatggtgtgaacccgggaggcggagcttgcagtgagccaagattgcaccactgcactccagcctgggcgacagagcaagactccatctcaaaaaaaaaaaa

SEQ ID NO: 1211 - DNA, 220 bp, Homo sapiens
ccaagctggaatgcagtggcatgatcttggctgactgcaacctccgctcccagcctgaagccatcctcccacctcagcttcctgagtagctgggactacaggcacatgcaatcacatctggctaattttttgtttttttgtttttttggtattttttgtagagatagggtttcaccatgttacccaggcttgtcttgaactcctgagctcaagtgatcct

SEQ ID NO: 1212 - DNA, 783 bp, Homo sapiens
tcacacctgtatttccagcactttgggaggccgaggtgggtagatcacttgaggtcaggagttcgagaccaacctggccaacatggtgaaaccccatctctactaaaactacaaaaaaaaattagccagacattgtggcaagcacctgtaatcccagctactcgggaggctgaggcatgagaatcacttgaacccaggaggtggaagttgcagtgaacggagattgcgtcactgcactccagcctgcacaacagaacgagacttcacctcaaaaaaaaaaagaaaaagtgtgtttagaagatagcacacggtgtggccaggccaccatttgataagattagtatggatatgagaaagctatgtgctatttatcaagacaatgggagaatgaccccaaagatattatggacatcttggtacaaggggagggggcaaccatgcccatcaaaaggccagagtgctagggtcttggggacagatgaattttgaggaggggcccagggtgcccatgggacctgtttgctcactgctgagggccaccttgggtctctgcaccctgcactctggcacagtgctccttggctaccccagctctgattcaagcaggcccaggtccaggtagggccactactctggagggtgcaagcagtgagccttggcacatccatgtggtgcttaattctgcaggtgtgcagagtacaagagcagtggaggctggcttccttcacctagatttcaaagaatgcctcagtgggcccaggcagagaactgctgcaaggacaa

SEQ ID NO: 1213 - DNA, 357 bp, Homo sapiens
ctcacataccacagttatgcaatacatatcttttaagaagtgatttttcctgtatccgaagtccttttcttaggatattttctcagcaattaaatcacagagttaaaacaggagatggtgaaaaggcagattaatgtttggtaggtgactgggccaagcccttcaggacataatttacattttctcttctgtttatctcaataccccttagaggtagaggcccatttcacagacaaggaaagctgaggttgcatgcccaaggttggcaccacatgtcagagcagaattcaagctcagaccactttggcacaaagcccatgtgctttctattacataaggctgcctgttttatcctaa

SEQ ID NO: 1214 - DNA, 5304 bp, Homo sapiens
atgacagattttggaaaattgtcttaggagacgcattctcaggcagttccagtgtattggtattttggatgtttctctgcattttgtcatacggttcagaagggtgataggctttctgtgaactgctgggcttcaagaaggctattatcttccactcaggtttaatggaggaatttatgggattttgccaccttgtgaggtaagttagatataaatgccttgtgatttatacatgaaagatttttcattatgtatccacataaatcttattaatccactacatttctaagatgtcatggtcaactgaagaaattcgtcaccagttttccttgtaaataaaaattaagtacattcttcattttttaatgatagtcagcatctacttatactctatcatgatatcacttcatctgtgttgtcatcttaaatagcatccttttaattgtttcaggtcaacaagtaaggttcaataaagagaaatatataaattttgtagcttatattctaaaagaggtgcaatattttagccaattagtgggagtgaaaaaccaacttgagaaataaatctgtaagtgaatgctactggttctcaaaggcatcttcttgacaagaatcaaatgaacactatctctaaaaatccaatctgaaggcaaaacagatttgttagtgtgattattaaaataattgccaccttctggtgtaaagtgatgtcaacagtgaacaatcaagtaatgccctttgctttggtacagtcaagcactcaaagctaccgtgaaataggattggacgggacctttcatttcatatgagaattaattctctaaatgcagtggagaggaggcagcttattttttccccccagcaagcagctagaaacgagtctgcgggaggccatattttttcttactcatttcttagtgtgtgcgtgtatgttaccaagtatcacggcaaataatttatttttttcaatatagttccatcagaagagaaaaaaaatggcagaattttcccaaaggtcttatggctttagaaaattacactttgacatctaaattgttttctaaggactgaattaaaggtcacttttttttttcaactgcagtgaaagcttcacagctgctttggggttctctgtaagagagcacagctccattctggatttcctacagatctccccagggagagtccatacatgtgtaatttgtggcaaacctcagttatggagaccaactcttctcaaaaagcttaagtcaatagccataaagagacgagtgccacgtatatgcagttactgaataccctgccctgtatattaaaaagtattttgaaagaaacaattctatagcttaagacctcaggtttaagaacttactgactttaaatgtattcagaacaaagaaataaatattaagtatgtgatttgacatgtaaatttctgtcgtttgcatctcataacattatcttttgtgtcaaatctgttaacaatgcctttaacgtctaaaatgcggcacatttaccacttcttgcacttctacagttgaaaaagcaaatgcaagactgaaaaaaaataaaaaattaggtgatcaataacacatttcttctccatcagattattttttccatgtacagagttcctgtttgatttttcaattattcaaaatgtcagaatgatagatataagagagtaaccagctaaccagggaaatgtctgcctaataatattcaatataaagattccgaatgatgctttatgatggattaaactttcccctgttctgcctcattagggttctcccaatttgacccaatccaaacctattacttaatacatatctaacagtaaaattgcataaatgttcactagtacaatagaagttaaatgagcagtttcagataatttaattaagttgtaggtcttctaatataattccttaagtatgtgaacttttaacttgtgttaactcaatttccttatgctttcatttaccatttgttggggacattacagtgattagccaaagtccttccagctactaatgttccccataaattttgatttaaattgactgtcactttctcactataataaagtagatatttgacatctcaaaaaaagagaactggtctagtatattatgttgccaaggagtggcacgtttttctctatcacacagaatccacataaaataccccttaataaaggccgttcagagtaggcagaacgaagtggattgcgtactacatattcatagacatgcacactttagcatttcttgaaacactaggctcgtagatacctttggtattgaaaacacacgtggcatcatgttcccatcttattgttttgtatttggtggttatcactgtcagcatttaggaactgtctgtattacaataggaaggtagcagctcttctgtttcagctgaggtcaaaagcaagatttggccaagtgggctaagctcagatacttctcccatgctttctcagctcagataactaaaggggcaaatcatataattgtgctttgaaattttcaattaatatatgtgtttttcaatattgtatgtgtgttgataattgcgaaagctgggtggtgagtacatgaatgtacattattgctatggtctgaatgtttgtgtccctgaaaattcatatgtagaaattctgactcccaagatgatggtattaagaggtggggcctttggcgggggtgattaggtcatgaggatggagtcatgaatggaattagtacccttataaaagagatcctagagagctgccttgctctttctgccatgtgaggacatggagagaaggtgccacctacgaacaagaaagcaggccctcaccagaagctgaatctgctggcaccttgatcttggacttcccagcctccacaactatgagagatgaatttctgttgtttataagtcacccagtttgtagtattttgttgtagcagcttgaatgaactaaggcaattacaatattccctctacttttgtatatgtttaaataaccctaagcaagtaaaattatgttccccaaatatatatctaccccaaactctctttagttccaataaaatgactctgtcaatagggttttggtatcatcaattaccatccttgaagttatctggtcactccatacacaaaagcctcagttcagtgcccagagtaacctaaaagacacaggaatagtaacattttttttttcgcctaggttcagtgctagaatttctgcgttggatggatcaagaatctacggggagccaagtcacttaaaagtatcaggtatgctgtaggataactgcttgcaagggacaggaaatgtcagcccctctggctaatggttttctctaacagtttcccataaaaccactgcttctgcagtgtgcttggcattggccttgaccagagacagccttcttcttcttcttcttcttttttttttttttttttttttgaggcagagcctcactctgtcgcccaggctggagtgcagtggcatgatctcagctcactgcaatctccgcctcccgggtttaagcgattcttctgcctcagcctcccgagtagctgggactacaggcacgtgccaccacgcccagctaatttttatagttttagtagagatgaggtttcaccatattggccaggctggtctcgaactcctgaccttgtgatccacccgcctcggccttccaaagtgctgggattacaggtgtgacaggtgtgagccaccacacctggcctgagacatccttctttgaagcacttggtgcccacaaaatacaacactcaattctggaaacttcttggcacctattcaagaagagtattacctaagtaatcataagattaactaatatttttcaggagcttactctatgttaagcaatttgtaagcatttttttcatctattcttacaactttagaattaacaaccattatgaatcttgttttacaaatgggacagctgaggcacagtgaagtctcctaaattaccaaagggggcaaagcaaggcagcgatacttagtcgtctttgtttttttttgagacagggtgttgctctgtcacccaggctggagtgcagtggtgtcatcatggctcactgaggccctgacacccgggactcaagcaatcctcctgcttcaacctcctgagtagctgggacaacaagcgcatgtcgctacgcccagccaatttttaattttttataaaggcggggtctccctatgttgcctaggcttgtcgtgaacccctgggctcaggtgatcctcctgcctttgcctcccacactgctgggattacgggcgcgagccaccatgctgggcctgcccaactttgaattgaatgttctgtcattacacgagagcggccaggttatatccctgtttcactggatggatgataatatagtgtggcttccatgcacgtttatgaatgttggatagtacatttagaagtacatacatttttataacacaagtagtacctgttactgaacaatttaaacaatattgttaatctaaacatagaaaataaaaatttttactagtttcactacctagaggtcactacttttaagattttactttacactcaagtcctttctacacctgttttaaaaatagaaattgaattatactgagcacattcttttataatctagtatttgatttaataatttctcatgaatatcttccaatgtcttgaaacatatttctataacatcttttttaatggctgtgtaattgaatattttgattttgaaagaagtcaaggtacgatattttacagctccaagtcccaacctgaatttcacatctggcctcaggtggaactatttccacatccttacttgcaaagagttttgaaacgtgggttaggcagaggtgatcgaggatcagcatattgcaagaacagatgcacacacaaagagctcactattcaagctccttttccttcttcagtatctctgcatggttaagacgagtggattgttttacatctaacaattctgtaactgggtactcctaagtaaaggggtacaataattggctaacagtgaagttgcgtgaagctgtgggaggaaggggcaaaggattcttgacatgtagtcgagagctttggccactcagtttcttttgctttcctcgctgactcagcctgagggtaaaaggtgaagtgacatctttactgagaccttcccggtcagatgcaatcggattgactgaaagctctcagaacgaaacgaaattctcccacctgggcagcacgtgctggccagagaaat

SEQ ID NO: 1215 - DNA, 5304 bp, Homo sapiens
atgacagattttggaaaattgtcttaggagacgcattctcaggcagttccagtgtattggtattttggatgtttctctgcattttgtcatatggttcagaagggtgataggctttctgtgaactgctgggcttcaagaaggctattatcttccactcaggtttaatggaggaatttatgggattttgccaccttgtgaggtaagttagatataaatgccttgtgatttatacatgaaagatttttcattatgtatccacataaatcttattaatccactacatttctaagatgtcatggtcaactgaagaaattcgtcaccagttttccttgtaaataaaaattaagtacattcttcattttttaatgatagtcagcatctacttatactctatcatgatatcacttcatctgtgttgtcatcttaaatagcatccttttaattgtttcaggtcaacaagtaaggttcaataaagagaaatatataaattttgtagcttatattctaaaagaggtgcaatattttagccaattagtgggagtgaaaaaccaacttgagaaataaatctgtaagtgaatgctactggttctcaaaggcatcttcttgacaagaatcaaatgaacactatctctaaaaatccaatctgaaggcaaaacagatttgttagtgtgattattaaaataattgccaccttctggtgtaaagtgatgtcaacagtgaacaatcaagtaatgccctttgctttggtacagtcaagcactcaaagctaccgtgaaataggattggacgggacctttcatttcatatgagaattaattctctaaatgcagtggagaggaggcagcttattttttccccccagcaagcagctagaaacgagtctgcgggaggccatattttttcttactcatttcttagtgtgtgcgtgtatgttaccaagtatcacggcaaataatttatttttttcaatatagttccatcagaagagaaaaaaaatggcagaattttcccaaaggtcttatggctttagaaaattacactttgacatctaaattgttttctaaggactgaattaaaggtcacttttttttttcaactgcagtgaaagcttcacagctgctttggggttctctgtaagagagcacagctccattctggatttcctacagatctccccagggagagtccatacatgtgtaatttgtggcaaacctcagttatggagaccaactcttctcaaaaagcttaagtcaatagccataaagagacgagtgccacgtatatgcagttactgagtaccctgccctgtatattaaaaagtattttgaaagaaacaattctatagcttaagacctcaggtttaagaacttactgactttaaatgtattcagaacaaagaaataaatattaagtatgtgatttgacatgtaaatttctgtcgtttgcatctcataacattatcttttgtgtcaaatctgttaacaatgcctttaacgtctaaaatgcggcacatttaccacttcttgcacttctacagttgaaaaagcaaatgcaagactgaaaaaaaataaaaaattaggtgatcaataacacatttcttctccatcagattattttttccatgtacagagttcctgtttgatttttcaattattcaaaatgtcagaatgatagatataagagagtaaccagctaaccagggaaatgtctgcctaataatattcaatataaagattccgaatgatgctttatgatggattaaactttcccctgttctgcctcattagggttctcccaatttgacccaatccaaacctattacttaatacatatctaacagtaaaattgcataaatgttcactagtacaatagaagttaaatgagcagtttcagataatttaattaagttgtaggtcttctaatataattccttaagtatgtgaacttttaacttgtgttaactcaatttccttatgctttcatttaccatttgttggggacattacagtgattagccaaagtccttccagctactaatgttccccataaattttgatttaaattgactgtcactttctcactataataaagtagatatttgacatctcaaaaaaagagaactggtctagtatattatgttgccaaggagtggcacgtttttctctatcacacagaatccacataaaataccccttaataaaggccgttcagagtaggcagaacgaagtggattgcgtactacatattcatagacatgcacactttagcatttcttgaaacactaggctcgtagatacctttggtattgaaaacacacgtggcatcatgttcccatcttattgttttgtatttggtggttatcactgtcagcatttaggaactgtctgtattacaataggaaggtagcagctcttctgtttcagctgaggtcaaaagcaagatttggccaagtgggctaagctcagatacttctcccatgctttctcagctcagataactaaaggggcaaatcatataattgtgctttgaaattttcaattaatatatgtgtttttcaatattgtatgtgtgttgataattgcgaaagctgggtggtgagtacatgaatgtacattattgctatggtctgaatgtttgtgtccctgaaaattcatatgtagaaattctgactcccaagatgatggtattaagaggtggggcctttggcgggggtgattaggtcatgaggatggagtcatgaatggaattagtacccttataaaagagatcctagagagctgccttgctctttctgccatgtgaggacatggagagaaggtgccacctacgaacaagaaagcaggccctcaccagaagctgaatctgctggcaccttgatcttggacttcccagcctccacaactatgagagatgaatttctgttgtttataagtcacccagtttgtagtattttgttgtagcagcttgaatgaactaaggcaattacaatattccctctacttttgtatatgtttaaataaccctaagcaagtaaaattatgttccccaaatatatatctaccccaaactctctttagttccaataaaatgactctgtcaatagggttttggtatcatcaattaccatccttgaagttatctggtcactccatacacaaaagcctcagttcagtgcccagagtaacctaaaagacacaggaatagtaacattttttttttcgcctaggttcagtgctagaatttctgcgttggatggatcaagaatctacggggagccaagtcacttaaaagtatcaggtatgctgtaggataactgcttgcaagggacaggaaatgtcagcccctctggctaatggttttctctaacagtttcccataaaaccactgcttctgcagtgtgcttggcattggccttgaccagagacagccttcttcttcttcttcttcttttttttttttttttttttttgaggcagagcctcactctgtcgcccaggctggagtgcagtggcatgatctcagctcactgcaatctccgcctcccgggtttaagcgattcttctgcctcagcctcccgagtagctgggactacaggcacgtgccaccacgcccagctaatttttatagttttagtagagatgaggtttcaccatattggccaggctggtctcgaactcctgaccttgtgatccacccgcctcggccttccaaagtgctgggattacaggtgtgacaggtgtgagccaccacacctggcctgagacatccttctttgaagcacttggtgcccacaaaatacaacactcaattctggaaacttcttggcacctattcaagaagagtattacctaagtaatcataagattaactaatatttttcaggagcttactctatgttaagcaatttgtaagcatttttttcatctattcttacaactttagaattaacaaccattatgaatcttgttttacaaatgggacagctgaggcacagtgaagtctcctaaattaccaaagggggcaaagcaaggcagcgatacttagtcgtctttgtttttttttgagacagggtgttgctctgtcacccaggctggagtgcagtggtgtcatcatggctcactgaggccctgacacccgggactcaagcaatcctcctgcttcaacctcctgagtagctgggacaacaagcgcatgtcgctacgcccagccaatttttaattttttataaaggcggggtctccctatgttgcctaggcttgtcgtgaacccctgggctcaggtgatcctcctgcctttgcctcccacactgctgggattacgggcgcgagccaccatgctgggcctgcccaactttgaattgaatgttctgtcattacacgagagcggccaggttatatccctgtttcactggatggatgataatatagtgtggcttccatgcacgtttatgaatgttggatagtacatttagaagtacatacatttttataacacaagtagtacctgttactgaacaatttaaacaatattgttaatctaaacatagaaaataaaaatttttactagtttcactacctagaggtcactacttttaagattttactttacactcaagtcctttctacacctgttttaaaaatagaaattgaattatactgagcacattcttttataatctagtatttgatttaataatttctcatgaatatcttccaatgtcttgaaacatatttctataacatcttttttaatggctgtgtaattgaatattttgattttgaaagaagtcaaggtacgatattttacagctccaagtcccaacctgaatttcacatctggcctcaggtggaactatttccacatccttacttgcaaagagttttgaaacgtgggttaggcagaggtgatcgaggatcagcatattgcaagaacagatgcacacacaaagagctcactattcaagctccttttccttcttcagtatctctgcatggttaagacgagtggattgttttacatctaacaattctgtaactgggtactcctaagtaaaggggtacaataattggctaacagtgaagttgcgtgaagctgtgggaggaaggggcaaaggattcttgacatgtagtcgagagctttggccactcagtttcttttgctttcctcgctgactcagcctgagggtaaaaggtgaagtgacatctttactgagaccttcccggtcagatacaatcggattgactgaaagctctcagaacgaaacgaaattctcccacctgggcagcacgtgctggccagagaaat

SEQ ID NO: 1216 - DNA, 270 bp, Homo sapiens
tcttgctctgtcacccaggctggagtgcagtggcacaatctcagctcactgcaagctctgcctcctgggttcacgccattctctggcctcagcctcctgagtagctgggactacaggcacccgccactgcgcccggctaattttttgtatttttagtagagacagggtttcaccgtgttagccaggatggtctcgatctcctgacctcatgatctgcccgcctcggcctcccaaagtgctaggattacaggcatgagccaccacacccag

SEQ ID NO: 1217 - DNA, 270 bp, Homo sapiens
tcttgctctgtcacccaggctggagtgcagtggcacaatctcagctcactgcaagctctgcctcctgggttcacgccattctctggcctcagcctcctgagtagctgggactacaggcacccgccactgcgcccggctaattttttgtatttttagtagagacagggtttcaccgtgttagccaggatggtctcgatctcctgacctcatgatccgcccgcctcggcctcccaaagtgatgggattacaggcgtgagccaccgcgcccgg

SEQ ID NO: 1218 - DNA, 275 bp, Homo sapiens
ttacaacgtattcctcaaagagctcccaatatccacaagcagattctacaaaagcagtgtttcaaacctgctctatcaaaggaaagtttcaactctgtgaattgaacacacacatcacaaagcagtttctaagaatgcttctgtctagtttttaagagaagataatcctttttccaccataggcaacaaatctctccaaattaacactaccaggttctacaaaaagtgtgtttcaacactgctctatcaaaagacaggatcaagactttgagtta

SEQ ID NO: 1219 - DNA, 275 bp, Homo sapiens
ttacaacgtattcctcaaagagctcccactatccacaagcagattctacaaaagcagtgtttcaaacctgctctatcaaaggaaagtttcaactctgtgaattgaacacacacatcacaaagcagtttctaagaatgcttctctctagtttttaagagaagataatcctttttccaccataggcaagaaatctctccaaatgaacactagcatgttctacaaaaagtgtgtttcaacactgctctatcaaaagaaaggatcaagactttgagtta

SEQ ID NO: 1220 - DNA, 275 bp, Homo sapiens
ttacaacgtattcctcaaagagctcccaatatccacaagcagattctacaaaagcagtgtttcaaaactgctctatcaaaggaaagtttcaactctgtgaattgaacacacacatcacaaagcagtttctaagaatgcttctgtctagtttttaagagaagataatcctttttccaccataggcaacaaatctctccaaatgaacactaccaggttctacaaaaagtgtgtttcaacactgctctaacaaaagtaaggatcaagactttgagtta

SEQ ID NO: 1221 - DNA, 573 bp, Homo sapiens
gtgaagatatcactttttccaacatacgcacaaaagaactcgaaatggacacttgcagattctacaaaaagtatgtttcaacactgctctatcaaaagaaaggttcaacgatgtgaattgaacacacacttcacagaggagtttcagagaatgcttctgtctagtttttaagtgaagatattcctttttcccacataggcaacaaagcgctccaaaagaatacttgtggattctacaaaaagtgtgtttcaacactgctctatcaaaagaaagtttcaagtctgtgagttgaacgcacacatcacaaagaaccttctgagaatgcttgggtctactttttatgtgaagatacccgtttccaacgaataactcaaagagttccaaatatacacaatcagatactacaaaaggagtgtttcattcctgctctgtcaaaagacagtttcaactctgttagttgaatgcacacatctcaatgaagttcctgagaaggcttctgcctagttttttgtgaagatattcccttttccaccatgggcttcaaagcgctccaaatgaaaacttgcaggtcct

SEQ ID NO: 1222 - DNA, 344 bp, Homo sapiens
cttgcagcagcagagctcgttgccacacatccaagggaagtaagtgtgcatatgtggatgcggcgggaatacctgcggtctttctgctgaagagcagggttatacacctccttttagcaatctggagaggactgaggcaagagcttgtattgaaacacaagcaagctccacgtatggttttggacatggaagaaagagtactgttggggtggaatgacctaagtttttaataggattaggatttctgtggatttttcccaagtgatagaagttttcttcatctagcagggagcctcacccaattgcttctctatgttcatttctgaaactcctttgttaaaact

SEQ ID NO: 1223 - DNA, 344 bp, Homo sapiens; identical to SEQ ID NO: 1222

SEQ ID NO: 1224 - DNA, 344 bp, Homo sapiens; identical to SEQ ID NO: 1222

SEQ ID NO: 1225 - DNA, 2694 bp, Homo sapiens
caaccttcttgtggcagtgagtaacatatttctttcctcctgataggcttggaatcctcatccccatctggcaattttctttccatctttcctacactcacaatggagcccacacgcctcacaacccccttgactaaaccagatgacagcaagaatgcctagttccaagtgagcaagggtgaagccttaggcccttgtctcctccagacctcctctctgctctaagagtatactgggcatggggtgtggtcggggggttgggggcggaggagtacttaacctcaaactgagaaaaagggtgtcctgagcaagtttcatagcgtagcagcttccatttgaaatgtgaagctttgaaggcctgttgctacagtaaccagctagctcctgactccaatgcctgtctaatctaaggtggaaatgtcccagaaacagaccccaggctggcagctcttaactatgacccatctcataagcacatatccagctgtagcctcttggttgctggggtgaaggggcctctgtatcgccacaggaaaaaaaatctgataaattacgggctcaagaagggtgttgcttttttttccactaacagacttgcaacccagttcctggtgaaagggctccgcacccacccgtttggtgtgtataatgctgagctaaagtgggaaggagcagtaacaccaaaggaggctaattctcttcctgtcagtaggagagagtgtctgcccccagtgtgtgaaaagggaaggcatgagaagtgaaaaatcagccttctggaagcaccttcttaccacgagaaaacaggtgattcttactatctttgagactcatccagattgtgtctgtttaactcttcaggcaatatgaaggcagagaagccatttcagagaagagattttttaaaaaatcatttcgttctttggcattgtcacaggattatgatgtgggttctcataaaaatttcactccccccaaagccacccaaaggaaaggcagtgaaatggggaggaacacacatttgcctggcatcgcaagagctgccttgtagtcatgggttccagtgatcttggaccgatctcttcacttccctggacctcagtttcttccatacaaagaagttgaactggatcatagaaaagatgctgtccagcttggtaatatcagatagggagcagaagctgtctcttagcacatggccagattccggaacaacgatgatggtctccatgtttgtcctaaaaatgcatctcatctcagtagagattttcttccacctcatttgggtctcaatttaaggaaggaagaaaggaaagaaacccggggattctcttcttgaaaggaatatacttcactttctctaggcttctaggataaaaacttcctatccttcatttttcctctttaaacctgccaaaatcaagttgagtaaagataccatacagatatgaaaaagaagccacatccttaaattttcatggagtccaagagcctgctcaccgccagttagcttttcccaggatggtggtggcactgatcatctaggttgcacttttatgttcatgtcccagagcgtttcccatcagccatctcatttcatcttttcatcattcctctgaggaaaagacttcacacatgtataggactttctatatcacaaagtatttcatatccaatgtcttatttagatcttgacaatcactgtttaaggtaatttggcaagttattaatactcatgtcctcattttactgaagaggaaactgaaatgcagagagcttgtcttttgcccaggatcactcacccagtttattgggaggcagcagcacggggattaagaacatgggttatgccgacaaccaaccaggcagaattccagctctgtcagtagttagctgtctggccttaggaaagggatttcacacctctgtggcttagtttccttgtccattaaatgctcataagaatagagctttcctcacagagattgggtgggcacgggagctaaatgagctcatacgtttaagaacaacctctagcacacagtgcataataaatgtcattattattagcaaagccaggacctgggtcttccagcttctagctcagtggcatttctgctgccccacaccaggactatccttcgtatacaggtatgaacctaaagccttcagtgtttcaatgaaaagttcacccaaggtctttctgttcagtaagtctagagctaagggctcctggcactctgttcagtcctttcgctggtaaaccacgctgccctccgttgctctgggcagaatgtcaaaccttcttatgtttttaaaatttataaatcaagcactcttatttaatattactgacagcccgaaggcagacgctcccactctcctggggaagagggtcttctaatctgccatcttaaggaggtaaaagggcttgattgggtaactcattgcaatgggcacgtatttattactgtctcccggccttttctcatgctgtttgtctgctggaattaccactagtgccaggccatttgaatatttgaccatttgtcttagaattctctgaatacaaatgtttttcatacctttactatgtactttttaagaatgaagactatgttgcatgttggtttgtactctctcctgcacataaaaaatgcttagtaaatagatacacaaatgtttcttgattcctaa

SEQ ID NO: 1226 - DNA, 401 bp, Homo sapiens
caaccttcttgtggcagtgagtaacatatttctttcctcctgataggcttggaatcctcatccccatctggcaattttctttccatctttcctacactcacaatggagcccacacgcctcacaacccccttgactaaaccagatgacagcaagaatgcctagttccaagtgagcaagggtgaagccttaggcccttgtctcctccagacctcctctctgctctaagagtatactgggcatggggtgtggtcggggggttgggggcggaggagtacttaacctcaaactgagaaaaagggtgtcctgagcaagtttcatagcgtagcagcttccatttgaaatgtgaagctttgaaggcctgttgctacagtaaccagctagctcctgactccaatgcctgt

SEQ ID NO: 1227 - DNA, 2695 bp, Homo sapiens
caaccttcttgtggcagtgagtaacatatttctttcctcctgataggcttggaatcctcatccccatctggcaattttctttccatctttcctacactcacaatggagcccacacgcctcacaacccccttgactaaaccagatgacagcaagaatgcctagttccaagtgagcaagggtgaagccttaggcccttgtctcctccagacctcctctctgctctaagagtatactgggcatggggtgtggtcggggggttgggggcggaggagtacttaacctcaaactgagaaaaagggtgtcctgagcaagtttcatagcgtagcagcttccatttgaaatgtgaagctttgaaggcctgttgctacagtaaccagctagctcctgactccaatgcctgtctaatctaaggtggaaatgtcccagaaacagaccccaggctggcagctcttaactatgacccatctcataagcacatatccagctgtagcctcttggttgctggggtgaaggggcctctgtatcgccacaggaaaaaaaatctgataaattacgggctcaagaagggtgttgcttttttttccactaacagactttgcaacccagttcctggtgaaagggctccgcacccacccgttttgtgtgtataatgctgagctaaagtgggaaggagcagtaacaccaaaggaggctaattctcttcctgtcagtaggagagagtgtctgcccccagtgtgtgaaaagggaaggcatgagaagtgaaaaatcagccttctggaagcaccttcttaccacgagaaaacaggtgattcttactatctttgagactcatccagattgtgtctgtttaactcttcaggcaatatgaaggcagagaagccatttcagagaagagattttttaaaaaatcatttcgttctttggcattgtcacaggattatgatgtgggttctcataaaaatttcactccccccaaagccacccaaaggaaaggcagtgaaatggggaggaacacacatttgcctggcatcgcaagagctgccttgtagtcatgggttccagtgatcttggaccgatctcttcacttccctggacctcagtttcttccatacaaagaagttgaactggatcatagaaaagatgctgtccagcttggtaatatcagatagggagcagaagctgtctcttagcacatggccagattccggaacaacgatgatggtctccatgtttgtcctaaaaatgcatctcatctcagtagagattttcttccacctcatttgggtctcaatttaaggaaggaagaaaggaaagaaacccggggattctcttcttgaaaggaatatacttcactttctctaggcttctaggataaaaacttcctatccttcatttttcctctttaaacctgccaaaatcaagttgagtaaagataccatacagatatgaaaaagaagccacatccttaaattttcatggagtccaagagcctgctcaccgccagttagcttttcccaggatggtggtggcactgatcatctaggttgcacttttatgttcatgtcccagagcgtttcccatcagccatctcatttcatcttttcatcattcctctgaggaaaagacttcacacatgtataggactttctatatcacaaagtatttcatatccaatgtcttatttagatcttgacaatcactgtttaaggtaatttggcaagttattaatactcatgtcctcattttactgaagaggaaactgaaatgcagagagcttgtcttttgcccaggatcactcacccagtttattgggaggcagcagcacggggattaagaacatgggttatgccgacaaccaaccaggcagaattccagctctgtcagtagttagctgtctggccttaggaaagggatttcacacctctgtggcttagtttccttgtccattaaatgctcataagaatagagctttcctcacagagattgggtgggcacgggagctaaatgagctcatacgtttaagaacaacctctagcacacagtgcataataaatgtcattattattagcaaagccaggacctgggtcttccagcttctagctcagtggcatttctgctgccccacaccaggactatccttcgtatacaggtatgaacctaaagccttcagtgtttcaatgaaaagttcacccaaggtctttctgttcagtaagtctagagctaagggctcctggcactctgttcagtcctttcgctggtaaaccacgctgccctccgttgctctgggcagaatgtcaaaccttcttatgtttttaaaatttataaatcaagcactcttatttaatattactgacagcccgaaggcagacgctcccactctcctggggaagagggtcttctaatctgccatcttaaggaggtaaaagggcttgattgggtaactcattgcaatgggcacgtatttattactgtctcccggccttttctcatgctgtttgtctgctggaattaccactagtgccaggccatttgaatatttgaccatttgtcttagaattctctgaatacaaatgtttttcatacctttactatgtactttttaagaatgaagactatgttgcatgttggtttgtactctctcctgcacataaaaaatgcttagtaaatagatacacaaatgtttcttgattcctaa

SEQ ID NO: 1228 - DNA, 495 bp, Homo sapiens
gtacttttgaaatttccatctcttacaggtttacttggattgttgcagtaagccctagattggtcaaactgcctgttgtctctaggtttctccagctgctccgccgtcagatatccaaagttctatacacattcccctgtgtatagactctcaatcacttttagaaaaatgaagctccaagcccttcattctccccacttggtcagtctcacctgtcacaactttcccaccaaacttcaaactttttgattcagatatccatggctgtgtacatgcagtcctttgccaaaaatagatgttctccttcactgacctcctgccgcctctatggaacttctaccttcaagaattagctttaagccccaaacccattcttatgagaagcctgccttaattacagagcagagttgaaagactctttgtaagaattctcacagcccttagttcaaatttctactttagtatttgtgtatcattagattacatgtgcatttc

SEQ ID NO: 1229 - DNA, 495 bp, Homo sapiens; identical to SEQ ID NO: 1228

SEQ ID NO: 1230 - DNA, 428 bp, Homo sapiens
aagagactggcagctttcacttcctgtcttttgaaagtctcttgaacttcggacctgggggaagccagctgccgagtgagaagtctgactatccggagatggcggtgagtatagagaatttctgctaggtctcctgtgtttcagccatcccagcccaggcaccacgacacattatcaaaggactatcttggaccttctcatcccagcaaacatccaatggagaagaatgaagactccaggcatatgatcccactctagccatcccaggagcccccagctatccaaacaactacagctgtggccaaaaacatcgtgtatcagggacaaactctctgcttatggctgctctaatccttgacctacagaatcatgaaatttgtggatacggtcatgatcttgattttggcgatggtttcacaggtgtgtac

SEQ ID NO: 1231 - DNA, 428 bp, Homo sapiens; identical to SEQ ID NO: 1230

SEQ ID NO: 1232 - DNA, 429 bp, Homo sapiens
aagagactggcagctcttcacttcctgtcttttgaaagtctcttgaacttcggacctgggggaagccagctgccgagtgagaagtctgactatccggagatggcggtgagtatagagaatttctgctaggtctcctgtgtttcagccatcccagcccaggcaccacgacacattatcaaaggactatcttggaccttctcatcccagcaaacatccaatggagaagaatgaagactccaggcatatgatcccactctagccatcccaggagcccccagctatccaaacaactacagctgtggccaaaaacatcgtgtatcagggacaaactctctgcttatggctgctctaatccttgacctacagaatcatgaaatttgtggatacggtcatgatcttgattttggcgatggtttcacaggtgtgtac

SEQ ID NO: 1233 - DNA, 364 bp, Homo sapiens
agcaccctttatgagtaattggtttcaatgttcgtattcttgatctaaacaataaaaaatcaaaactgcattttctcaatgaatatgtttttctctgttttaagtctcaagaagttatggtagaaatgctttacagaaaatatttttcaagcccggcgtggtggctcatgcctgtaatcccagcactttgggagactgaggcaggcagatcacttgaggtcaggagttcaagaccagcctttccaacatggtgagaacttgtctctactaaaaataaaaaaaaaaattagcctggcatggtgatgcacacctgtaatcccagctacttgggaggccgaggcacgagaatcacttgaacccagga

SEQ ID NO: 1234 - DNA, 346 bp, Homo sapiens
agcaccctttatgagtaattggtttcaatgttcgtattcttgatctaaacaataaaaaatcaaaactgcattttctcaatgaatatgtttttctctgttttaagtctcaagaagttatggtagaaatgctttacagaaaatatttttcaagcccggcatggtggctcatgcctgtaatcccagcactttgggagactgaggcaggcagatcacttgaggtcaggagttcaagaccagcctttccaacatggtgagaacttgtctctactaaaaataaaaaaaaaaattagcctggcatggtgatgcacacctgtaatcccagctacttgggaggccgaggcacgag

SEQ ID NO: 1235 - DNA, 364 bp, Homo sapiens
agcaccctttatgagtaattggtttcaatgttcgtattcttgatctaaacaataaaaaatcaaaactgcattttttcaatgaatatgtttttctctgttttaagtctcaagaagttatggtagaaatgctttacagaaaatatttttcaagcccggcatggtggctcatgcctgtaatcccagcactttgggagactgaggcaggcagatcacttgaggtcaggagttcaagaccagcctttccaacatggtgagaacttgtctctactaaaaataaaaaaaaaaattagcctggcatggtgatgcacacctgtaatcccagctacttgggaggccgaggcacgagaatcacttgaacccagga

SEQ ID NO: 1236 - DNA, 289 bp, Homo sapiens
ggacattagtgtaattcatttactttttctgcagctatgaagggagatttagaagcgtttgtcctagctggtttcagcaaaaacatggggtctcaggttgggtgatgctgttagccattgagaatattcacaacttttccccaccttctcagctgatgcatttagaatttgtctctaaagtttacatacaagaatgctaggtagaagtattttcaaatgtgtataaaatatatctaagttcttaatttcttagaacaattctcaatgcaaacattgtaagaagtcagtc

SEQ ID NO: 1237 - DNA, 2681 bp, Homo sapiens
gatcccgtcgtcgcctcactggctcaggacatcttcaaggagctgtcccagattgaagcctgtcagggcccaatgcaaatgaggctgattcccactctggtcagcataatgcaggccccagcagacaagattcctgcagggctttgtgcggtaagtggccgtgtgtgtgtgtgtgtgtgtgtgagagagatctacaagtgccacccacagatgcatctagctgacaagaacctaatagcgttagagattcatggggtgattttgctgagctcttttgcctgcaaggacagtgggtgattctctgaagctttaagaaaatggcttggcttggcgcggtggctcatgcctataattgcagcactttgggaggccgaggtgggtggatcacaaggtcaggagttcgagaccagcctggccaatgtggtgaaaccctatctctactaaaaatacaaaaattagccgggcatggtggcaggcatctgcagtaccagctactcaagaggctgaggcaggagaatcacttgaacccaggaggcagaggttgcagtgagtggagatcgtgccactgcactccagcctgggtgacagagcgagactgcctcaaaaagaaagaaagaaagaaaatggctcttcttgttccagaggtaccctcagtgaattgaacagagtgccacctttacacagtgccactaagtatgtcacctggttatccaatccactaccatgtactactgcccacccctatggctaatcaattagtaagctattatgagaaggctgagagtactacccatttaattattccttttattttggaaacttgcctttcattaataagctttctctgggttgctatgtaatacccatccagtaaggatcttggttgttgggcaacccccaccccagaggcaattctgacttttctttttcttctctctttcagacagccattgatatcctgacaacagtagtacgaaatacaaagcctcccctttcccagcttctcatctgccaagctttccctgctgtggcacagtgtacccttcacacagatgacaatgccaccatgcaggtatctgagacatggagagtagaagagggaagatagctccccagccatgggcttatactatgctgagaaatctgacatggttttatgcttttgaaatacggaattctcaactccatatttacttagcagattcaggaagggttcagtctgcaaaagccaagcatttctggtgctttggagcatgttacagtttttaaaaatatggataccaagcaccctgcccatctgtattgggtattgctactgtgaaagaggttacagacatctagacttggggccataagaaagtctttctgcatatttcttctagtaataaagtcagcagagtgatgggcctctagagaggggagacatgcctgaatattttttctctttttgtttcttgggtgaattggttaccttttcaggtgtctgctactgtgattgattagaaaggttataggaacttgccagtgaatattgatcagcttggaaatccctaggcaactagtggtttgtgtaagacctatataaagacctacagtatccccagttattccaagattgtaagcatatttttttagtaccagaggtagacctttatgattaaaattcattttgcttggccattgtcccttgtgattaaaaaaatatatatacacatttgtgagatagctgattaggtaaagggggaattatgtaatgcacgtctatgtctgtaacagtaaatgtcttaactccagtggtatgagcccaccacaaacattatagactcaccgcttttatgaggcataggcctctgggaacatttgtttatacagactgagggccttctggcatctgtccctcgattactaatcttgcttgccacccctgtctccccagaatggcggagagtgcttgcgggcctatgtgtcagtgaccctggaacaagtagcccagtggcatgatgagcagggccacaatggactgtggtatgtgatgcaagtggtgagccagctcctggacccccgcacctcagagttcactgcggcctttgtgggccgctttgtttccaccttcatctccaaggcagggcgggaactcggggagaatctagaccagattcttcgtgccatcctcagtaagatgcagcaggcagagacgctcagtgtcatgcaggtaagagagcagtggggagtgggcttcctactccctggctgatagaaatgaaaattcgtattttggtcctgagttattttattttaccctcttactagccttgtaggacagttaagtaaaatgggacctgtctgatctgtttggcctaagaaacatggacaaggaaatctcccatgttttcttgtcctgtggataataccctcagtgtagactgtatttcttatctgactggccagttccctctcatctcctatgtctctgaaattgatttccctgaagcaaatgtccttattttctcctagtccctgatcatggtgttcgctcatctggtgcacactcagctagaacctctcttggagttcctgtgtagcctcccaggacctactggcaaacctgctctagagtttgtgatggctgagtggacaagccgacagcacctgttctatggacagtatgaaggcaaagtcag

SEQ ID NO: 1238 - DNA, 10248 bp, Homo sapiens
gttattgtgaccaactgaaagtctcagagagtacccacgtgctccagcccttcctccccagcatccttgatggcttaattcacctagcagcccagttcagctcagaggtcctcaacctggtgatggagaccctgtgcatcgtttgtacagtagaccccgaattcacagcaagcatggaaagcaaaatctgccccttcaccatcgccattttcctaaagtacagtaatggtatgctgccagggaggatgtattatgaggggcaccaaagaaaaggtggtggctggtgaatttaaatgaaagattccctaggtctggtcttagctatgaagctatggttttaacatcgtaagcaaagaatctggctttcaattagcaaaaaatagaattgtgctgtaaatgtagcagcattaaaaaatagagtacctatttctgtaacacttactctctagtaaggacttagggataaagataataaataaagggctaataagcaagagacataattcagaactttgatgatagaataggaaattgggcaaatgaaaagcctcctaaaagaaaagggctaggactataatttagaaaaggagatactaaagaaagatatatggaaaagtttataaacaaaggtattcactagatattttttacagtagtaaaaatttggaaattataaaaagacattagttaattatatccataaaatgaaatactgtgcagccattaaaaatcaagcttaaaaggaatatctgaaaccatgggaaagagcttacattataataaatgaaaagatacttttcccaaaaaatccatagaatatgatcccaagttttgatttttcttttagaaaagcatgtatgtatagataggtatgttttaaaaaaaaatacatcaaaatgttgagtgtttaggtagtggaattacaggtgttttcattattacttttctgcattttaagttttttttttcctgtagtgaatgtatttattaataccttattactagtaaaatattaaggattctttttttaaagagagagctccaatattgaagctcagaaagatgtacaggataaggattatttatataatgtgatatactgaacatgttatttgatagctttttcactgaaaaatgtgtactgaggagctttccacattgtgttcttggatatatctcattcttttcagccattactaatgttccataaaatgggtatatcataatttacccattctgttaatggacatctagggtattcccaatttttttctattacaaacaatgctgcagtgatcttttaaggtatactttaatgcacattgcctatatttttccatactaaatagaggaggatgttttgttctatagataaagaagattgagctaaagttccctttcttcataaggctctgctttttaggagttttgccttttgccccagaagtagctttgagagttcttcatgtctaccgtggctaccccataggagatatgtatgatttctctcatgcatcaaagccagtgttttggcaatttttgcagctttcatgtcttcttaaagtatcagttgggctttttttttttttttaagcatttggttttataacgtaggtttcacaagaataaagactttaaagatttttctctagaaaaagccacattttgttttatgagtagctgttaatgactagtccctactttaatgaagccatacaaagtgtacctcttgcagatttaggatctctcctgttctttcaggttattcatgtggccccactaggtcccgggtatgtgataagtaatcaatgcagaagttgttaacttaggttagggccaaacaacaggcatcattaagcgagaagcagatgcagaccatcaggcagggggattccgtgttgccttatccacttcagatcccgtcgtcgcctcactggctcaggacatcttcaaggagctgtcccagattgaagcctgtcagggcccaatgcaaatgaggctgattcccactctggtcagcataatgcaggccccagcagacaagattcctgcagggctttgtgcggtaagtggccgtgtgtgtgtgtgtgtgtgtgtgagagagatctacaagtgccacccacagatgcatctagctgacaagaacctaatagcgttagagattcatggggtgattttgctgagctcttttgcctgcaaggacagtgggtgattctctgaagctttaagaaaatggcttggcttggcgcggtggctcatgcctataattgcagcactttgggaggccgaggtgggtggatcacaaggtcaggagttcgagaccagcctggccaatgtggtgaaaccctatctctactaaaaatacaaaaattagccgggcatggtggcaggcatctgcagtaccagctactcaagaggctgaggcaggagaatcacttgaacccaggaggcagaggttgcagtgagtggagatcgtgccactgcactccagcctgggtgacagagcgagactgcctcaaaaagaaagaaagaaagaaaatggctcttcttgttccagaggtaccctcagtgaattgaacagagtgccacctttacacagtgccactaagtatgtcacctggttatccaatccactaccatgtactactgcccacccctatggctaatcaattagtaagctattatgagaaggctgagagtactacccatttaattattccttttattttggaaacttgcctttcattaataagctttctctgggttgctatgtaatacccatccagtaaggatcttggttgttgggcaacccccaccccagaggcaattctgacttttctttttcttctctctttcagacagccattgatatcctgacaacagtagtacgaaatacaaagcctcccctttcccagcttctcatctgccaagctttccctgctgtggcacagtgtacccttcacacagatgacaatgccaccatgcaggtatctgagacatggagagtagaagagggaagatagctccccagccatgggcttatactatgctgagaaatctgacatggttttatgcttttgaaatacggaattctcaactccatatttacttagcagattcaggaagggttcagtctgcaaaagccaagcatttctggtgctttggagcatgttacagtttttaaaaatatggataccaagcaccctgcccatctgtattgggtattgctactgtgaaagaggttacagacatctagacttggggccataagaaagtctttctgcatatttcttctagtaataaagtcagcagagtgatgggcctctagagaggggagacatgcctgaatattttttctctttttgtttcttgggtgaattggttaccttttcaggtgtctgctactgtgattgattagaaaggttataggaacttgccagtgaatattgatcagcttggaaatcctaggcaactagaggtttgtgagagacctatataaagacctacagtatccccagttattccaagattgtaagcatattttgttagtaccagaggtagacctttatgattaaaattcattttgcttggccattgtcccttgtgattaaaaaaatatatatacacatttgtgagatagctgattaggtaaagggcgaattatgtaatgcacgtctatgtctgtaacagtaaatgtcttaactccagtggtatgagcccaccacaaacattatagactcaccgcttttatgaggcataggcctctgggaacatttgtttatacagactgagggccttctggcatctgtccctcgattactaatcttgcttgccacccctgtctccccagaatggcggagagtgcttgcgggcctatgtgtcagtgaccctggaacaagtagcccagtggcatgatgagcagggccacaatggactgtggtatgtgatgcaagtggtgagccagctcctggacccccgcacctcagagttcactgcggcctttgtgggccgccttgtttccaccctcatctccaaggcagggcgggaactcggggagaatctagaccagattcttcgtgccatcctcagtaagatgcagcaggcagagacgctcagtgtcatgcaggtaagagagcagtggggagtgggcttcctactccctggctgatagaaatgaaaattcgtattttggtcctgagttattttattttaccctcttactagccttgtaggacagttaagtaaaatgggacctgtctgatctgtttggcctaagaaacatggacaaggaaatctcccatgttttcttgtcctgtggataataccctcagtgtagactgtatttcttatctgactggccagttccctctcatctcctatgtctctgaaattgatttccctgaagcaaatgtccttattttctcctagtccctgatcatggtgttcgctcatctggtgcacactcagctagaacctctcttggagttcctgtgtagcctcccaggacctactggcaaacctgctctagagtttgtgatggctgagtggacaagccgacagcacctgttctatggacagtatgaaggcaaagtcaggtagaacctcatctttcttttctgggcattctgccaccactcatatttcttttttttttttttttttttttttttttttgagacagtctcgctctgtcgcccaggctggagtgcagtggcacaatcttggctcactgcaacctccacctcctaggttcaagcaattctcctgctcctgcctcagccgtccgaatattacacacatgcaccaccatacccagtgaattctttgtgtgtgtgtttttagtagagagagggtttcaccatgttggccaggctggtcttgaactcctgacctcaagtgatccacccacttcggcctcccacagtgctgggattacaggtgtgagccactgctcctgacacatatttcttttttttcctgatttgctccattgatttttgtttgacatttcaaatggctctctgtattcccttttccctgtctttctttattgctaacgcacatatgtgaatagctgccatcttgaaatccccaaaagacagtcaacacaggtagactatatatttctggtctctgtttacaagagatcccttctctaccacagacttcacacagctaagtgctgctagtggcttattttcctttataagcccaagccttggccaggcacagtggctcacacctataatcccagcactttaggaggctgaggcgagcagatcaccggaggtcaggagttcaagaccagcctggcaaacatggtgaaacactgtctctactataaatacaaaaaatagctggatgtggttgtgggtgcctgtaatcccagctactcgggaggctaaggcaggagaatcgcttgaaccaaggaggcagatcacgccattgcacttcagcctgggcgacgagcgaaattgtctcagaaaaataaaaataaaaaacccaaccttctaaccctggcttcctaactttttatcctggatttttataccactgattcttatcacctcgttgcaccttacaatatggtgcaaccttagctttgttcaagaagaacaggtcacctgtaatcccggcactttggaagactgaggtgggcgaattgcttgagacccacccgggcaacatggtgaaacctgtgtctaccaaaaaaatacaaaaattagccaggcacggtggcgcatgcctatagtcccagctacttgggaggctgaggtgggaggatcacctgaacccagggaggtcaaggctgcagtgaaccatgatcacaccactgcactcagcctgggtgacagaatgagaccctatctcaaaaacaacaacaacaacaacaacaacaaaaaagcacagatctcattaaaccacctcatgaactctaaaatctcattttcagctgaactctcttagctctcctaattagttgttaacggaattttcactatcaaatagagggtcttaggacataattgcttatctccttggagtgaactcgagatgggcggctgattgacctttttttggatcttccttgccagctctgtggcactctgtaagctgctccagcatggcatcaatgcagatgacaaacggctacaggatatccgtgtgaagggagaggagatctacagcatggatgagggcatccgcacccgctctaagtcagccaaaagtgggtgctgctgcgattcttccaatcctctccctatacgaaggggctaaggatacctgggtgaagggaaggaatgcactgtggtgtatatttttaaaacaattgttggtgatgggtttgataaagaagaagcaggaaacttaggtaaaagggatcagaacatacggtttcttcctgttgtggaaaatggacaaaaataggccgggcatggtggctcacgcctgtaatcccagcacttggtgggaggccagagcggatggatcacttgaagtcaggagtttgagactagcctgaccaacatggtgaaatcccgtctttactaaaaatacaaaaattagccaggcatggtggtgggcgcctgtaatcccagctacttgggaggctgaggcaggagaatcgcttgaacctgggaggcagaggttgcggtgagcaaagatcgtgccactgcattccagcctggacaacaaaatgagactccgtctcaaaaaaaaaaaaaaaaaaaaaatgcaggcgtggtggctcacacctgtaatcccagcactttgggaggccgaggtgggtggatcgcctgaggccgggagttcgagaccagcctgaccaacatagagaaaccccgtctctaccaaaaatacaaagttagccaggcatggtggcgcatgcctgtaatcccagctactcgggaggctgaggcaggagaatcgcttgaacccgggaggtggaggttgcagtgagccaagatcacgccattgcactccagcctgggcaataagagcaaaactctgtctgaagaaaaaaaaaagacaaaaatagtctcaggcaccaagcatcccagcttccagcttcattcagaagcgtgggcacagatagtcagcatgtctttgttactgagttgcctttggcctgtaactccaatgatttgcaggtagggagtatagagctgctatctttaatgtagatttataattacctccgctgtctctcaaattctaagtcattgggactggagtactggctctatacagttccttggtttcagagctttattactaacaagactgtatctcctttaatccctgaactctcatctctcccagcttctgaactgttacaataccaaacaataaagttatttaactttaagtcactctttggagactggatatagtcaggtacagtgaaagtctgaggggtggtgaactctggtgagtggcactgaggagaggacaggggtacttccagaagtaagctcagtgacactctgacttgaaacctttttcttccttcccagacccagaacgctggacaaacattcctttgctggtcaagatcctaaagctgatcatcaacgagctctccaacgtcatggaggctaatgccgctcgccaggccactcctgcagagtggagtcaaggtgcaccaggcccttactcccaggagacttttagcctggcagatcaagttacaaattgtcaaattatcaacttggtttgttgagtcactaattgaaaaaaaaagttgatggaatggctgctctgtggctggcaccatgctaggcactaggcatgtagagctgcttctccagtctgccatatgaaatctcacagaggctggggtgggaggcagccaggaggcaagctaacatagcccttctttggtttgattcttcttaagagcctgtcaacacttatatctccaggttctttcattgagactaaccaggagggtttggccatttctgattctctttcactggggactacaagccacattgcagaagcctttggggcccttctattctggcctatttggatttggggagggaaaatgcatgaatgtgctctagctctagctgcttttcatctccaagtagatgactccaatgatatgtgggaggaccaggaggaggaagaggaggaggaggaggatggtttagctggccaacttttatctgacattcttgctacaagtaaatatggtaagctgtttgataagaggacagccatggtaaataccttttctttgcacactgatcccaacagtggggtacccaagaaaggggagaggtgggcccacagggacatttcttgggcttttgcaccttccgcctcagtcatgtggtagtatatcaccactcagggcctgatcatgggcctttgtcctgacccgccctgtgttggctatgtctaacagaggaggattactacgaggatgatgaggaagatgaccctgatgccctgaaggatcctctctatcagattgatctgcaggtgagggtgtccagagatatcttgcaaatgacaatgtcccaggccatggaaacaggaatatgggctcaaatccatttatagccaggcatggtggctcatgcctgtaatcccaacactttgggaggtcaaggcgggaggattgcttaagcccaggagttcaagaccagtctgagcaatgcagggacaccctgtctctacaaataatttaaaaattatctgggcatagtggcacacccccgtggtcccagctactcgggaggctgaggtgggaggatcgcttgaggccaagaggtcaaggctgcagtgagctgtgatcataccactgcactcgagcctgggcgacaaagcaagaccctgtgttcaaaaaaaaaaaaaaatccatttataatttaacatgggagcctcatgggaaagagttcctgtcttgttgagtggtccagggttttgggtgggctggaactttgcacttgatgtgttgtaattcatcttctagaggctatgttgtgaaggtccttggggtgatacagccttggaaaaatgttgtttccctgtggattacctaaactagatccaagaacatgaaagaccatccctcagggagctggcatttgtctaaaaaccagcattccctgtgccatttgattgtggttcttgctccactgcaaatgggtgacttgcaatgtctcactaatgccactcttgctctttcctccaggcatatctcacagatttcctctgccagtttgctcagcagccctgctacataatgttttcaggccaccttaatgacaatgagaggcgagttctacagaccatcggcatctaaaaaggggagcctttctacatttgctccttctgggccagccgcaaaccattttgcagccctcactggccttgagatgcactttcttctcaacctaaagtggcatcttgacccttggcccttggcttcggcagtgacactgatgacaattcagaccaggctcaccggtgccgtcacttaggaatgctggaacaaaggacatttctcaaagttcccctgaagacatgccatctctagaaccttttttctccccgactctacccccacctctgttcctagagccctctgctggcgagtccagaaacattattgcccagaaggattatgtgtttatggattattttgccccgcctcaggagcgcaggaagtcactaccatttatattctaaaacagacctatctatgttcataggacttctgatgtgttcagataggaatcctcatgagagatcattatgctttgtgccctggaccactgctgctctgggttctcaggaggaacaggcaagagcagcttcattctaagcctttccagtgacctcagccttgcttctcttctacaacactaaggctcctctgtcagaggaggtcgtcttgtttttgcttcattgcatgacataacccttcccctcaagctgttcctatatatacatgcacacacaaaataagccagacagatggcaatttgatcttccttttttagaaaaaaaaaaaaaaatggggaaaagggattttttttaaatccacctgacccaactatatttaatatgcctctcccacacattaccacagagtctgatattcaaaggttatcccctttccctcaggaagcctctaaagtgcttaagttgtagccctcaaatttgcaacatgtatttttctaggacagtaaagtaatctttacaaatgaatttagttgcatggtataa

SEQ ID NO: 1239 - DNA, 116 bp, Homo sapiens
ttttttttttttttttttttttttgagacagtctcgctctgtcgcccaggctggagtgcagtggcacaatcttggctcactgcaacctccacctcctaggttcaagcaattctcct

SEQ ID NO: 1240 - DNA, 256 bp, Homo sapiens
ttcaaagagtaaatgaggattagaaaatcatggagagaggctgggcgcggtgtaacgcctgtaatcctagcactttgggaggctgagatgggcggatcacttgagatcaggagtttgaggctagcctggccaacacagtgaaacctgcatttctactaaaaatacaaaaattagctgggcatggtggtgcatgcctgtaatcccagttaacttgagatgctgaggcaggagaatcgcttgaacttgggaagcagag

SEQ ID NO: 1241 - DNA, 600 bp, Homo sapiens
gcaaaaaatagaattgtgctgtaaatgtagcagcattaaaaaatagagtacctatttctgtaacacttactctctagtaaggacttagggataaagataataaataaagggctaataagcaagagacataattcagaactttgatgatagaataggaaattgggcaaatgaaaagcctcctaaaagaaaagggctaggactataatttagaaaaggagatactaaagaaagatatatggaaaagtttataaacaaaggtattcactagatattttttacagtagtaaaaatttggaaattataaaaagacattagttaattatatccataaaatgaaatactgtgcagccattaaaaatcaagcttaaaaggaatatctgaaaccatgggaaagagcttacattataataaatgaaaagatacttttcccaaaaaatccatagaatatgatcccaagttttgatttttcttttagaaaagcatgtatgtatagataggtatgttttaaaaaaaaatacatcaaaatgttgagtgtttaggtagtggaattacaggtgttttcattattacttttctgcattttaagttttttttttcctg

SEQ ID NO: 1242 - DNA, 366 bp, Homo sapiens
caaaatattatcattatgatgctacttttagtatggctgtgttttagatcatttcattgttattggggattttttttagagaaacttttatacttccataatatttagattgttttacagaagaaacacttaaatgtgtttgctttccgtattaatacacgattactttgttactcatattagaactatttaaaaatatttatatggatacaagtaaaccatctacctcgataagttgacagatttaaatccgtcaagctagtaaccaggaagcggacttaaagctggtaactaggaagtgaacttcacacttagaagaaacaaaagtgaaagtctgtttttactcagacactttatgggttatct

SEQ ID NO: 1243 - DNA, 366 bp, Homo sapiens; identical to SEQ ID NO: 1242

SEQ ID NO: 1244 - DNA, 436 bp, Homo sapiens
agacggtgccaggtattgagagcgaccctcacattcctacagtgctctgtgtggcatcttaatgaaactttattctctccccttaaatgagaaagaatagctagttgtcatcctttctgaaccgattttgtctttcaaaggtagtagtgtaccaggcctgctattttgcaaaacggtctccaccaaaatcgaattacctgcctcgcggggcaggcgtgttgaccaggtggactctagaagtaggtggtttgcttggtttcttttccttttaaggtttccctttcttcttcttcttttctgtttttttttttttttttttttttttcaatatagaaactgtccctaagagaggaaacctttctggccatgttattccaggaatcttttgtcccctaagtttgaccttgttctttcgttcaccctttactcttgcatc

SEQ ID NO: 1245 - DNA, 436 bp, Homo sapiens; identical to SEQ ID NO: 1244

SEQ ID NO: 1246 - DNA, 9192 bp, Homo sapiens
tcccaaagtgctgggattacaggcgtgagccaccgcgcccagcctattattcctaagaaagttgcaaacagtattcttttcagttgtgttagaaagtattggtctgtgtttataccattcttcttcatatttctttagttattaaatgtctttggtttagctgacttagtgaaatttattactaatttgaagttttgtttcacatatgaattttcatgaagcatgtacattttataatatacttaagtagaggttgagcattccttatccacggtgcttgggacctgaagtgttttggatttcggatttttttgtagctggaattaacaggagtgagtcaccacacccagctaatttttttatttttagtagagtcagggtttcactatgttggccaggctggtctcaaactcctaacctcaagtgatccccccaccttggcctcctaaagtgctgggattacaggtgtgagccaccacgcccagcttgcattgtacttttattggtataatgcaggtgtaatccaatatctaaaaattagacatctgaaatgagcattttctttgagcatcatgttggcactcaaaaagttttggattttggagcattttgggcttcagaattttgaatttgagaatcttaaactgtatatataattaaaattagattctgaagttaaatattctagaatatttaactctcactaaagacaatttagaactataattaaaaaatacgcctgtaatcccagcactttgggaggccgaggcgggcggatcacgaggtcaggagatcgagaccatcctggctaacacggtgaaaccccgtctctactaaaaatacaaaaaattagccgggcgtggtggcgggcgcctgtagtcccagctactcgggaggctggggcaggtgaatggcgtgaacccgggaggcggagcttgcagtgagccgagatcgcgccactgcactccagcctgggcgacagagcgagactccgtctcaaaaaaaaaaaaaaaaaaaaaaaaaaaaaatactctgagacatagatatatgttttttatgccaagatttgtttacaacagcattattttatgtacaattgaacagatttgtattataataagattaaatgcaaatctttctcaggaaaaatataaagaaaattataaaatttttttgataacatgattttttttttcttttagagatggggtctgtctctgtcatccaggctggagtacagtggtgccatcataactcactatagtctcgaacttctgggctcaagcaatcctcctgtctcagcttcctgaatagctgggactccaggtgtgtgcttccatgcccggctaatttttaaatttgttgtagagatggggtcttgctatgttgcccaggctggcttcaaattcctggcctcaagcaatcctcctgcctcagccccctaaattgctgggattagaaacatgaaccattgttcctggctgttaatgtgatttttaagagaggggttaaaaaaatctgttaacttagaataaagttttgacaatcccggttctggttagtgcataagttttcatctttgttttatagccatgaagtacaatcaagaagaaattgaaaaacagtcagagttagatgatgagcttcatcgtttgtcatgcaggatttttatcccctgaagaacctgctagagaagtccaccttcacccttaaccactggtgcctcaacttaatacttttaaaattcatttgtttctgttggaattgggatactaaggtgtgttaagtaaaatacaatatttactttttcattccttatgagtgacaaaatgtctgctttccaggtgtgagatttgaaggaaatcagacctttcctttatttatttatttattttttatttttgatacagagtttcactctcgttgcccaggctagagtgcaatggctcactgtaacctccacctcctatgtttcaagcgattctcctgcctcagcctcccaagtagctgagattacaggtgcctgccaccacatctggctaattttttatatttttagtagagacggggtttcactatgttggctaatctggtctcaaactcttgaccccaggtgatctgcccgcctcagcctcccaaagtgctgggatcacaagcatgagccactgcgcctggccttttccttgatttttaaaaagacctaatatcgttagtagaattctaatctttctccacctactttttaatttatttaaaaaatgagttgttagctatgaattagtaaccatttctttaaaagtctaagaactcagccagaaaaagcagcatcagcaagtggtgaagacaccaaattgaaaaatgtgcatatattgtttctagcattgccaacctgtttattgagacaaaagcaaatcaaaaccaatcaaacttttgatttagttttaggaatttagattttttcaaatattgctcatcaaattatgtagacaaacaattatatttcatgtttttatatatatataattttcacagcagagcttttagtttatattttaattgatgtcagccatgctcttggtgatcctgaatgccatgtagcagtttgattgtcagccagcccttgacagtgcacttctctttctctgctccaccctctggttaccatcaaagctctgcatgcctgtgtcaacaagttttgttttactaattgtttataatcaattgcagttaatagtttaagttttgctgggaaaatttgcttacctccttttattattttataattagtaataaatatatttcccaagcctttccagatttatgaatatatacctcagaattaaagtgttacaatatttattttacaattcttataattttggctactctgtagaatttttatttttattttattttatttttttgagacagagtcttgccctgtcactcaggctggagtgcagtggcgtgatctcggctcactgtaacctccgcctcccagggtcaagcaattctcctgcctcagtctcccaagtagcggggactataggcatatgccaccacacctggctaatttttgtgtttttagtagagatggggtttcaccatggtggccaggctggtcttgaactcctgacctcaggtgatccacctgcgtcggcctcccaaagtgttgggattacaggtgtgagccaccgtgcctggcctatttttattttttattttattttatttatttatttatttttgagatggagcctcactctgttgcccaggctggagtgcggtggcgcaatcttgcctcactgcagcctctgcctcccgggttcaagtgattctcctgcctcagtctcctgagtagctgggactccaggcgtgtgccaccatacccagctaatttttgttttttcagtagagacggggttttgccatgttggtcatgctggtcttgaatgcctgacctcagccgatccacctgcctcagcctcccaaagtgctgggattacaggtgtgagccactgtgcctggctaatggaattttcaaatgagtaatgatttattttccacatgatttcaaagttatgactagtccaagtgattttttttattatactttaagttttagggttcatgtgcacaacatgcaggtttgttacatatgtatacgtgtgccatgttggtgtgctgcacccattaactcgtcatttaacattaggtatatctcctaatgctatccctcccccctccccccacccccacaacaggccccggtgtgtgatgttccccttcctgtgtccatgtattctcattgttcagttcccacctatgagtgagaacatgtggtgtttggttttttgtccttgcgatagtttgctgagaatgatggtttccagcttcattcatgtccctacaaaggacatgaactcatcattttttatggctgcatagtattccatggtgtatatgtgtcacattttcttaatccagtctatcattgttggacatttgggttggttccaagtctttgctattgtgaatagtgccacaataaacatacgtgtgcatgtgtctttatagcagcatgttttataatcctttgggtatatacgcagtaatgggatggctgggtcaaatggtatttctagttctagattcctgaggaatcgccacacagatttccacaatggttgaactagtttacagtcccaccaacagtgtaaaagtgttcctatttctccacatcctctccagcacctgttgtttcctgactttttaatgattgccattctaactggtataagatggtatctcattgtggttttgatttgcatttctctgatggccagtgatgatgagcatttgttcatgtgtcttttggctgcataaatgtcttcttttgagaagtgtctgttcatatcctttgcccactttttgatggggttgtttttttcttgcaaatttgtttgagttcattgtagattctggatattagccctttgtcagatgagtagattgtgaaaattttctcccattctgtaggttgcctgttcactctgatggtagtttcttttgctgtgcagaagctctttagtttaattagatcccatttgtcaattttggcttttgttgccattgcttttggtgttttagacatgaggtccttgcccatgcctatgtcctgaatggtattgcctaggttttcttctagggtttttatggttttaggtctaacatttaagtctttaatccatcttgaattaatttttgtataaggtgtaaggaagggatccagtttcagctttctacatatggctagccagttttcccagcaccatttattaaatagggaatcctttccccatttcttgtttttgtcaggtttgacaaagatcagatagttgtagatatgcggcattatttctgagggctctgttcttttccattggtctatatctgtgttttggtaccagtaccgtgctgttttggttactgtagcctgatgcctccagctttgttcttttggcttaggattgacttggcaatgtgggctcttttttggttccatatgaactttaaagtagttttttccaattctgtgaagaaaggcattggtagcttgatggggatggcgttgaatctataaattaccttgggcagtatggccattttcacaatattgattcttcctacccaggagcatggaatgttcttccatttgtttgtatcctcttttatttcattgagcagtggtttgtaattctcgaagaggtccttcacgtcccttgtaagttggattcctaggtattttattctctttgaagcaattgtgaatggcagttcactcatgatttgtctctctgtctgttattggtgtataagaatgcttgtgatttttgcacattgattttgtatcctgagactttgctgaagttgcctatcagcttaaggagattttgggctgagacagtggggttttctagatatacaatcatgtcatctgcaaacagggacaatttgacttcctcttttcctaattgaataccctttatttccttctcctgcctgattgccctggccagaacttccaacactatgttgaataggagtggtgagagagggcatccctgtcttgtgccagttttcaaagggaatgcttccagtttttgcccattcagtatgatattggctgtgggtttgtcatagatagctcttattattttgaaatatgtcccatcaatacctaatttattgagagtttttagcatgaagtgttgttgaattttgtcaaaggccttttctgcatctattgagataatcatgtggtttttgtcgttggttctgtttatatgctggattatgtttattgatttgcgtatgttgaaccagccttgcatcccagggatgaagcccaccttatcatggtggataagctttttgatgtgctgctggattcagtttgccagtattttattgaggatttttgcatcgatgttcatcagggatattggtctaaaattctctttttttgttgtgtctctgccaggctttgctatcaggatgatgctgggctcataaaatgagttagggaggattccctctttttctattgattggaatagtttcagaaggaatggtaccagctcctccttgtacctctggtagaattaggctgtgaatccatctggtcctggactttttttggttggtaagctattaattattgcctcaatttcagagcctgttattggtctattcagagattcaacttcttctgggtttagtcttgggagggtgtatgcgttgaggaatttatgcatttcttctagattttctagtttatttgcatggaggtgttcacagtattctctgatggtagtttgtatttctgtgggatcggtgatgatatcccctttatcattttttattgcatctatttgattcttctctcttttcttctttatttgtcttgctagcggtctaccaattttgttgatcttttcaaaaaaccagctcctggattctttgattttttgaagggttttttgtgtatctctttcagttctgctctgatcttagttatttcttgccttctgctagcttttgaatgtgtttgctcttgcttctctagttcttttaattgtgatgttagggtgtcaattttagatctttcctgctttctcttgtgggcatttagtgctataaatttccctctacacactgctttgaatgcgtcccagagattctggtatgttgtgtctttgttcttgttggtttcaaagaacatctttatttctgccttcatttcgttatgtacccagtagtcattcaggagcaggttgttcagtttccatgtagttgagtggttttgagtgagattcttaatcctgagttctagtttgattgcactgtggtctgagagatagtttgttataatttctgttcttttacatttgctgaggagagctttacttccaagtatgtggtcaattttggaataggtgtggtgtggtgctgaaaaaaatgtatattctgttgatttggggtggagagttctgtagatgtctattaggtctgcttggtgcagagctgagttcaattcctggatatccctgttaactttctgtctcgttgatctgtctaatgttgacagtggggtgttaaattctcccattattattgtgtgggagtctaagtctctttgtaggtctctaaggacttgctttatgaatctgggtgctcctgtattgggtgcatatatatttaggatagttagctcttcttgttgaattgatccctttatcattatgtaatggccttctttgtctcttttgatctttgttggtttaaagtctgttttatcagagactaggattgcaacccctgcctttttttgttttccatttgcttggtagatcttcctccatccctttattttgagcctatgtgtgtctctgcacatgagatgggtttcctgaatacagcacactgatgggtcttgacgctttatccaatttgccagtctgtgtcttttaattgatttaatggtgagagagaaaaaaaaattgcatctagttctctttgctatctcccatgaatcattgcatttaacatgttatttctgctcaactttagttcattttcaatgtgcatttttagtgatgtcagagtatgtgtcatttaattaaatccccgcccttgctttagattttctgtgcatggggtgtgaggcacatatgcagtctgtgccatgttgtatttgttttgtaccatgttgtttggcctattttgcttccatgctgtcctccattgttaaggtgatttggagttgttttacttttgaattttatcctttctgttcttggtgtgacaactttctaaatatttccttattaaagtagtgatatgtagatgatttcctttttaaagcatatttactatgtcctttaatgttttaaacagttttatggaggtatttattgaagtatttttatcaaacatgactatttaaaatccctatcaactttgtgtagtgattctttcttgttctatgacacttagtaatatatcttagaatttgcatcttaatttttttctaactaaatctcagtcctaatcccatatcattttttatttcttttgatatgtgtgtgtatttattccctttgatgttcatagtatgtttcattgaggttcaaggttgattttttggggaaaagaaaaagcacctttgcagaaaagtcagtttttctagagctagttaggcaggccctcattcctggtttggtttcaattgcagagagttcttgtatctctgcaggggaatttctgactcatggggtgggtccctgactccttactcctctctgattgagtgaaccagcatctggggcaaatacgtagcagtcagatgctctgatgaatgtccctgttcagttctttgacttttttgtatcctccttaaataataatggttttaaagataagcagaagcctatctatagtactttatagatctcagcagggattattcatcttacagttaatacaggaagaaacatctttgatacggaaagactagggtgttaattcagcaatctctggttaggagaaaagtagcctagtttattacttcttcactacttttgcctggatgacctgaattttaatcaagaagttctttcctctctatatgcgctcccccattttcccacttttgtattgactttcccactattgtatttctaatgcaccttcttaatcactggagaaagctttgaggcatgtaagaggtcctagcaccattttcagtcttaaagtttcatagccaccagctttatgggactctattatcaggcctttcaaacaaattcttcccttccctcacaatcccaagctattgatcttttctctaaggaagccttttgtattactaattaagactaggtgactatattaaaacagggttatcttctaaaagatttatataaatgataaaacagaggctaagtatttttgtaaggacagcaatttgaagtcagttaatgcctagagtgactgtttcattcttctgctatggctctggtgacttcctgataattctgtccgagcccctgtgtccagttccaggacctaagaatggaagagctctggaggctgaaggtggaagatggatccccctttcagggacagtga

SEQ ID NO: 1247 - DNA, 342 bp, Homo sapiens
tctcaaaaaaaagaaaagtaaccttttataaatatggggctgaaaacgttatttttaaattttggaaaaagttctactagcttgaagattacttagatttattttttcttggcttatttagatatttggcctatttttaaaactataaataaataattggattttaatttgatagagaatcagaaaaacagagactttatataatttttgttacatttgaattcattttataaatatatgttgtaaaaattcttccagtgcaatattttttggaaaatattgttctagtcgttgtttgtataggtttatttctaattatattaaaagtaaaattagaaaaat

SEQ ID NO: 1248 - DNA, 467 bp, Homo sapiens
ggctaccctagcacctcacaagtttacattgtttcacttaataatttttaaactgttagtccttattttataaatttttagatgatcattgcatattcctccaaacatacttaaataatggatcccaaaattaaatatagcagtttagaaaagttatatacagctttaaaaaccctacaaaaaccactcaatgtagtaatagtgcttgctattttttttaagaaatggaatagaatctctattgcttaaattataagcaatagaatatctctattgcttaaattataagcaatatggaaaaatggtttggaatatccttttgttgatgactactatctgtgacatgaaactgataagacattcttttgggtaaacgtttttagatggtaaactgtggttaaatcgaattaattggaagacatagagtaatttcttgaaatgcttttttggctcaagtaaatgatgga

SEQ ID NO: 1249 - DNA, 566 bp, Homo sapiens
ggctgctcttcctcctccctgctgttcctcacccacccggcctcagccactccattcctggatgcccatgtcccagtggcggctggctggtcatccagaggcgaatgcggaacatggtgtctgagctactaacctcccaccttgggtatgcccttgaacttttctgtaagccaggctttccaacccccaacagcactcaggtcacattcccagagagcctgcacaagagggctgagtctgtttatttttcaagatttcaaaaaacatgccttttccccctctgaccttaagcaaaacttttttttccctccaacacttgtatttttaacttcatgagaaaatatggtaaaagggagcagattttattttcagaaactgtgatttttcaagatttttttttatttaaaaaagaaaggctttgggggatggggagaataaagatttttgttttgttttgttttgggtgctaagggggcccagagccacttctctgtggcccctgctcaaactcctccagagattctggcatgttgaggctgcagctcttttggttattgtgatcaagg

SEQ ID NO: 1250 - DNA, 566 bp, Homo sapiens; identical to SEQ ID NO: 1249

SEQ ID NO: 1251 - DNA, 372 bp, Homo sapiens
cttggccatagtcacacagccacctggatagagatgagtggtgagtggtgaacccggagaaacatggcttcttgcctccttggtctttgtgcacgggcctcccgcttcccgagtctctcctggcccagcagtggtttgctgaaggctgttttattttaggcaccggctgagctacctctgatcttgttgggttagcctaggtgtggttctttggtttttcagtttgtataaccatgttctttgttcagctcctatcagggttagggaggtcaaacacctatgtgtcaggatacgcctgacacacactatttaaaactcacactgttttaaatgtatagtatttaaaactttatggtcagctgtacttaccgg

SEQ ID NO: 1252 - DNA, 372 bp, Homo sapiens; identical to SEQ ID NO: 1251

SEQ ID NO: 1253 - DNA, 1382 bp, Homo sapiens
ttttatttttatttttttttaagacagagtttcgctcctgttgcccaggctggagtgcaatggtgcgatctcggctcactgcaacctctgcctcctgggttcaagcgattctcctgcctcagcctcccaagtagctgggattacaggcatgcgccaccacgcctggctaattttgtattttaagtagagacggggtttctccatgttggtcaggctggtctcgaactcccaacctcaggtgatccgcccgcctcggcctcccaagtgctgggattacaggcgtgagccaccacgcccagacaagaataaaattttaaagaaggggtagaaacacagtgcaatatcgtacttctctaatttatcacatctaaaatggggagactcattgagtttatatgatgaatttgccagatttgcagtgtatgtggccagcactgttttaaaagaattcatcttctatatagttaaatttttgttaaccataatacttccttctgttagaccacaaaattagccacagagtagcattaccttatagctattttcttgttctcaataaaagaaatgtgctgtttaataaaagttttttttaattatatggaatgataggattaaaccttacctagtagaaatattgtcatagatgaggcggtatgagtgggaaacactttgtaaataagtaagtgctggacaatcgtttcttattttacattgtgtaaagtctaggattaaaccatatgacagcagttttcaaactttttcttttcaggaatgctttatactcttagaaattattaaaggccccaaaatactttggtttatttaggttatatttgtcaacacttaaccatcatagaaattgaaatagacattttaaaatatctattttaaaataatgataagcctattacatgaatgtagatagtacatttaaaaaataaatagctatattttccaaatccccccaaaaggtaagaaaagtggcatggctttacatttcattttgcaaatctttactatctagtttgcaaatctttactgtctggcttaatagagctcagccggattcttgtatctgcttctacatttgatctgttatgatttggtgttttggttgagtatatgaaggaaatagacatatttgtagttagaaaatatatactttgatagcctttttagatagtggtaaattttcttctttgctgttatgtctaaatccaacaacttgtagtttctttaggtcagtgatagtgtagaatatgaaaccatatcaactgactttttgtactctgtgttttattgcagtccactggtgtcccttttttctgttgcctaggctggaatggcacaatcatggctcactgtaccctcgagctcctgag

SEQ ID NO: 1254 - DNA, 2692 bp, Homo sapiens
gttggccagttctacttcttaatccggaagagaatccacctgagacctgaggacgccttattcttctttgtcaacaacaccatccctcccaccagtgctaccatgggccaactgtatgaggtaatggttctggttgcacaatactggatgccgtccagtgcagtctggcatcctctagcccttgttctagatgcgttgataacacatctgagaagtggggcagaaggtgttatttatccggatcctcttacatatggcagtgtaaggctctgagagattagataccacttgttttttagggattagccactctactagatttaatccttctgaaatcttgtctgactatagtcttgtctgactatagtgttttaatgctggactgtttattgaaacagcaggaagtgattcctgatagcaaaagttccaaagcgtcagccatcgcagttcctgctattctggttggtagcatgtaatttgtaatgcattcagaatccagttcattattttactcccatttagcaacagattgagaaagcacgtaatagtaaagccagctccttctaactctgaggccagcctctgccaactgaaggattctccccacagtcagcttcttctatgaactctgaagttttggcttaagacaaccacattgatactaaacaaggggaaacttttcttagaacaaaactaaaactgtgaaacagattccacattatctgggcacaatgaatcagataaaatgaaatataaaattaaggcaaagtctgtaaatggattcatgtcttaacagataaactcaggaggaataatttttatgtgatgtggtttaattggaagtgtcagaatctgaggaaactatagtgaaggactttattattactgaaaatataacctgggattataactattgttttttgcagtattttgcataagatgcttccttctcattgtgctccgttaatgaattacgtaaacttctaataatcctgaatcttttattcatagcatatattccctggtagtatatgttctattataaaagcatctgtggtatctaagttccccttgctaggagtgagctctttaagagtgaggactgtgccctagtcatcttcatatccctgatacctatgtgtaatatgttttcaatgaaggatttttgtttgtgaactcagagctcaaagtgtaattccaaccacttctccctatcctttgctcctcttttaaatggggactaatgataccttccatacctgctttacaaggttgtgtgaggctcagcatcttagagctaatgaatgaatatgttttctaaactgttgtcttatctcttcccctaggacaatcatgaggaagactattttctgtatgtggcctacagtgatgagagtgtctatgggaaatgagtggttggaagcccagcagatgggagcacctggacttgggggtaggggaggggtgtgtgtgcgcgacatggggaaagagggtggctcccaccgcaaggagacagaaggtgaagacatctagaaacattacaccacacacaccgtcatcacattttcacatgctcaattgatattttttgctgcttcctcggcccagggagaaagcatgtcaggacagagctgttggattggctttgatagaggaatggggatgatgtaagtttacagtattcctggggtttaattgttgtgcagtttcatagatgggtcaggaggtggacaagttggggccagagatgatggcagtccagcagcaactccctgtgctcccttctctttgggcagagattctatttttgacatttgcacaagacaggtagggaaaggggacttgtggtagtggaccatacctggggaccaaaagagacccactgtaattgatgcattgtggcccctgatcttccctgtctcacacttcttttctcccatcccggttgcaatctcactcagacatcacagtaccaccccaggggtggcagtagacaacaacccagaaatttagacagggatctcttacctttggaaaataggggttaggcatgaaggtggttgtgattaagaagatggttttgttattaaatagcattaaactggaattgacaagagtgttgagcatccctgtctaacctgctctttctctttggtgccccttatctcaccccttccttggaatttaataagtctcaggcatttccaattgtagactaaaaccactcttagcatctcctctagtattttccatgtatcaggacagaggtgtcttatgtagggagggggcaagtatgaagtaaggtaattatatactactctcattcaggattcttgctcccatgctgctgtcccttcaggctcacatgcacaggaatgctacatgatggccagctgcttccctccttggttatcatccactgcagctgctagttagaaaggtttggagggatgacttttagtaaatcatggggattttattgatttattttcacttttgggattttgtggggtgggagtggggagcaggaattgcactcagacatgacatttcaattcatctctgctaatgaaaagggttctttctcttgggggaaatgtgtgtgtcagttctgtcagctgcaagttcttgtataatgaagtcaatgccatcaggccaaggaaataaaataattgcttaccttaaaaatcca

SEQ ID NO: 1255 - DNA, 2694 bp, Homo sapiens
gttggccagttctacttcttaatccggaagagaatccacctgagacctgaggacgccttattcttctttgtcaacaacaccatccctcccaccagtgctaccatgggccaactgtatgaggtaatggttctggttgcacaatactggatgccgtccagtgcagtctggcatcctctagcccttgttctagatgcgttgataacacatctgagaagtggggcagaaggtgttatttatccggatcctcttacatatggcagtgtaaggctctgagagattagatacctcttgttttttagggattagccactctactagatttaatccttctgaaatcttgtctgactatagtcttgtctgactatagtgttttaatgctggactgtttattgaaacagcaggaagtgattcctgatagcaaaagttccaaagcgtcagcccatcgcagttcctgctattctggttggtagcatgtaatttgtaatgcattcagaatccagttcattattttactcccatttagcaacagattgagaaagcacgtaatagtaaagccagctccttctaactctgaggccagcctctgccaactgaaggattctccccacagtcagcttcttctatgaactctgaagttttggcttaagacaaccacattgatactaaacaaggggaaacttttcttagaacaaaactaaaactgtgaaacagattccacattatctgggcacaatgaatcagataaaatgaaatataaaattaaggcaaagtctgtaaatggattcatgtcttaacagataaactcaggaggaataatttttatgtgatgtggtttaattggaagtgtcagaatctgaggaaactatagtgaaggactttattattactgaaaatataacctgggattataactattgttttttgcagtattttgcataagatgcttccttctcattgtgctccgttaatgaattacgtaaacttctaataatcctgaatctttttttgcatagcatatattccctgttagtatatgtcccattatatatccatctgtggtatctatgttccccttgctaggagtgagctctttaagagtgaggactgtgccctagtcatcttcatatccctgatacctatgtgtaatatgttttcaatgaaggatttttgtttgtgaactcagagctcaaagtgtaattccaaccacttctccctatcctttgctcctcttttaaatggggactaatgataccttccatacctgctttacaaggttgtgtgaggctcagcatcttagagctaatgaatgaatatgttttctaaactgttgtcttatctcttcccctaggacaatcatgaggaagactattttctgtatgtggcctacagtgatgagagtgtctatgggaaatgagtggttggaagcccagcagatgggagcacctggacttgggggtaggggaggggtgtgtgtgcgcgacatggggaaagagggtggctcccaccgcaaggagacagaaggtgaagacatctagaaacattacaccacacacaccgtcatcacattttcacatgctcaattgatattttttgctgcttcctcggcccagggagaaagcatgtcaggacagagctgttggattggctttgatagaggaatggggatgatgtaagtttacagtattcctggggtttaattgttgtgcagtttcatagatgggtcaggaggtggacaagttggggccagagatgatggcagtccagcagcaactccctgtgctcccttctctttgggcagagattctatttttgacatttgcacaagacaggtagggaaaggggacttgtggtagtggaccatacctggggaccaaaagagacccactgtaattgatgcattgtggcccctgatcttccctgtctcacacttcttttctcccatcccggttgcaatctcactcagacatcacagtaccaccccaggggtggcagtagacaacaacccagaaatttagacagggatctcttacctttggaaaataggggttaggcatgaaggtggttgtgattaagaagatggttttgttattaaatagcattaaactggaattgacaagagtgttgagcatccctgtctaacctgctctttctctttggtgccccttatctcaccccttccttggaatttaataagtctcaggcatttccaattgtagactaaaaccactcttagcatctcctctagtattttccatgtatcaggacagaggtgtcttatgtagggagggggcaagtatgaagtaaggtaattatatactactctcattcaggattcttgctcccatgctgctgtcccttcaggctcacatgcacaggaatgctacatgatggccagctgcttccctccttggttatcatccactgcagctgctagttagaaaggtttggagggatgacttttagtaaatcatggggattttattgatttattttcacttttgggattttgtggggtgggagtggggagcaggaattgcactcagacatgacatttcaattcatctctgctaatgaaaagggttctttctcttgggggaaatgtgtgtgtcagttctgtcagctgcaagttcttgtataatgaagtcaatgccatcaggccaaggaaataaaataattgcttaccttaaaaatcca

SEQ ID NO: 1256 - DNA, 776 bp, Homo sapiens
agtgtgtccggaattggtgggtttttggtctcactgacttcaagaatgaagccgcggaccctcgcggtgagtgttacagctcttaaggtggcgtgtctggagtctgtcccttctgatgttcagatgtgttcggagtttcttccttctggtgggttcgtggtctcgctggctcaggagtgaagctgtagaccttcgcggtgagtgttaacagcttttaaggtagcgcgtctggagttgttcgtttctcccggtgggctcgtggtctcgctggcttcaggagtgaagctgcagaccttcccagtgagtgttacagctcataaaagcagcgtggacccaaagagtgagcagtagcaagatttattgcagagcaaaagaacaaagcttccaccttttggaaggggacccaagcaggttgccaatgctggctggggctgcctgcttttattctcttatctggccccaaccacatcctgctgattggtagagccgagtggcctgttttgtcagggcgctgattggtgcatttacaatccctgagctagatacaaaggttctccacgtacccatcagattagttagatacagagtttccacacacaggttctccaaggccccaccagaggagctagatacagagtgtccattggtgcattcacaaaccttgagctaaacacagggtgctgattggtgtgtttacaaaccttgagctagatacagagtgccgattggtgtatttacaatccctgagctagacataaaggttctccaaggcccca

SEQ ID NO: 1257 - DNA, 900 bp, Homo sapiens
agtgtgtccggaattggtgggtttttggtctcactgacttcaagaatgaagccgcggaccctcgcggtgagtgttacagctcttaaggtggcgtgtctggagtctgtcccttctgatgttcagatgtgttcggagtttcttccttctggtgggttcgtggtctcgctggctcaggagtgaagctgtagaccttcgcggtgagtgttaacagcttttaaggtagcgcgtctggagttgttcgtttctcccggtgggctcgtggtctcgctggcttcaggagtgaagctgcagaccttcccagtgagtgttacagctcataaaagcagcgtggacccaaagagtgagcagtagcaagatttattgcagagcaaaagaacaaagcttccaccttttggaaggggacccaagcaggttgccaatgctggctggggctgcctgcttttattctcttatctggccccaaccacatcctgctgattggtagagccgagtggcctgttttgtcagggcgctgattggtgcatttacaatccctgagctagatacaaaggttctccacgtacccatcagattagttagatacagagtttccacacacaggttctccaaggccccaccagaggagctagatacagagtgtccattggtgcattcacaaaccttgagctaaacacagggtgctgattggtgtgtttacaaaccttgagctagatacagagtgccgattggtgtatttacaatccctgagctagacataaaggttctccaaggccccaccagagcagctagatacagagtgtcgattggtgcattcacaaaccttgagctaaacacagggtgctgattggtgtatttacaatccctgagctagacataaagactctccacgtcctcaccgga

SEQ ID NO: 1258 - DNA, 678 bp, Homo sapiens
cagaatgccaattacatgttttttactcctgaggagtaactttggttactttatattcattagaaaaaatacagtggaaaatttaactttagcaatgaaaatgcttaacatggtcaaatttttgttcactgatcttttttattgaatgggtaaagccaatgtttacactgcatatgataaatgttttgctttctttgatcaaatttacattcaaagagctattataagaaacattctataaaaattccaatatgttgttaaagtagattttgattgttatttatatcacatgtaggtctgttgcttaatctttgtcacgtaaattataaacatattttctgggtattgcttgtcttaaacagtcttgaaaatgtatctggctgaataattgcctgtcacaatatttaaatgcaagactaagtattcctctgcctgcgcaccccacccccatttaatgggataatagaacataaatgtcatttgtgcatttagttgattaaatgtcactcgtttatgattgtacaactggtctatacaatgtaatggtctctgtagtaaagtaacaatacatttttagtggcattatcagtgttggtaaaataaactcaccgttatattaactaaactgtgcaaacagatttacttgtcatgtatatgttcagataactgcataaaaat

SEQ ID NO: 1259 - DNA, 356 bp, Homo sapiens
  SITE (20): n equals a,t,g, or c
  SITE (78): n equals a,t,g, or c
tcaagttcagagggattttnttcctttcatatcatagtaggagaattaataaaaatgtttcatttttaagcatttttnaattattcaggcaccagaaataagtgttctgcatatattgtttcatttaattcttaagttccaggaggtaggtgaagacatctctatgttgtagttaataaactaagggtctgtaattttaagagatttccccccacctcacataagtcttaggtgttggagttaaaatttgaacctgagtttgtttgattctaaaacttgtgctccatgaagaagttactggctttatctattctctctctctctcttgttcttggtcactgactatcagtatttaa

SEQ ID NO: 1260 - DNA, 358 bp, Homo sapiens
tcttcaagttcagagggatttttatcttttcatatcatagtaggagaattaataaaaatgtttcatttttaagcattttttaattattcaggcaacagaataagtgttctgcatatattgtttcatttaattctttagttccaggaggtaggtgaagacatctctatgttgtagttaataaactaagggtctgtaattttaagagatttacccagaaatcacataagtcttaggtgttggagttaaaatttgaacctgagtttgtttgattctaaaacttgtgctccatgaagaagttactggctttatctattctctctctctctcttgttcttggtcactgactatcagtatttaa

SEQ ID NO: 1261 - DNA, 1790 bp, Homo sapiens
acagaagcagtgaagattctccctggtaacaacttaagtaaatcaagccaacaaatacgagtccaaataaacatttaatgagaaaatactgcctactttttaattttattgttaatatccttttgtattctgtaataattactgcatgtggagtgatttatccttcacctttggtgatctggtaacttagcagaatgcttgtctgcagaacaggtatgtgctaaatgctgaaaagcaaaggacattcatctcactaaaaatgtctcccaacaagcaggctgctggggggtttgtagcgcttgtagggtggctgagttatttctttctgcaaacactcctgtcagcattatagagacttgcactatctgttaagtaaatgtgacttaggagaaggaacgacaccacccattcatggggtcatggctgcaagttactgccctactggttttctctttacctgataactctcaataattctaaagtttatcttagagaaaagtctttgagtcacctattttggaatttgagcccagtgaaatgataagcacctgcagtttgtatcacgtctctctctaaccaaatctctgagcattcttgtagcttgatagcaaattgggtgaactgctccattcactaaaagattgagttcagctttattgcaaacagaattatgaaggtctgttctcatgcatttactcagcctccttcatctgagtcacacaccactggaagtagcccctccttatattaagcaatattgacttgaaatggatcatttcctttttttaggtttactaaagaataccagagaaagaactgtatcttaatctatcttcctttccaatgaagtaaaaaacaaattatttgacctccaaatcctcagttaatgtaaattttgcatttgttgaaaacttggtatttcgcaggaaggacatcaggttttgtactgaacataacattgaacacgaagaacctttataagtcagtgttcactgggctgaaacttttactcctatctgaatatgttggcttttgagagctcttgggggattgatgttgttgtttttcaacttctatctcctacttaagtgatattaacagttgtgcttatgtaacatctgtgttgtgtgtgtatgtttttaatctctacttaggttgacctgacagttcaagaaaaggagaaatatcttaatgtgtctcgctggttttgtcacattcagcattatccaggcatcaggcaacatctgtctagtgttgtcttcatcaagaacagactatatactaattcccactagaagctgtccatgccatacagaagatctattaaaaatgttttaaatggaaaatgtactctagaccacaggactaatgtaaattaatatacagtcattcattatttgttgaagttgatagaatttttgaagtgtaaacttgtgtctgaatgttttatttgttctttagctgaagttttgcaatttttatgtcaaaattcaattgctattaaacaagttgagatccagttataaattaaccttgtttttagtagatgacatttatttcaataaaagttgcaaatcgggcttaatcttaaaattggtggtcatttcaatggttgacatatttggctatttattaacctctctttcatattctaaaattcattttccccttatggatatttatggtagtttgttaagaactgataaattgtgccaaggaagccaaaagggaagacagatggatttgttttaaaatatttatgtgagctagtaaatgtggttgaaaaaata

SEQ ID NO: 1262 - DNA, 373 bp, Homo sapiens
aaaatatttttgaaatatagactgatgctcagtttattccacagattaagtgctgcctatgaaaacacacctgacaggtagatgctcctttcagtttgaatctaccagttagcctaatgtaattctttcatgtgaaaccatgaattttcataataaaaattaaacttttacgttaaaaaagacatacttgaccagttttcttgactgatgtgttatttatctctgtgccatggactgactatgttataggtgagacagttgtagtaacatctttctaagtagacacaaccttaaacaagatgaatatgtttttataatgtgctagagcagcttgtgtgtaggacttaagtatgtatcactaaaacctgaaact

SEQ ID NO: 1263 - DNA, 544 bp, Homo sapiens
caaagcagtcaatcatattttcttactttctaaaaataaaaagataatgctaaattaggattaaagtagacaacatgaagaaaaaagcctagtatgtagctcttggcaatcagtaaggttagtttcctttctcttctccaggcaaatcatgattgttttgtttataagaaaatgaggattgtaacaggcccccatgtttgtctctgaagtgactgagtcaggagacttcacaggccaggtgtgtgggcacaggcatgcctcattttactgcatcttcatcttcaacacatggaaggtttgtggcaaccctgcttcgagcgagactattggcaccatttttccgtcggcttgtgcttgcttcatgtctctgtgtcacattttggtaattctcacattattttgaatttttttcattactctctctgttaactgatctgtgtcccgtgatctttgttactattgttattatttttggggtgccacaagccatgcccatataagacttcagacttaataaatgttgtgtgtgttctgactgctccac

SEQ ID NO: 1264 - DNA, 291 bp, Homo sapiens
tgaaaatggactaatgcacctgtactatccttttggggtttatttctccttctttcctcatttccattggatgactaaagtttcttctgctggcttaaaaattacttcttttgttgttcctcttgtgcagttctgctgaacataataaccaagtgtgtatttatttaaatctattgatttgttgaacgtatcactacctgtatcttccctctaacaaaacactttcacatattctcatatccctttgtttttatagaccactcctctccttcatcatttttgtattttgcc

SEQ ID NO: 1265 - DNA, 291 bp, Homo sapiens; identical to SEQ ID NO: 1264

SEQ ID NO: 1266 - DNA, 291 bp, Homo sapiens; identical to SEQ ID NO: 1264

SEQ ID NO: 1267 - DNA, 312 bp, Homo sapiens
tcattttcttttttttttttttttttgagacggagtctcgctctgtcgcccaacctggagtgcagtggcgcgatctccgctcactgcaagctccgcccccttggttcatgccattctcctgctccagcctccagagtagctgggactacaggtgcccgccaccacgctcagctaatttttttgtatttttaatagagacggggtttcactatgttcgccaggatggtctcgatctcctgacctcgtgatccgcccacctcggcctcccaaagtgctgggattacaggcgtgagccaccgcgcccggcctatt

SEQ ID NO: 1268 - DNA, 308 bp, Homo sapiens
ttttctttttttttttttttttgagacggagtctcgctctgtcgcccaacctggagtgcagtggcgcgatctccgctcactgcaagctccgcccccttggttcatgccattctcctgctccagcctccagagtagctgggactacaggtgcccgccaccacgctcagctaatttttttgtatttttaatagagacggggtttcactatgttcgccaggatggtctcgatctcctgacctcgtgatccgcccacctcggcctcccaaagtgctgggattacaggcgtgagccaccgcgcccggcctatt

SEQ ID NO: 1269 - DNA, 324 bp, Homo sapiens
ggcaaaacagattgagaaatcatctagtggctggaattattacacagtaatttaaaactaactataatttgtttaacggcatagtagatgagataaatgggatgcatgaacagataaggactttcagagagattacaactttacgaaggagtcaaatggaaatgctagaaatgaaaaataccatatcagaaataagtaatttcatcaattagcctacaagcagactggatacagcaaaagaaaaccaatcagtgatcttgaagacaggtaaacaggaattatggcaatggtaacgcaaagaaaaaacgatggtaagcagtaaag

SEQ ID NO: 1270 - DNA, 324 bp, Homo sapiens; identical to SEQ ID NO: 1269

SEQ ID NO: 1271 - DNA, 294 bp, Homo sapiens
attttttgaaccttgaaaacaaattagaattcaatttcctccatgtcacttttgcaagaatattcaagtgttttttgagtcatgataatattgatcaattatgaacactttagaatgggagaaaattaacaattatgtgtctttctcagtgagacccatcatctgatattctcacgattttgacaatgatggactgttgtcaaactctcattcattaaccctactcctactttctgggacacacagtagtagactgaggttcttcaaatatttgaagtccgtatctccatttcc

SEQ ID NO: 1272 - DNA, 294 bp, Homo sapiens; identical to SEQ ID NO: 1271

SEQ ID NO: 1273 - DNA, 294 bp, Homo sapiens; identical to SEQ ID NO: 1271

SEQ ID NO: 1274 - DNA, 446 bp, Homo sapiens
cgaatacaagagagaaagaagaggggtagagagagagacagagagagaaaattagctttcctctcgtggataatattttaaagggagaggaagaattttcatagctttgttccagcatagacagcctgaggccacattcaggtattcattgaagtatggcgttattactaggcccctgatgagtggaaattattactggaacacatggaattcttaataaatattctaggtgggccgaaggggatttcacagtatatgtgaattcacaggcaaagaaactatttcagttctactttccaggaagatttcaagggcccaaagctaaaatgtatggatttatttaacaagatggggaatggtcctggatgctgcacccagcctttctccatgttcggtgatttcctagaatcaatactatttggaataaaaaaaaatgaaaaagaaaa

SEQ ID NO: 1275 - DNA, 607 bp, Homo sapiens
ttgccagagctgactgacctgggatggccaagccagaggaagacccacatcctggaagccctgtctctagtgcccaactccagttctcaagttgcaagggcccagcagacatgggggcactgcaggggtgaagctggcagttccttctcccagaaattctgagagagcctgggaaagtgccccaggagatggctgggctcacagctctacaagttacaggtctggcaatggccaccctctattcccagtcttccaacaaatcctgaaacttaagagagtggactcttacaataattatatttcacatgttaaaaaatatgactccgaaggaataagccagcgctgctcatttagctagtttcacttaactagttgggaggaagtttagacaatgaaggtactgtactctcatcgttagatttctctggcaggcttgcagaactgctatggcacaccagacctccagccaagtgaaagaacctaactgaaagagtgccaaatgaccaggttttcttcatgttaagtatgcctgcctcccttcgtatccacttttttccctttacagtttcatttcttacactggtttgctcacatccaggttagatgc

SEQ ID NO: 1276 - DNA, 387 bp, Homo sapiens
cccaggttcaagcgattctcctgcctcagcctcccaagtagctgggactataggcatacaccaccaaacccagctaatttttgtattgtttgtagagacagggttttgccatgttgcccagtctggtctcaaactcctgggctcaagtgatctgcccacctcagcctgccaaagtactgggattacaggcatgagccaccttgctcaacctgtttccttctttataccaagtgctaacattttgaatgaatattaggaattgatgctggttagtgctaaaatatctttaaactatcagtgtaaacataattaggccgtgagtttttgctcttactcccaggtttctaaatgtctaagaaacaataaaatgagagtcatgtacagaaa

SEQ ID NO: 1277 - DNA, 520 bp, Homo sapiens
ttcctcatctcaaccacaagaggccttcctcttttactaatccccctcagcacagaccctttgcgggtgtcgggctgggggatggtcaggtctttcccttcccgggaggccatatctcaggctgtctcagtggggggaaaccttggacaatacccaggctttcttgggcagaggtccctgcggctttccacagtgcattttgcccctggttaattgagaatggagaatggcgatgacttttaccaagcatactgcctgtaaacatactgttaatgaggcacgtcctgcacagtcctagatcccttaaaccttgattccatacagcacatgtttctgtaagcacagggttggggctaaagttacagattaacagcatctcaaggcaaagcaattttcttagaacagatcaaaatggaatttctcatgtcttcctttctacatagacacagtaacagtctgatctctcttttccctacagagactaatgttctggaaaatatattctgcttcctagtgcagg

SEQ ID NO: 1278 - DNA, 2867 bp, Homo sapiens
gacaggtgggcccttcagacccctaccgagctccaaggaaacatcacgcaaatccaggtacagcctccaagggtgttcggtgcactcattttctgctgcatgaaagtggagaccatggccgggcgcggtggctcacgcctgtaatcccagcactttgggaggccaaggcgggtggatcatgaggtcaggagatcgagaccatcctggctaacacggtgaaaccctgtctctactaaaaaatacaaaaaattagccgggcgtggtggcgggcgcctgtagcctcagctactcaggaggctgcggcaggagaatgtcgtgaacccaggagctggagcttgcagtgagccgagattgtgccactgcactccagcctgggagacagagtgagactccgtctcaaaaaaaaaaaaaaaaaaaaaagaaagtggaggccataaatgactctgaacctatttttatcagttattcaacttaagactatgtgaaaataacaataataagacattttaaaagaccttttggatttcagaattgcagataagagattgtggacctgtattagttataatatgtatctacccacgaacccatccctccctctccatctctctctatctgtatgaaaaagagctttactgagatataactcatgatatatacaaagtggtttttggtatattcacaattttacaaacatcactgcagtgaattctagaacagtttcagcgccacaaaaaatctgtaccttttagtggtcgctcttattttcccctctccagcccttggcagccactaatctacctcctctctctaaggatttgcccattctggatgtttcatggaaatggaatcacacaacacctggtcttttgtgcccggctgctcccactgagctgaggtttcaaggcccctccagattgtagcctgtgtcaatgctttgctccttttcatggctgaatcacattctctgctgtgaacagaccacgttttctttctccattcatcagttgatggacatttgaataatgctgttacgaacacttgtgtacacgtttttgtgtgaggatgttttaatttctctgcagcatttggttctttcttatgatttctctctgttcctgttctctacctgatgagacactgtcgttgtagcttccttcacttcaccaggctggtttccttcagctccttcaccacgtttccagtggctgctttgaagtctttgctaagtccaacatctgagccctttcagagcagtttctgatgtctgggttttttcctatatggaatttatactttcctattttgcataggtctttatttatttttagatagatttagaagtttaatataaaattatgaaaccaacatttcacatcagcagaagaaagctggataatttaatccattatgtaaacttcctgtctgtttataaaaaacataaacatccctatgtcacactcagaaaagtgtgtcccactcagaaaaactctagaaaacgctcttcccatcagaacagacataccagtgctgcctgtccaatcacaacccttgagcatcagtatcttgaagtctttctacacagcatactctttacctttataagacttttcttataatgtcttataagatcattttttaagtccggaacaatggtacttggaaatggtttctgagttctcgtgtgtgtaagtattctcctgaccgcatctttctcctgctctgttcacacatctggttctttctcttgcaacctggaaatgaagtggggttccaggaagaacctgctggcagtgaacagcgtcatctccgtggccatcctcagcgagcgggccatgtcgtcacacttccaccagcaagtggccgccatgcaggtctccccgagtctgctgaatgtgtgcttcctgtccacgggggtcgcacacagcctgcgcaccgacatgcacatcagtggagtgtttgccaccaaggtgactgccgaggggacccgtgggtgggacacagacagaagaactgccccatggccaggtagttcagggcagcaagggccccagatggcaggttaggccactctcagttccatcctagattctcttatttcctggatatccatgtacattatattcataaagaaaatcgtaataagaatataggccaggcacggtggctgacgcctgtaatcccagcgctttgggaggctgaggtgggcagatcacttgaggtcaggagttcgagaccagcctggccaagatgctaaaactccaaaatacaaaaattagccaggcgtcggggtgtatgcctgtaatcccagctacctgggaggctgaggcaggagaatcgcttgaacccaggaggtggaggttgctgtgagctgagatcgtgccactgcactccagcctggacgacagagtgagaccatgtctcaaaaaaaagaacataataataaaaaatatatacacctgccatgtacccttataaattaaaaaaaatgtcagttaaacaataaatttaaaaagtaaataaaggaaagagagggatactttctttgccattccccaaacctaaaaaaaaaagaaaaaaaaaaacagaaaagaatcataataaaacccatggatatcttatataacacggaaaacagcctcagcctgtccacagaggacccagtgatctcatagtcgtaggatgatggagcagcagtgttcagaagtgtttagaggaggctttcgaggtgtgcagtggggtgtacagttgcacctcacttttcccgccctttgcctcgaatgtccgtggttcttttcaggatgctgtcgcagtctggaacggaaggcaggtggcgatcttcgagctttctggagccgcgatacgga

SEQ ID NO: 1279 - DNA, 337 bp, Homo sapiens
tagactccctaggagcaagggtgaacttcttatttcccccagtagaaccaacacagcaggtgctgggatattttttgttttgtgtatattatcatctccctaactagattctttctgagacagtcttgctgtgtcacccaggctggagtgcagtggtgtgatggcggctcactgcagcctccatctcctgggctcaagcgattctcatgcctcagcctcccaagtaggtgggattacaggcatgcaccacaacacctggccaatttttgtatttttagtagagacaacattccacgatgttggccaggctggtttcaaactcctgacctcatgtgat

SEQ ID NO: 1280 - DNA, 17335 bp, Homo sapiens
agaggaaaggagcagtggcttccggttgaagccaccaacgctgatccacggccaagcccccagcgcaggtaggtcgtctacctccctggggcggggggtggctctctgacgtttttcagacctctgctaggccacaccagggcaccgcgggctcagcctgctttctagaaagatcacttgtaacttgacccacgagccctggaaagttcctttaaagagaggctgtctgagcagggaggttgggacccctgactgtgagcgtcgtgtgttcagaaaagtgggcagtggtggcacgggagcaggctaggcggggtgcatcgggcgggctccatgcccagcagtagcgcacttggttcagcctgtctgtccttcatgttctggcccccacataccacagtgttcgccccagttagcagggtggctgcattccagcggcgcgctgctagtgagccggctgctagtgaggctgccggggatgctgcacagggcagggcacatgcaagggtccttgtcccatctgcctttggcagagggacttcctcagcatggctgttttgaaaaacaggtgcaaaatgtgcctgtacgtgaccccacaccgagtcctgagcctccaggtagctgcctgtgaatgcactgctctcctctcacagtctccacttgactgttgagtctgccggcgccccgccacgttactgtgctaactggattaattcacaggcgtcggtcactgggagtttcatgtaatcacatgtaaaaataacagtagccagatctcctggccagctgttaaaaaaagacctcaagtttttaaaaaagtgcttccctgcaaagtctagcctgcaaggggcatgaaatgggatgccaggggtcagtctctgaagcgcctgggggcaggcaggggtccacgggcactgggaaggccgccttctgttcctaggtctgccaagccagaagcccaaggagcagcagcggagcgtgcttcgcccggcagtgttacaagctccgcagccaaaggcgctgtcccagactggtaagaaacagcagccctggcgcccaggcccagacggcagggtagagcgttcccgaagtcgcacccgggacagcagtgttgcgacagaggtgactgctgaatgcaccagaaatacagagagatcagggaagatgatcctttaaatcaccccccagccgtctccagccccaagcctcctgagccctggcaacggagaagggagaggcggctccacagcttcctcacagctctcggctgagtgtgactgtgtgggtgaaacctgctttgttcattcactgtcttcataaaagcaggccggctcctgggaatgagatttatccctgtgtgtttgcagatagaatttcagcctcaattttcacaggttatctttaaaaacttgaaaggtcattttatttatttatttatttatttattttggagatggggtcttgctctgtcacccagactggagtgcactggtgcaatcatagctcactgcagcctcgaactcctgggctcaagcgatcctcccacctcagcctcccaagtagctgggaccacaagtgtgcaccaccacacccagccagtttgttttatcttattttagaaacgaggacttgctgtgttgcccaggctggtctcaaactcctggccccaagcattctccccgcttcagcctcccaaagcactgggaccacagacatgagccactgtgcccggcaggtttctcttttttgtttgtttctcttgtttttttttaaatccaagaattttggctctttgtagagataccaggtccttccttaaaaaggagacatgtgctgtgggctttaccatgggaggggccctagactagacgtggcccagcccctcagctatgtgagtgggggtgggagggccgccaagcacctgtgattccccactctccttccctcccacagtccccagcagtggcaccaacggggtcagcctcccagcagactgcacgggggcagtgcccgcagcatcccctgacactgctgcatggagaagtccttccgaagctgccgatgaggtgtgtgcacttgaggtcagtgggtcctgaggcagggaagcgctgcatgctaggccccttgggagcgggagggcagccttcccagcatgctgtggagtccacacgctgtcacctgttccaagcagtttccacgtgggcctattgtaaggctctctggatttgctcagtaggctctaaataacagtacctgacaaaccagatctagattcccaagggtggtcttgctggtcaggcagaagaagagtgtctcccaagcaagctctgccggaaggacctgttgcccagagttctgccggaagggcctgttacccaaggctgaccgccacatgtctcacgggagtgatccttgagggaggacctgaaccactgcactctgaggagtcactagggcccgaggaacggctgtcactgatgggtgtcttgcaatgtttaacatgaggaatgtctcccctctctgtgtccacacccaaaccacccctcagagactcctatctgtgtggttccagttgaaaatttttctttgggagtcatctcagaaatagtttgtttaggccggacacggtagctcacacctgcaatctcagcactttgggaggccgcggcaggtggattgcttgaggccaggagttcaaaaccaccctgggcaacatagcaagactctgtctctacaaaaaatacacagattagccaggcatggtagcatgtacctgtagtcccagctactcaggatgctgaggctggaggattgcttgagcccgggaaggggaggctgctgtgagccgaggtcacaccactgcattccagcctggacgacagagccagaccctgccttaaaaaaagaaatagttccatttaagcgggggtatggtttggattatatgggccaaaagctttgtgtttcacagccactgtgaaataagggcctttgatgaagagcctcctttgaagttggcagagatgggtttgaagtcagaattagggtaacaccatgtggtatcttctgtgtaaaagccagattggatctttgtgtttattttccgctctgtgtccatggcctgcagttttataccctccatccccagtagatgttctggctcaaagggtgaaaatggctgtcacaattaaatttgaaaacatcctcacgccctttttcaaacgagtttgctgaattggaaatagggatcatttccaccgcattctgcgctcttggaagctttgactgctgaggtctcctgagcagatcaggtgtgcagttctgagttggagaaggacttagaagtgacccagcccgtcccgccatctcccagtgtctctgattgtccccgatggtgagtgcacaggctgacctggtagcacccgctaccgagagcttgttcctcactggagaggccttgctgtgtcccatcccaggggacggagtcgtcttcctgccggttccagccccttctcagcagtgcacacagcttgttcccaaatggttgagctcagaagttgtgatgtgctggctgccattcccagctcctgcgtctggctccaaagccactgctccatgtgggtctggggtggagccatgcggccacacccacgctgccctctgaccacacccagtactgttgagattcgccaggctcgctgtgtgtatccttctctggccctacagcaggagtccgagcttttccaagccgcccatgaacatggcacacactgctcatcgggaacgtgagctatgaggcatctcctctaaggagggcttagatgttgggggcgacccatgggggaactcctggtaccgtctttgggaaagtggggaagaggcttcccctcccgccccacacacacacagagtctcagactggttacaggcctcgggattcgtttatcagtttaagcgaatcctctaagcaggctccgccaggtcatagacataccctgtagtcagaaacattttgctgtttgcctgccccatctcaggtgactctgtgggctccacccacccgggattagcaccagtcggtgtgagcagggggcacacagcgcagaaagccaagagccagggagtgtttctgctggacgggatgcaggcgcgccagtggggctggggattagcccatcctctgaggacttccaggtcgccaaacacgttgtgtgtttaattttaaaaagccacgttcactcttgcacaggcacaaggatgcagcgtgaagtcagcagtagcagaatttctagggagcacagtagagaaacatttacacttttcacttccttcacagttggaccagaaagtgccctcagcgctgtgatccgctgattctgggcctggcattgtaactccaggcttccctgcccgctggacacgctgagccagtcagaagctgcctgcagcctttctcacctccgagttcacggttgtcaggtcccttcacgacatctcccaggaaaacactccctgcctcacgttcatgtccactgtacacatcgccagagactccaaagatctgccaaaagccttttaaaatttcttttcaaattctacaacacctttttcatcatgtggtataggaaagacatatacaaattactagcaactccatattccattatctcaagataaatgcatttggtcttaggatatttagttacaaaagtcatgcctacatgttgaaaatatttacacaaaatggaaatcctagaaagtaacaagcaggagccaccctccagctaagaggttcccgggtaacctccgtcagtagttagaattctctctcccgacttattttcctgggcattcctcaacacacatacacaccacacatacacacacacacacaccacacacacgggactggattggctttaacagaaatggaatcgcacttccgtgtcccacaagctgctctcttctctgatccatgtattgtgggcatgtcagaggcctacctccctctcggtggtaatagctgtgctgtactttttttcccccatattttctattgtaaattatttcattccttggccaatgatgagcaaccaggttatttcctgtcctctgccggcactaaggcttctgcagggcacaggtgtttcttgttgtttggagacaggtttttgctctgtcacccaggctggagtgcagtggtgtgatctcagctcactacaactcccaggctcaagcagtcctcctgtctcagccttctgagtagctgggagtgcaggcacatgcagaggagacgtgtggagtacgtgatctggtgtgggattgctgggcatccgtctgggccaagtgtggcactggttttgattactctgttttgttttggtttttgataggagaaagagccccagaaaaatgagtccagcaatgcctctgaagaggaagcctgtgagaaaaaagaccccgccacacagcaagcctttgtatttgggcagaacttgagggacagagttaaggtatgtgagctgttgaaccagcacattgactttttatgccttccccaggttcaacagcaggcaagtaggtagattttccttttaacaggggaggggagcgtgggacaaagaaggtgttagcgaggcagccccatggctcacggcacagtctgctgctggtgtgcgtgtgctgggccctggcacttccccaccagcagcccaggcttcggagccctcacctgcagtgacttctcaagtcagggtccctggttctcatggtagcggggacagggaaggtgactgaacctgaggcctcaggctttcatagcagagaagaaagacagcacggtccagtgttctcagctctgcccagaggtttctgttcccgtatttcagggtttctctgtttcagcactagcagcattacggctggaccattcttagtttctgaggagtcgccctgggcactgcagggtgctgagcagcatcactggcctccacccacccaatgctcctgacatctgacaaccacaaatgtccccagacgtggccagtattccctgtggagtagaatcgcccccattaagaactgtcaccttatttttttttaagtggggcagggtggggtgacaacactgtcttctctcctgaaagggagcaaagcgtctgccacctcttggctgccctccagacatgtggtcctagtttggagattgtgtggtggggaagggatggcagtggttggaaacagtggccctggaccatgcactgggactctaggaagaccagggtcagccagcaccacctttcccagccacagacatggaatgtgctacggcatctctagcagctccactggcaagaagcttctttcaaagctcgagaggcggtatcggtggctgtatctagagacttttgtggttgtcacaactgggaggtacttctggaggtcagggatgccactccgccccttgcagtgcccaggatagccacaccacagggaatgttctgggcccagtgtcaacatgtcagtagtgtcgacggggagggccctgaaataaacaaaaacctctctagcatgcagaaagcaccggcttgtgttttctgctttcctttctgttactcaccgtccaacagaagcccaagtcgagaaacgtggaaagttgatgttgctgttgccatggctttaggcaaaataatgagtccctcaggggctgttccctccaaggagggagggcaagaggcggggaagggcttggcctgtggagttcaggccctgtggaatctctgccttgagtctggggagacagctgctttgaatttggtggggttggcttcttgcagaagtcagaggcttacgtgcacttcgcagtctcagtcaaatcccagcctctccttccagggcaaacttgagccatggattctttttttttctttggacacgaagtcttgctgtgtcgcccaggctggagtgcagtggcatgatctctgctcactgcaacctccacctcctgggttcaagcgattctcctgcctcagcctcccaaatatctgggattacaggcgcccactgccacatccagctaattttttgtatttttagtagaggtggggatttctccatgttggccaggctggtctcgaattcctgacctcaagtgattccccgccgcctcagcctcccaaagtgctggtattacaggcacgagccaccgcgcccagccagagccatggtttcttaaccctctgagcctctgcttccttgttggtcaaacagggtccctaacatccccctcccaggcctcgtgaggattaaagcagatcgtgcatttgacagactcagcatagcagctggtaggaaagaggccctcaagaaattctgcttctatcatgttcatagtaaaccccccaaaacgtcagctttgtaacgttgtgttattggtatgaagcattgaccgagaggccagcttaggcgtggttttataacaaggcgtggttttgtaacaaggtggaaaaggctccttggagcttcatgagctctctttccatcctaactgttaaagcaaaaggtgatggagttgattatagccctgccccccagcacatgcacgcgcacacacacaggcgggtacaggagagggttcatggctccgagcagctccatgcagctcagggggtctgcagacactgagctgtggaactccaggcacccccccacccccgattactgagcgctccgtctcattcccagctgataaatgagagcgtggacgaagccgacatggagaatgctggacaccccagcgcagacacgccaaccgcaacgaactatttcctccagtatatcagttccaggtgtgtgtctcggtgtcagcggccagcctggcatggcgatgcaggtggccgcgagggcttctgccagagaggggtctgtggtccccgtgcccgactcaggcccagaatccaggttgctctcaggcccctctctctcattccccactctgggcacaaccttgggtgggccagggtggtgggccttgtcctgggattcactggacgcctgagacaggaccagagttctgtggggttgtccaggggcccatggaggctacagcccagcccttggagtgtgccctctgtcttgtggacctcatgcccagagcagaacagagcaggccagaggcgactcaggcgcccccttattctgggtttgggcacctggggcaaagacctcatcatgtccttgactgacatggctgggggtaatgctacccacggaccagctgcccctccaggtgtctcagaagaaagcgtgtcccgactgggagatgggcgggtagagcaggtggaaggtggcttccctcatgctgtggggcccctccatcagggcgagctaagggttaatgttttcaatggcacagggaggtgtgtggcttcctgcctctgacacgccaccccgtgcacagtggcggaggccctccactgtgccctctgtgtcagtgtgtgctccatgggtacccatacatttgcctggccacgttcccacgtgacgccccacactcattgcacatcttctcttcagtttagagaactcaaccaatagtgccgacgcctccagcaacaaatttgtatttggccagaacatgagcgagcgagttttggtgagtggctgtgttgggaatgttctcagggaccagaggctctcggcgccagccacaggtcaaggggacatggagagcagggctgctgtgtcgtcctatgtgagatggggatgccttcagtagcaagtgagagagggaagaccctgctcagactcagcctgaaaactggccagggccactggctgcctacgaactggcattcgcttttcccggctcctccgtgctgaccagggccaacttcatcccaagatgggcttccctggaggctgcagggtcctgctggcagtcggggtccatggttcctccccaccaggccaactgacaaaagtcctgtgggacggagccagccgtgctggtggacagggttgctggcctccctgctcctgtgagcataaccgcggccaaggccttgggtgcacgaaaggcccatctccgttcccaggagcccagccagcctgggagagggttctagaatggtttgcctacctctttacacatgttcctttttcttcctgattccacccagctccattgcgactgcgtgagggcctgtcctgagccgcctggtcactctagctctgtctggagttaggctgcattaagtactctgcagcttctcttccttcgtggccacgctgtgctttttctatttcaatgaaatgttcaaagtcttgcctcacccagacggagtgaccagtgtggctcgaggggactgtcggctggtggcactcaccccgtagtgatgcctgagggaccacgtggggagctcccaggcagttcagggtgtcaccgggagtgggcaggagtgctgggggcagcgtagtgttgggggccaggcagagaggtgctcagagctgctgctgaaggaccacacaagtgccctcttccttgtatgcttttgtgtccctgcagagccccccaaaattaaacgaggtcagttcagatgccaacagggaaaatgcagctgccgagtcagggtctgagtcctcgtcccaggaggccacccctgagaaaggtatgttagcgtcccaccacagcatggggctcatggtaggtcatcttgggggatgctgggtccattcacacccccagccgggagggataaggggcccgactcccgcagcagtaacaaccacatgtgaaccagctccagggccctgccttgcagtgagcaagggtttgtgataaagaactcgagggcctgtgtcgccttgtggccgtggggagggtggggaggcgcaggcagcaggcgtggaggagtccctcactgtccccccgtcgactgctcggcacgaacacgagagtctggggccacacttggcccccagatggtctccctgcagcttctgaggccatatgctctggctgtgtctagggtccacttgggttgccggggcaggcctgccaggggcagcaggcgtccttgagaccagaaccaaccctctcatctctgtcggatgaggggagatggctctcctctcgccaaataatcagtcagtctttttggccaataacttttcagagtccctggctgagtcggcagccgcctacaccaaggcaacagcgcggaagtgtttgttggaaaaagtggaagtcatcaccggggaggaggcggagagcaatgtgttacaggtgaggggccggcccctcctcggtggccctgggtcttccatgcacctgggggtccaaccgcaagggctgggcccacatcctctgagcacacaggcctgcccctgagatgacggaggccactggccccacgctctgggactttgttggtggcgtttgtagagagagcttaggctcaggggcttcttgcatgtctttggtttcagaggaggaggatctgtttgagacattctttgttttgttttaattttttttgagacaatgtcttactctgtcacccaggctggagtacagtggcacagtctcggctcactgcaacctctgcttcctgggttcaagggattcttgtgcctcagtcgcctgagtagctgggattacaggtgtgcaccaccacgccaggctaatttttgtatttttagtagagacggggtttccccatgttggccaggctggtctcaaactcctgacctcatgtgatccacccgcctcggcctcccaaagtgctgggatgacaggcgtgagccaccacgcccagcccgagacatttttgatggttcagggaatgacaaagactgtcataccaaacatattctcttgtcgcccagagctggcaactgtattatttgtcacctggcatcctgtggtgtcttcgtagggaaaagatcaggtgcggccagaggttccaccccaccgtcccctcctggcatcccccattcctgctcctcaggccgcaccacccggcttgggcagcatccatgtgcttcctctcccgtggcacataagcaggtgtctgtgtctgtaaaccgggtggcgtatcgtggcgttcttaagagcactgttcttttttcccacttaccactttgtcatctgttcatgttgaaagagattgacttagggggtatgtggaaagccatgtaggggtgtctgtctcgtatttttctttgtttatatatacaaaactgctgtattgaaatatagtacaaatgctatataatccatccttttaaagcatacaattccgtggtttctagtatattcacagagtcagacaactttcaccagaatctaacgtacaacatttctgcccccaaaaagaacactgtcccattcccccagaaagagcattgtccattcgcagtaactcctcctccctccccagcccctggcagccacagatccacttcctgtctctgttttttgcctgtccttgacatttcatataaatggcatcaacgcactatgtggcctttcgtgtctggcttctctcgctgagccagaggttcatccacgttgcagcgggggtcggagccttgttctttattaagactgagtgagatgcgctgtaggggcggaccatgtgtgtcactccattcctccttgagacttggctaccgtgaatgatggtgctgtgcacgttcatgtgcgatctgtgtgtgaacacgaacaaatgttccatttctcttgggtacataccgaggaatggaattgcttgggcatgtggtaattccttgttaagcagtttgaggagccgccagactcttccacagcagtggcaccatgcggccttcccgccagcagtgtgtgagggttccagcttccccacatgggtatagccgtcctagagtgcgcagagaggcttctcaccgttgttttgcttttcatttccttagtgattcttttaatttcagataccccttatacaatgtaaagcctgttctagcttgagggcaggacaaaaaactgaccaaggtggcccccaggccgtcgttggctggccctggcagtccccacaggctaaagggcgactctcagggtgtggctgcagcaggacaccagctggggtccctgcttactggcggccactgtgttccagatgcagtgcaagctgtttgtctttgacaagacctcacagtcctgggtggagagaggccgggggctgctcagactcaatgacatggcgtccaccgatgacggcacactacagtcccgactaggtgagctgccgacggcgggggctgtggccgggtccccatggggagggctggggactatgcaattccaaagggaatgaagcgggggagatcctgaccctacccttgtgagagtcaaggcacagagtcggtctcccatgagagccgccccccaaaccccctccctgcacccagccctcaacaccaccctcacacactggctccagctgccagctcgtccgtgaccctcttagtgtcaaaatggacaaaagtctatggaagtttttaagctgattttctgacaaagtggcaggtttatgatagaaaggaaaatgaaatcaaacatcaagtctaatctcttgataaagacaaattttggccaggcgcagtggctcacgcctgtaaccccagcactttgggaggccaaggtgggcggatcacctgaggtcaggagttcaagaccagcctggccaacatggcaaaaccctgtctctactaaaaatacaaaaattagccgggcatggtgatacatgtctgtaatcccagctactcgggaggctgaggcaggagaattgcgtgaacttgggagacggagattgcagtgagccgagattgagccactgcactccagcctgggcgacagaccaagactccatctcaaaaaaaaataaaatatactgtttttgaaaagctttcatgttaatattccattgacagtcaatggacttttccctattggtggacatttagcttggagtacctgcatacacacacccacttaaggaaatcagcctgtgtgtgtgcacatttgaaatgtgggcgtgtcttttttttccttctaaagctgatttcactccatcacccaggctggaatacagtgtgatcatcgcctcaaattcctgggctcaagtgatcctcccacctcagcctcctgagtagctgggactacagatgcaccaccacgtctggctaatgtttttatttttgtctttataaagacaggtctccctgtgttgcccaggctggtcttgagctcctggcatcaaacagtcctcccacctcagcctcccaaagcgctggaattacaggcgtgggccactgcgctgggaccatctttttgttttatcttcccaaatcaaagtgtcttctggccttttcataaatatgggtttcaggcccagcagtaactcaagcagcccccttgaagggtagtgttcatgcacttcaatcagaaacactgctctggtcagaacagacaggggatgtccctgcaggctgggactgctcttttgttccccatggacgtctttttttttttttttttgagacggagttttgcccttgttgcccagtctggagtgcagtggcttcgtttcggcccaccgcagcctccacctcccaggttcacgcgattctcctgcctcggcctcccgagcagctgggcttataggcacccgccaccaagcctggctaatttttttatactttaagtagagacagggtttctccacattggtcaggcttgtctcgaactcctgacctcaggtgatctgcccacctaggcctcccaaagtcctggaattacaggcttgagccactgtgcccagccttatggacgtcttcttgtgtttttccttttgtctcgtggaaatgttcaaatgtccatggaaagagagggcatagagccctgagcccccaggtcatcccctctgcctgggtcatcagcctgtagccccgtggcagcagtaccctccccagcttcagggagagcaaaatcacctctgtctttctcccactcggcctctgaggtgggcacctgggctcagggaggtctgttcgctgggccagggcagggggacaagtttctgaccgtctccaggcctgctccagtggggagaggcggctggcaggaaggtaggggcttggctgagtccacggggtgggcccaggccaggcgcaggggtgttgcatcctctagaagagtcagggccctcccattttcctccgtaatctgctgcccacagtcctctcgtctcctctccatggaagcgctaagctgcggtcctactctgccttctcctaaggaaaccagagggcagggctggcccactcaggggaggccagtcaggaggacgtggactcccatggaggccgatgtctcacacacacagaaagcgcatgcaccttgagtgtcagcccctgcctcccgcagcccaccccgtactcctctctaatccccccttctccaagggaactgccatcctggtgcccacctgtgtggaccaaacacaacctcccacaagctgcatgtggcctctggtcactgatctgcagcaccagcctgtgcagccacctgcagttgtggccttcagtggtccaggcttggggaggaggagcccgccccgggagcaggtgtgccagggctggcctcagggagaagtcttgctctgtgggtgggtcctgggaggatcatgggcttttgcgcggtgatgtcgctttccatctggactgtgttggctcttggagctggctgtttgtgagggggccggtgtgggggccagggctgagtggccttgttggttgtagtgatgcggacccaggggagcctgcgactgatcctcaacaccaagctgtgggcccagatgcagatcgacaaggccagcgagaagagcattcgcatcacagccatggacaccgaggaccagggcgtgaaggtcttcctgatctcggtgagccagccacgcgggtgcatctgggacccctcatcctgccagccctgtgggggttcctgggcacacagatcaggcaggacggtggggaggggaggggggaggggcttcagttgcttcctgggacacaagaagcactatgggacccgccagtcccagccttcaggaatagagatcatggtccttgtcctcttctcaacccagagaagccgctggggtttggctgaggggttgtgatgtgttcagggctaacagccctgtggggcggtcacctctctcctatgtcatggtgtcacagttgagtccaccaaccctgacctctgggatattcccagccacctgggagtggtggcatcctttcggggagaggccggcaggcccagggccaatggcctccccacaaggccttgtggcagtgtcacctctgaaccttgggacttggcacttgtgttctgcagaaggcaggagggggtaggactggggtccgggggtctcataccctcctcccttcccaggccagctccaaggacacaggtcagttgtatgcagccctgcaccaccgcatcctggccctgcgcagccgcgtggagcaggagcaggaggccaagatgcccgcgcctgagcctggggcagccccatccaacgaggaggacgacagcgacgatgacgatgtcctggctccttcaggggccaccgcagctggtgagtcgggtggtccctaccctgggggggatagaaagagctgcccgccatccttgatccagtgctgatctcctggcgggggtggccagacctgggaagtgcgggctccatcctgatgcggggctgctgcttccctgcaggtgctggtgacgaaggggacgggcagacgaccgggagcacatagcggccgggagcccggctgcacaccaggctgctgctttgtccgtctatccacccgcccacccgcccccaccccaccggcagcgtccaggtgcggggccgggaaccacacaccccactgggccggccacagtctggacccgcacgtcctgttcaaaagcagactcgggaactgcctgaatgtggtttgggacacgagacctcatcatattgatgagcgaacaaacaagaacatttcctccctcccctcctttgaattgaaatggcacattaagacttgtcacggcttctcactgggactggagacctcgttccttcaccccgcgtgtcgccagcctctgggtccagccagagcccctggcttctccgccacccacacccttcccaccctgctgtggggccctgcctttgtggggagcagccagccctctgcccctgcccagggctccccaactataggcctgggacccccgcccagcttggggggctgctcgtacgagtgtagacactgggcccattggacgtgctgttaactactatcttcatttcccacttcccctctctgattgggggtgtatattttacatctttttttctttttattttcgaaggctttgttttggtttcttaggttaagatgctctcgagcgttgagcaggcacagctctgtcgaggtccctgtcccccacctgtggttctggcctctgaggttgggggactacttgtttcccaccccaggttcctccaggccaagtcatggggtgatgaggagttggggccctgtctgtcctaggcctggagagtgcctgtctgggaaaaggtcactggacctggaaggaaacccagggtcccctgactcccgtctccatctgtcacgtggttcaccatcatcaggcaccaggcgcaaactgcttcccgctgttggccatcccttccccagccacaggtgtccctgcccccaggacagtccagggccaggggcttctgtgagaggcagagggggaccctcaccaaatcttggtggaagagcccaggggctggtcccagaacaggcagtctcacaagcacgcagcacactggagtggacgcctgtgcccacccgagcctggagcatggccaagagccagcttgcaccacccacctgggaggccgaggaggaggtcccctgggcacagggcctctttgggacttcagaggaaatctcccagtcccactctcggagggttaagagaaggcctcctgcagctgtgccgtccacacctctaggtcgccagagccctggcccccagcccccagcaagcctgagcccgggaagaaccagaggccctcccgagagacccagtcacacgtctctgctttaagccttagccagctagtgacgagtacaacgagataacgcccatgtgttttggaacatttatgtaagattgtcatatgaaatgtatttgggaactacattaaacttttaactaaaa

SEQ ID NO: 1281 - DNA, 19882 bp, Homo sapiens
agaggaaaggagcagtggcttccggttgaagccaccaacgctgatccacggccaagcccccagcgcaggtaggtcgtctacctccctggggcggggggtggctctctgacgtttttcagacctctgctaggccacaccagggcaccgcgggctcagcctgctttctagaaagatcacttgtaacttgacccacgagccctggaaagttcctttaaagagaggctgtctgagcagggaggttgggacccctgactgtgagcgtcgtgtgttcagaaaagtgggcagtggtggcacgggagcaggctaggcggggtgcatcgggcgggctccatgcccagcagtagcgcacttggttcagcctgtctgtccttcatgttctggcccccacataccacagtgttcgccccagttagcagggtggctgcattccagcggcgcgctgctagtgagccggctgctagtgaggctgccggggatgctgcacagggcagggcacatgcaagggtccttgtcccatctgcctttggcagagggacttcctcagcatggctgttttgaaaaacaggtgcaaaatgtgcctgtacgtgaccccacaccgagtcctgagcctccaggtagctgcctgtgaatgcactgctctcctcccacagtctccacttgactgttgagtctgccggcgccccgccacgttactgtgctaactggattaattcacaggcgtcggtcactgggagtttcatgtaatcacatgtaaaaataacagtagccagatctcctggccagctgttaaaaaaagacctcaagtttttaaaaaagtgcttccctgcaaagtctagcctgcaaggggcatgaaatgggatgccaggggtcagtctctgaagcgcctgggggcaggcaggggtccacgggcactgggaaggccgccttctgttcctaggtctgccaagccagaagcccaaggagcagcagcggagcgtgcttcgcccggcagtgttacaagctccgcagccaaaggcgctgtcccagactggtaagaaacagcagccctggcgcccaggcccagacggcagggtagagcgttcccgaagtcgcacccgggacagcagtgttgcgacagaggtgactgctgaatgcaccagaaatacagagagatcagggaagatgatcctttaaatcaccccccagccgtctccagccccaagcctcctgagccctggcaacggagaagggagaggcggctccacagcttcctcacagctctcggctgagtgtgactgtgtgggtgaaacctgctttgttcattcactgtcttcataaaagcaggccggctcctgggaatgagatttatccctgtgtgtttgcagatagaatttcagcctcaattttcacaggttatctttaaaaacttgaaaggtcattttatttatttatttatttatttattttggagatggggtcttgctctgtcacccagactggagtgcactggtgcaatcatagctcactgcagcctcgaactcctgggctcaagcgatcctcccacctcagcctcccaagtagctgggaccacaagtgtgcaccaccacacccagccagtttgttttatcttattttagaaacgaggacttgctgtgttgcccaggctggtctcaaactcctggccccaagcattctccccgcttcagcctcccaaagcactgggaccacagacatgagccactgtgcccggcaggtttctcttttttgtttgtttctcttgtttttttttaaatccaagaattttggctctttgtagagataccaggtccttccttaaaaaggagacatgtgctgtgggctttaccatgggaggggccctagactagacgtggcccagcccctcagctatgtgagtgggggtgggagggccgccaagcacctgtgattccccactctccttccctcccacagtccccagcagtggcaccaacggggtcagcctcccagcagactgcacgggggcagtgcccgcagcatcccctgacactgctgcatggagaagtccttccgaagctgccgatgaggtgtgtgcacttgaggtcagtgggtcctgaggcagggaagcgctgcatgctaggccccttgggagcgggagggcagccttcccagcatgctgtggagtccacacgctgtcacctgttccaagcagtttccacgtgggcctattgtaaggctctctggatttgctcagtaggctctaaataacagtacctgacaaaccagatctagattcccaagggtggtcttgctggtcaggcagaagaagagtgtctcccaagcaagctctgccggaaggacctgttgcccagagttctgccggaagggcctgttacccaaggctgaccgccacatgtctcacgggagtgatccttgagggaggacctgaaccactgcactctgaggagtcactagggcccgaggaacggctgtcactgatgggtgtcttgcaatgtttaacatgaggaatgtctcccctctctgtgtccacacccaaaccacccctcagagactcctatctgtgtggttccagttgaaaatttttctttgggagtcatctcagaaatagtttgtttaggccggacacggtagctcacacctgcaatctcagcactttgggaggccgcggcaggtggattgcttgaggccaggagttcaaaaccaccctgggcaacatagcaagactctgtctctacaaaaaatacacagattagccaggcatggtagcatgtacctgtagtcccagctactcaggatgctgaggctggaggattgcttgagcccgggaaggggaggctgctgtgagccgaggtcacaccactgcattccagcctggacgacagagccagaccctgccttaaaaaaagaaatagttccatttaagcgggggtatggtttggattatatgggccaaaagctttgtgtttcacagccactgtgaaataagggcctttgatgaagagcctcctttgaagttggcagagatgggtttgaagtcagaattagggtaacaccatgtggtatcttctgtgtaaaagccagattggatctttgtgtttattttccgctctgtgtccatggcctgcagttttataccctccatccccagtagatgttctggctcaaagggtgaaaatggctgtccacaattaaatttgaaaacatcctcacgccctttttcaaacgagtttgctgaattggaaatagggatcatttccaccgcattctgcggcttggaagctttgactgctgaggtctcctgagcagatcaggtgtgcagttctgagttggagaaggacttagaagtgacccagcccgtcccgccatctcccagtgtctctgattgtccccgatggtgagtgcacaggctgacctggtagcacccgctaccgagagcttgttcctcactggagaggccttgctgtgtcccatcccaggggacggagtccgtcttcctgccggttccagccccttctcagcagtgcacacagcttgttcccaaatggttgagctcagaagttgtgatgtgctggctgccattcccagctcctgcgtctggctccaaagccactgctccatgtgggtctggggtggagccatgcggccacacccacgctgccctctgaccacacccagtactgttgagattcgccaggctcgctgtgtgtatccttctctggccctacagcaggagtccgagcttttccaagccgcccatgaacatggcacacactgctcatcgggaacgtgagctatgaggcatctcctctaaggagggcttagatgttgggggcgacccatgggggaactcctggtaccgtctttgggaaagtggggaagaggcttcccctcccgccccacacacacacagagtctcagactggttacaggcctcgggattcgtttatcagtttaagcgaatcctctaagcaggctccgccaggtcatagacataccctgtagtcagaaacattttgctgtttgcctgccccatctcaggtgactctgtgggctccacccacccgggattagcaccagtcggtgtgagcagggggcacacagcgcagaaagccaagagccagggagtgtttctgctggacgggatgcaggcggccccagtggggctggggattagcccatcctctgaggacttccaggtcgccaaacacgttgtgtgtttaattttaaaaagccacgttcactcttgcacaggcacaaggatgcagcgtgaagtcagcagtagcagaatttctagggagcacagtagagaaacatttacacttttcacttccttcacagttggaccagaaagtgccctcagcgctgtgatccgctgattctgggcctggcattgtaactccaggcttccctgcccgctggacacgctgagccagtcagaagctgcctgcagcctttctcacctccgagttcacggttgtcaggtcccttcacgacatctcccaggaaaacactccctgcctcacgttcatgtccactgtacacatcgccagagactccaaagatctgccaaaagccttttaaaatttcttttcaaattctacaacacctttttcatcatgtggtataggaaagacatatacaaattactagcaactccatattccattatctcaagataaatgcatttggtcttaggatatttagttacaaaaaagtcatgcctacatgttgaaaatatttacacaaaatggaaatcctagaaagtaacaagcaggagccaccctccagctaagaggttcccgggtaacctccgtcagtagtttgaattctctctcccgacttattttcctgggcattcctcaacacacatacacaccacacatacacacacacacacaccacacacacgggactggattggctttaacagaaatggaatcgcacttccgtgtcccacaagctgctctcttctctgatccatgtattgtgggcatgtcagaggcctacctccctctcggtggtaatagctgtgctgtactttttttcccccatattttctattgtaaattatttcattccttggccaatgatgagcaaccaggttatttcctgtcctctgccggcactaaggcttctgcagggcacaggtgtttcttgttgtttggagacaggtttttgctctgtcacccaggctggagtgcagtggtgtgatctcagctcactacaactcccaggctcaagcagtcctcctgtctcagccttctgagtagctgggagtgcaggcacatgcagaggagacgtgtggagtacatgatctggtgtgggattgctgggcatccgtctgggccaagtgtggcactggttttgattactctgttttgttttggtttttgataggagaaagagccccagaaaaatgagtccagcaatgcctctgaagaggaagcctgtgagaaaaaagaccccgccacacagcaagcctttgtatttgggcagaacttgagggacagagttaaggtatgtgagctgttgaaccagcacattgactttttatgccttccccaggttcaacagcaggcaagtaggtagattttccttttaacaggggaggggagcgtgggacaaagaaggtgttagcgaggcagccccatggctcacggcacagtctgctgctggtgtgcgtgtgctgggccctggcacttccccaccagcagcccaggcttcggagccctcacctgcagtgacttctcaagtcagggtccctggttctcatggtagcggggacagggaaggtgactgaacctgaggcctcaggctttcatagcagagaagaaagacagcacggtccagtgttctcagctctgcccagaggtttctgttcccgtatttcagggtttctctgtttcagcactagcagcattacggctggaccattcttagtttctgaggagtcgccctgggcactgcagggtgctgagcagcatcactggcctccacccacccaatgctcctgacatctgacaaccacaaatgtccccagacgtggccagtattccctgtggagtagaatcgcccccattaagaactgtcaccttatttttttttaagtggggcagggtggggtgacaacactgtcttctctcctgaaagggagcaaagcgtctgccacctcttggctgccctccagacatgtggtcctagtttggagattgtgtggtggggaagggatggcagtggttggaaacagtggccctggaccatgcactgggactctaggaagaccagggtcagccagcaccacctttcccagccacagacatggaatgtgctacggcatctctagcagctccactggcaagaagcttctttcaaagctcgagaggcggtatcggtggctgtgtctagagacttttgtggttgtcacaactgggaggtacttctggaggtcagggatgccactccgccccttgcagtgcccaggatagccacaccacagggaatgttctgggcccagtgtcaacatgtcagtagtgtcgacggggagggccctgaaataaacaaaaacctctctagcatgcagaaagcaccggcttgtgttttctgctttcctttctgttactcaccgtccaacagaagcccaagtcgagaaacgtggaaagttgatgttgctgttgccatggctttaggcaaaataatgagtccctcaggggctgttccctccaaggagggagggcaagaggcggggaagggcttggcctgtggagttcaggccctgtggaatctctgccttgagtctggggagacagctgctttgaatttggtggggttggcttcttgcagaagtcagaggcttacgtgcacttcgcagtctcagtcaaatcccagcctctccttccagggcaaacttgagccatggattctttttttttctttggacacgaagtcttgctgtgtcgcccaggctggagtgcagtggcatgatctctgctcactgcaacctccacctcctgggttcaagcgattctcctgcctcagcctcccaaatatctgggattacaggcgcccactgccacatccagctaattttttgtatttttagtagaggtggggatttctccatgttggccaggctggtctcgaattcctgacctcaagtgattccccgccgcctcagcctcccaaagtgctggtattacaggcacgagccaccgcgcccagccagagccatggtttcttaaccctctgagcctctgcttccttgttggtcaaacagggtccctaacatccccctcccaggcctcgtgaggattaaagcagatcgtgcatttgacagactcagcatagcagctggtaggaaagaggccctcaagaaattctgcttctatcatgttcatagtaaaccccccaaaacgtcagctttgtaacgttgtgttattggtatgaagcattgaccgagaggccagcttaggcgtggttttataacaaggcgtggttttgtaacaaggtggaaaaggctccttggagcttcatgagctctctttccatcctaactgttaaagcaaaaggtgatggagttgattatagccctgccccccagcacatgcacgcgcacacacacaggcgggtacaggagagggttcatggctccgagcagctccatgcagctcagggggtctgcagacactgagctgtggaactccaggcacccccccacccccgattactgagcgctccgtctcattcccagctgataaatgagagcgtggacgaagccgacatggagaatgctggacaccccagcgcagacacgccaaccgcaacgaactatttcctccagtatatcagttccaggtgtgtgtctcggtgtcagcggccagcctggcatggcgatgcaggtggccgcgagggcttctgccagagaggggtctgtggtccccgtgcccgactcaggcccagaatccaggttgctctcaggcccctctctctcattccccactctgggcacaaccttgggtgggccagggtggtgggccttgtcctgggattcactggacgcctgagacaggaccagagttctgtggggttgtccaggggcccatggaggctacagcccagcccttggagtgtgccctctgtcttgtggacctcatgcccagagcagaacagagcaggccagaggcgactcaggcgcccccttattctgggtttgggcacctggggcaaagacctcatcatgtccttgactgacatggctgggggtaatgctacccacggaccagctgcccctccaggtgtctcagaagaaagcgtgtcccgactgggagatgggcgggtagagcaggtggaaggtggcttccctcatgctgtggggcccctccatcagggcgagctaagggttaatgttttcaatggcacagggaggtgtgtggcttcctgcctctgacacgccaccccgtgcacagtggcggaggcccctccactgtgccctctgtgtcagtgtgtgctccatgggtacccatacatttgcctggccacgttcccacgtgacgccccacactcattgcacatcttctcttcagtttagagaactcaaccaatagtgccgacgcctccagcaacaaatttgtatttggccagaacatgagcgagcgagttttggtgagtggctgtgttgggaatgttctcagggaccagaggctctcggcgccagccacaggtcaaggggacatggagagcagggctgctgtgtcgtcctatgtgagatggggatgccttcagtagcaagtgagagagggaagaccctgctcagactcagcctgaaaactggccagggccactggctgcctacgaactggcattcgcttttcccggctcctccgtgctgaccagggccaacttcatcccaagatgggcttccctggaggctgcagggtcctgctggcagtcggggtccatggttcctccccaccaggccaactgacaaaagtcctgtgggacggagccagccgtgctggtggacagggttgctggcctccctgctcctgtgagcataaccgcggccaaggccttgggtgcacgaaaggcccatctccgttcccaggagcccagccagcctgggagagggttctagaatggtttgcctacctctttacacatgttcctttttcttcctgattccacccagctccattgcgactgcgtgagggcctgtcctgagccgcctggtcactctagctctgtctggagttaggctgcattaagtactctgcagcttctcttccttcgtggccacgctgtgctttttctatttcaatgaaatgttcaaagtcttgcctcacccagacggagtgaccagtgtggctcgaggggactgtcggctggtggcactcaccccgtagtgatgcctgagggaccacgtggggagctcccaggcagttcagggtgtcaccgggagtgggcaggagtgctgggggcagcgtagtgttgggggccaggcagagaggtgctcagagctgctgctgaaggaccacacaagtgccctcttccttgtatgcttttgtgtccctgcagagccccccaaaattaaacgaggtcagttcagatgccaacagggaaaatgcagctgccgagtcagggtctgagtcctcgtcccaggaggccacccctgagaaaggtatgttagcgtcccaccacagcatggggctcatggtaggtcatcttgggggatgctgggtccattcacacccccagccgggagggataaggggcccgactcccgcagcagtaacaaccacatgtgaaccagctccagggccctgccttgcagtgagcaagggtttgtgataaagaactcgagggcctgtgtcgccttgtggccgtggggagggtggggaggcgcaggcagcaggcgtggaggagtccctcactgtccccccgtcgactgctcggcacgaacacgagagtctggggccacacttggcccccagatggtctccctgcagcttctgaggccatatgctctggctgtgtctagggtccacttgggttgccggggcaggcctgccaggggcagcaggcgtccttgagaccagaaccaaccctctcatctcctgtcggatgaggggagatggctctcctctcgccaaataatcagtcagtctttttggccaataacttttcagagtccctggctgagtcggcagccgcctacaccaaggcaacagcgcggaagtgtttgttggaaaaagtggaagtcatcaccggggaggaggcggagagcaatgtgttacaggtgaggggccggcccctcctcggtggccctgggtcttccatgcacctgggggtccaaccgcaagggctgggcccacatcctctgagcacacaggcctgcccctgagatgacggaggggccactggccccacgctctgggactttgttggtggcgtttgtagagagagcttaggctcaggggcttcttgcatgtctttggtttcagaggaggaggatctgtttgagacattctttgttttgttttaattttttttgagacaatgtcttactctgtcacccaggctggagtacagtggcacagtctcggctcactgcaacctctgcttcctgggttcaagggattcttgtgcctcagtcgcctgagtagctgggattacaggtgtgcaccaccacgccaggctaatttttgtatttttagtagagacggggtttccccatgttggccaggctggtctcaaactcctgacctcatgtgatccacccgcctcggcctcccaaagtgctgggatgacaggcgtgagccaccacgcccagcccgagacatttttgatggttcagggaatgacaaagactgtcataccaaacatattctcttgtcgcccagagctggcaactgtattatttgtcacctggcatcctgtggtgtcttcgtagggaaaagatcaggtgcggccagaggttccaccccaccgtcccctcctggcatcccccattcctgctcctcaggccgcaccacccggcttgggcagcatccatgtgcttcctctcccgtggcacataagcaggtgtctgtgtctgtaaaccgggtggcgtatcgtggcgttcttaagagcactgttcttttttcccacttaccactttgtcatctgttcatgttgaaagagattgacttagggggtatgtggaaagccatgtaggggtgtctgtctcgtatttttctttgtttatatatacaaaactgctgtattgaaatatagtacaaatgctatataatccatccttttaaagcatacaattccgtggtttctagtatattcacagagtcagacaactttcaccagaatctaacgtacaacatttctgcccccaaaaagaacactgtcccattcccccagaaagagcattgtccattcgcagtaactcctcctccctccccagcccctggcagccacagatccacttcctgtctctgttttttgcctgtccttgacatttcatataaatggcatcaacgcactatgtggcctttcgtgtctggcttctctcgctgagccagaggttcatccacgttgcagcgggggtcggagccttgttctttattaagactgagtgagatgcgctgtaggggcggaccatgtgtgtcactccattcctccttgagacttggctaccgtgaatgatggtgctgtgcacgttcatgtgcgatctgtgtgtgaacacgaacaaatgttccatttctcttgggtacataccgaggaatggaattgcttgggcatgtggtaattccttgttaagcagtttgaggagccgccagactcttccacagcagtggcaccatgcggccttcccgccagcagtgtgtgagggttccagcttccccacatgggtatagccgtcctagagtgcgcagagaggcttctcaccgttgttttgcttttcatttccttagtgattcttttaatttcagataccccttatacaatgtaaagcctgttctagcttgagggcaggacaaaaaactgaccaaggtggcccccaggccgtcgttggctggccctggcagtccccacaggctaaagggcgactctcagggtgtggctgcagcaggacaccagctggggtccctgcttaccggcggccactgtgttccagatgcagtgcaagctgtttgtctttgacaagacctcacagtcctgggtggagagaggccgggggctgctcagactcaatgacatggcgtccaccgatgacggcacactacagtcccgactaggtgagctgccgacggcgggggctgtggccgggtccccatggggagggctggggactatgcaattccaaagggaatgaagcgggggagatcctgaccctacccttgtgagagtcaaggcacagagtcggtctcccatgagagccgccccccaaaccccctccctgcacccagccctcaacaccaccctcacacactggctccagctgccagctcgtccgtgaccctcttagtgtcaaaatggacaaaagtctatggaagtttttaagctgattttctgacaaagtggcaggtttatgatagaaaggaaaatgaaatcaaacatcaagtctaatctcttgataaagacaaattttggccaggcgcagtggctcacgcctgtaaccccagcactttgggaggccaaggtgggcggatcacctgaggtcaggagttcaagaccagcctggccaacatggcaaaaccctgtctctactaaaaatacaaaaattagccgggcatggtgatacatgtctgtaatcccagctactcgggaggctgaggcaggagaattgcgtgaacttgggagacggagattgcagtgagccgagattgagccactgcactccagcctgggcgacagaccaagactccatctcaaaaaaaaataaaatatactgtttttgaaaagctttcatgttaatattccattgacagtcaatggacttttccctattggtggacatttagcttggagtacctgcatacacacacccacttaaggaaatcagcctgtgtgtgtgcacatttgaaatgtgggcgtgtcttttttttccttctaaagctgatttcactccatcacccaggctggaatacagtgtgatcatcgcctcaaattcctgggctcaagtgatcctcccacctcagcctcctgagtagctgggactacagatgcaccaccacgtctggctaatgtttttatttttgtctttataaagacaggtctccctgtgttgcccaggctggtcttgagctcctggcatcaaacagtcctcccacctcagcctcccaaagcgctggaattacaggcgtgggccactgcgctgggaccatctttttgttttatcttcccaaatcaaagtgtcttctggccttttcataaatatgggtttcaggcccagcagtaactcaagcagcccccttgaagggtagtgttcatgcacttcaatcagaaacactgctctggtcagaacagacaggggatgtccctgcaggctgggactgctcttttgttccccatggacgtcttttttttttttttttgagacggagttttgcccttgttgcccagtctggagtgcagtggcttcgtttcggcccaccgcagcctccacctcccaggttcacgcgattctcctgcctcggcctcccgagcagctgggcttataggcacccgccaccaagcctggctaatttttttatactttaagtagagacagggtttctccacattggtcaggcttgtctcgaactcctgacctcaggtgatctgcccacctaggcctcccaaagtcctggaattacaggcttgagccactgtgcccagccttatggacgtcttcttgtgtttttccttttgtctcgtggaaatgttcaaatgtccatggaaagagagggcatagagccctgagcccccaggtcatcccctctgcctgggtcatcagcctgtagccccgtggcagcagtaccctccccagcttcagggagagcaaaatcacctctgtctttctcccactcggcctctgaggtgggcacctgggctcagggaggtctgttcgctgggccagggcagggggacaagtttctgaccgtctccaggcctgctccagtggggagaggcggctggcaggaaggtaggggcttggctgagtccacggggtgggcccaggccaggcgcaggggtgttgcatcctctagaagagtcagggccctcccattttcctccgtaatctgctgcccacagtcctctcgtctcctctccatggaagcgctaagctgcggtcctactctgccttctcctaaggaaaccagagggcagggctggcccactcaggggaggccagtcaggaggacgtggactcccatggaggccgatgtctcacacacacagaaagcgcatgcaccttgagtgtcagcccctgcctcccgcagcccaccccgtactcctctctaatccccccttctccaagggaactgccatcctggtgcccacctgtgtggaccaaacacaacctcccacaagctgcatgtggcctctggtcactgatctgcagcaccagcctgtgcagccacctgcagttgtggccttcagtggtccaggcttggggaggaggagccccgccccgggagcaggtgtgccagggctggcctcagggagaagtcttgctctgtgggtgggtcctgggaggatcatgggcttttgcgcggtgatgtcgctttccatctggactgtgttggctcttggagctggctgtttgtgagggggccggtgtgggggccagggctgagtggccttgttggttgtagtgatgcggacccaggggagcctgcgactgatcctcaacaccaagctgtgggcccagatgcagatcgacaaggccagcgagaagagcattcgcatcacagccatggacaccgaggaccagggcgtgaaggtcttcctgatctcggtgagccagccacgcgggtgcatctgggacccctcatcctgccagccctgtgggggttcctgggcacacagatcaggcaggacggtggggaggggaggggggaggggcttcagttgcttcctgggacacaagaagcactatgggacccgccagtcccagccttcaggaatagagatcatggtccttgtcctcttctcaacccagagaagccgctggggtttggctgaggggttgtgatgtgttcagggctaacagccctgtggggcggtcacctctctcctatgtcatggtgtcacagtcgagtccaccaaccctgacctctgggatattcccagccacctgggagtggtggcatcctttcggggagaggccggcaggcccagggccaatggcctccccacaaggccttgtggcagtgtcacctctgaaccttgggacttggcacttgtgttctgcagaaggcaggagggggtaggactggggtccgggggtctcataccctcctcccttcccaggccagctccaaggacacaggtcagttgtatgcagccctgcaccaccgcatcctggccctgcgcagccgcgtggagcaggagcaggaggccaagatgcccgcgcctgagcctggggcagccccatccaacgaggaggacgacagcgacgatgacgatgtcctggctccttcaggggccaccgcagctggtgagtcgggtggtccctaccctgggggggatagaaagagctgcccgccatccttgatccagtgctgatctcctggcgggggtggccagacctgggaagtgcgggctccatcctgatgcggggctgctgcttccctgcaggtgctggtgacgaaggggacgggcagacgaccgggagcacatagcggccgggagcccggctgcacaccaggctgctgctttgtccgtctatccacccgcccacccgcccccaccccaccggcagcgtccaggtgcggggccgggaaccacacaccccactgggccggccacagtctggacccgcacgtcctgttcaaaagcagactcgggaactgcctgaatgtggtttgggacacgagacctcatcatattgatgagcgaacaaacaagaacatttcctccctcccctcctttgaattgaaatggcacattaagacttgtcacggcttctcactgggactggagacctcgttccttcaccccgcgtgtcgccagcctctgggtccagccagagcccctggcttctccgccacccacacccttcccaccctgctgtggggccctgcctttgtggggagcagccagccctctgcccctgcccagggctccccaactataggcctgggacccccgcccagcttggggggctgctcgtacgagtgtagacactgggcccattggacgtgctgttaactactatcttcatttcccacttcccctctctgattgggggtgtatattttacatctttttttctttttattttcgaaggctttgttttggtttcttaggttaagatgctctcgagcgttgagcaggcacagctctgtcgaggtccctgtcccccacctgtggttctggcctctgaggttgggggactacttgtttcccaccccaggttcctccaggccaagtcatggggtgatgaggagttggggccctgtctgtcctaggcctggagagtgcctgtctgggaaaaggtcactggacctggaagggtccccagggtcccctgactcccgtctccatctgtcacgtggttcaccatcatcaggcaccaggcgcaaactgcttcccgctgttggccatcccttccccagccacaggtgtccctgcccccaggacagtccagggccaggggcttctgtgagaggcagagggggaccctcaccaaatcttggtggaagagcccaggggctggtcccagaacaggcagtctcacaagcacgcagcacactggagtggacgcctgtgcccacccgagcctggagcatggccaagagccagcttgcaccacccacctgggaggccgaggaggaggtcccctgggcacagggcctctttgggacttcagaggaaatctcccagtcccactctcggagggttaagagaaggcctcctgcagctgtgccgtccacacctctaggtcgccagagccctggcccccagcccccagcaagcctgagcccgggaagaaccagaggccctcccgagagacccagtcacacgtctctgctttaagccttagccagctagtgacgagtacaacgagataacgcccatgtgttttggaacatttatgtaagattgtcatatgaaatgtatttgggaactacattaaacttttaactaaaaccctggcctctgcatgccccaggggcctcaggaagcccctgaccaggaacggcctccacctccccgggcgaggacctccagcagcctggggcctcatgctcccacccagcgtgtcaccagtgctggggtccagccacagccctgttctctccaccaccacccgcactttacccccacccctgctgcaaggccccgccggtctgcccccgcccagagctcccagcctcgggccgctcaccagaatgtagatactgggcccgctggacatgttacctgctatttttattccccatttgccatcttctgattgggggttgatgttttacagatttttttttcaaaggctttatttcagtttctgaggttaggatgcccctgtgcccctcgctccacacctgggcaggtctaaacttccttccaggatggcctccacacacagcctcccacctggggtcacctggcttcctgggggacccgcaagggaggggcagggagcagcagtccgggtgcggggatcgggggacctcggcgggggcatccacaggggctgcaagatctctggtcagcatggcgtgggtggggagagcgtttctccctggggtcctgagccagtgactcctgttaggacctttgtcccacctccgcctggtggaccggcagggacctggtctagccagtcctgcagcctccattcccccacctgcccctccccgctctgtggtgtggctgcccaggagagaaggggcccagggaagggaggtctccggcaggggtggggagtgacaggccagggcagcagggctgagccggagctgctcacagctgccaggcactggtcatcatggccacgaactcctcatccgtgttcatggaggcactcacgccgctgtagtagtcctggaattccgccagtgtgacctgggaacagagggccgtgagggggcacggccgaggaactgcctggggagggggccccccgcgcagccacccacctgcccgtccttctcagaggagtcgaagttgtccaggaagcggcgcagcacctcgtcctcggtccactccccactgcgcaccttggggtgggcacggccactgtacaccccgcggaggtcgtccaccgtcacgacgccgtccccactgcggtccagcttggcaaatgcagctgcgatgacagcctcccgggcctgggacatggggggctgggacaggaggtggtgactgggggtggtgggtagcacacccaaacccccaagacgctgtgcagagcactggggctgtatgccccagcaggcgcctcttaacagcagctcttagggaggagtccccgtctccgcatctcagcatcctctgtcgccccatgcccagggcacacgccttgactgtgaggtgggggctcacccgcagcgcccgaaggaactcctccagatccagcgtcccgctgccattgcggtcccacttcctgcacacaccctctgcctccgcctggtccagcaccagcccgagtttggccagaccctgccggaactcatcagcgtccagggatctgctcccgtcccggtctagttggcggaaaaacctggaggcaggggacacggttggaacagtggtctcaggggccggggtcaggaaggtgagaggggacagctcacctggccaggccctggatgcccgaggccccgcgggacaggcactgtgcccggagtttctccatggtggcatccacggcgtccatgcttggtctgggctctgggcagctggaagggagagaggtcaaggtggggactcccgcaagcccaccctggccgactgccccttgttcagatgctcacctggcctgcgtctgtcccagagtcctgcctgcggggccttgtgttagctgtgttgtgcctggggagactgttgctagtggaaggtgcctctggagatggggtggggcccagctgcatgaatgcactgtgctgggcagtggggagtgggggagggatgggtgcgcccagcctgactgcttactcaactgccagccccacagggcctgggacagagccagatccctgtggcactgcatcccttcctggctccaaggaggaggggcaggccactgccctgcaggggctgaaatgccctggatggagacaagtccgtggctggggaggcttgacgcatgattcctgtgtgaccctggacaggtccctttccctctctggcttcacaggggcttctcagcccgagccagggctgacaaaattgctgaggaatcaaagttcaaaagggccccaggttctgaccggccactgcggctcatgcctgaaatcccagcactttgggaggtctaggtgggaggatcacttgagcccaggagtttggaccagcctggggaacatatagagaacttgtttctattgtacagcaacaaaaatgccccaggtgggctgggcgcggtggctcatgcctgtaatcccagcactttgggaggccgaggtgggcagatcacaaggtgaggagtttgagaccagcctgaccaacatggtgaaaccccgcc

SEQ ID NO: 1282 - DNA, 645 bp, Homo sapiens
gctcatgcagtcctcctgcctcagcctcccaaagcactgggattacaggcatgagccactgcacccggccctaacattgttttatagttttatcttgtgaaatgtattcccaagtattttattccttttggtgttattgtaaatggaattattttcttaattttgcttttgggtcattcactgctagtgttagaaacacaatcgatttttgtatattgatcttgtgtcctgtagcttgacaagggggtgaagcttagcacaaacgcagggctacctccaggagccataatgccacagtctctgtgccttgcccaggaacaggcttgcctgcctgagtcacaggccttttatgacaatccttcctgttgtggatcagattagaccaccatccccactccccgtatgggcacagttgccaagacacacagatgaaggggtccatgtggacaggtggctgggcgaggctgggctctcgagccatcccaggagctcgtgggcattcacctttccctctagttttgtgaatttgtcagcccggactctggcccagggggagctggcctcctccacggtggccaggagtgccccctcactgagacgggaagctccgcaggcacatctggaaaggggaggcaggctcactgt

SEQ ID NO: 1283 - DNA, 645 bp, Homo sapiens
gctcatgcagtcctcctgcctcagcctcccaaagcactgggattacaggcatgagccactgcacccggccctaacattgttttatagttttatcttgtgaaatgtattcccaagtattttattccttttggtgttattgtaaatggaattattttcttaattttgcttttgggtcattcactgctagtgttagaaacacaatcgatttttgtatattgatcttgtgtcctgtagcttgacaagggggtgaagcttagcacaaacgcagggctacctccaggagccataatgccacagtctctgtgccttgcccaggaacaggcttgcctgcctgagtcacaggccttttatgacaatccttcctgttgtggatcagattagaccaccatccccactccctgtatgggcacagttgccaagacacacagatgaaggggtccatgtggacaggtggctgggcgaggctgggctctcgagccatcccaggagctcgtgggcattcacctttccctctagttttgtgaatttgtcagcccggactctggcccagggggagctggcctcctccacggtggccaggagtgccccctcactgagacgggaagctccgcaggcacatctggaaaggggaggcaggctcactgt

SEQ ID NO: 1284 - DNA, 498 bp, Homo sapiens
gttcatgtcttcaggagctgaggactacgaggcatcacaaaagtggccacgagaggcaggtaaaggcccccaaagtcttcaccatcgtccgcctcagaaaatcacttgtctgatggtaagggatgggatgtggggcggcgtcggcattggtgagggcctcgggcggggagagggtttgtgtcatccaatcgcaaagctaagtgtgttgcttcactttaggcgtcaaccagcctgtccaggccacacagcgcacagatactgggtcagatattaccctggttgtttcttcaaggtgtttttggaagagactgacatttcagtaggcagagtaaagcagattgccttccctaatgtggaccgctggcctgtgcaccgggcaaggccctgccccccaccacccccacctgcggggagcctcatctgtgtgctccacgtttggggctgcctgaaagattccctgggagaatccctctctgcttggaaccactgacttggaga

SEQ ID NO: 1285 - DNA, 368 bp, Homo sapiens
aaaataaatgtataaaagaagcagatgacatttaggagttatatttcaaagagatgtattttggggatatttagatataacagctaggaacctttttctctcttgtttctcttactcccttcactttttttcagttgactcagttaagaaagttttcttattgtctcaaagtaattgatgagggtgaccttttatgtaataggaaatgttcttgatgaaatattttcagaatttcctatttcatgtctaaaaggaagaagaagaattttcagttcttgccagctgcctgggacttctgccaacgttttaccaaacagaacatccattcatcagtgcctcctgtctggattggccagttccagcatttg

SEQ ID NO: 1286 - DNA, 452 bp, Homo sapiens
gctagttaaagggtttgtattgaagataagtagagtgggaacagcagtgagtggctgtgtatgccatggttggagtctcagaattctagaactacagttttttaaaattgaataatgtgatgaaagtagtattttggggagtaattctggtgtctttttagtggataaattaaagtaaggataaagggaagccagaaaatatttaggtggtgaaaaaaatctagactatttttctgattgtaaaacttggaaagtaactaatgtaagagacatttgagaaaaatataggacttggtgaccagatgtacatgactttaagatcttgaactccaatcattaggagagtagtgtctagtatatacagctacagtaggaacatgcggctgcttaaacaccattgctgatgccccattgcctatggaagaaggtatggactccttgcatggcactca

SEQ ID NO: 1287 - DNA, 706 bp, Homo sapiens
aaagcagtcattaaaaagtcaggaaacaacaggtgctggagaggatgtggagaaataggaacacttttacactgttggtgggactgtaaactagttcaaccattgtggaagtcagtgtggcgattcctcagggatctagagctagaaataccatttgacccagccatcccattactgggtatatacccaaaggactataaatcatgctgctataaagacatatgcacacatatgtttattgcgacactattcacaatagcaaagacttggaaccaacccaaatgtccaacaatgatagactggattaagaaaatgtggcacatatacgccatggaatactatgcagccataaaaaaggatgagttcatatcctttgtagggacatggatgaaattggaaatcatcattctcagtaaactatcacaagaacaaaaaaccaaacaccgcatattctcactcataggtgggaattgaacaatgagaacacagggacacaggaaggggaacatcacactctggggactgttgtggggtagcgggaggggggagggatagcattaggagatatacctaatgctaaatgacgagttaatgggtacagcacatcagcatggcacatatatacatatgtaactaacctgcacattgtgcacatgtaccctaaaacttaaagcataataataataaaatttaaaaaaagtaatag

SEQ ID NO: 1288 - DNA, 548 bp, Homo sapiens
ctagaatagaacacaggtctgatgccccagttcccatcaaactgcacagttctgtaattcaagctctcctatccttccctcccatcaaggcctcctcacacacccctctgcctgggacccaccagccatctccccaggccgtgtcctggccagcaacaggccgctctgctgtagtccaccttaaggcttcaaacccagagctgaggagtagcaaaaatccccgttgagagggcctctctcaatatcaggtatggccagagaaccctgagctcctgtgagtggtttacttgtttgttttgttttggggtgggaaagtaggtggaaaaaaatctgagcatctagttgtatgttgggtactatgctcccagggttggcatagccaagagggtttgtccctttgctcaagaggaaagctctctctggcctggcatggtggctcatgcctgtatcccagcattttaggaggctgaggtgggaggaacacttgaggccaataatttgacaccagcttgtacaacataggagacctcatctccacttaaaaaaaa

SEQ ID NO: 1289 - DNA, 3064 bp, Homo sapiens
atgagtttattaacatgtgctttttatttagggtatgagctacagttccgattaggcccaactttacagggaaaagcagttaccgtgtatacaaattacccatttcctggagaaacatttaatagagaaaaattccgttctctggattgggaaaatccaacagaaagagaagatgattctgataaatactgtaaacttaatctgcaacaatctggttcatttcagtattatttccttcaagggtaagtcaggtgttttgtttgtgagaaaaaaagttaatttgttctgtaatttgaagtcacctaacttgtaaatgttactgtatgaaccatggcagtgcaatttttatagtgcttccttgagatgcaaatagaatattctttgatttctaggaggtaattttatggtccattgcagagctaaagtatcaagtaaatgtattttaagtaacatcttaaaatgtagtaatttcatgcaacctgattataggttgctgtttatttgcgtgcccttgttattactgataggttttagtatacttatatttcattaaaccaacattcttggatattttgtgtattatacatgtaattatgtagattgtgaaagggtaaaagtagcttttccattaagttttgttgcaacttttaaaatgattttatgtgcttagaaataaatacattttatttgggacaattaaccttttagttagagtcagactatattatatgaggattttttttctatcactgactgaaaagtttttgttttgttttttcccttagaaatgagaaaagtggtggaggttacatagttgtggaccccattttacgtgttggtgctgataatcatgtgctacccttggactgtgttactcttcagacatttttagctaagtgtttgggaccttttgatgaatgggaaagcagacttagggttgcaaaagaatcaggtaatgtcagcttgctttctttttcttatttaaaaaaataaatgtaattatcctctgtgatatagatttcaaaagttttgtgtattagtccattctctcattgcagtaaagaactacctgagactgggtaatttataaagaaaagaggtttgactcacagttccgcaggctatacaggaagcatggctggggaggcctcaagaaacttacagtcatggcagaaggcaaaggggaagcaggcatgtcttacatggccagagaaggaggaagagaacaaagtgggaggtgctacgtgcttttaaacaaccagatcttgtgaaaactcactcactatcatgagaacaagggggaaatccacctctgtgatcaaacacctctcaccaggcccctcctccaacatcggggattacaattcgaatgagatttgggcagggacacaaatccaaaccatatctttttgcctctatgtttaattttgtttcttattatttagtaatataagtagatagaaccatattaaaaaaaaattttttttttttgagacggagtatcaccctgtcacgtaggctgcaatggtgcgatctcagctcactacaacctccacctcccgggttcaaacgattttcctgcctcagcctcctgagtagctgggattataggcacctgccaccatgcctcactaatttttgtatttttagtagagacggggtttcaccatgttggccaggctggtctcaaacttctgacctcgtgatctgcccaccttggcctcccaaagtgctgggattataggcatgagctgctgtgcttggcccatattacatttttgatacttaaccatttttaacctataaaaatggcaaattttgtggttcagcttaagaaatgaaggaactccataatgaaacacttatcatttctaagactttaccatataaaaatcagaaataagctattgaaaagtgaaggaaaatgtattatcattatgtatcattttaattcaacaaacattggttaaccatcttttgtgtagaagacatgtgctaccataaataccaagagcaaaatgaaacttgtgtttcattttggcgcaatctcggctcactgcaagctccgcctcctgggttcacaccattcttctgcctcagcctcccgagtagcttgggactgcaggcgcctgccaccacgcctggctaatattttgtatttttagtagagacagggtttcacggtgttaggatggtctcgatctcctgacctcatgatccacctgcctcagcctcccaaagtgctgggattacaggcatgagccactgcgcctggccttttttttttttttttttttaagacagtgtctctgtcacccagactggagtgcagtggcctgatctattttttgtagagacaaaagtctcactgtgttgcccaagctggtcttgaactcctgggctcaagtagtcctcttgccttggcctcccaaagtgctgggattacaggtgcaaaccactgcacctgatctcaatattaattttctgcttttaagttggataatacatgaagaaaggaatgagaagttcactgacataactaaaacagaatacaagtactatggaacattaaaagtagtagaaacacgtgttgatatactcgtagaagataaatttactacatgttaagtatataaattttctaataggcagtgtgtgtgaattttttcaaatattatctcattatctctgtcttgtatatgaggacacatatcttgaaagatttaaataaacttgcttaaagtctcttgtggtacagttaggatttgaacccaagtgtttgacctcttttccagtagcatgcttgccttgctatttataattacttaagaaagtttaaatttatattttcttcattttaggctggttttgtttgtttgtttttacagtggtctttcctttatttgctttgcaggctacaacatgattcattttaccccattgcagactcttggactatctaggtcatgctactcccttgccaatcagttagaattaaatcctgacttttcaagacctaatagaaagtatacctggaatgatgttggacagctagtggaaaaat

SEQ ID NO: 1290 - DNA, 3064 bp, Homo sapiens
atgagtttattaacatgtgctttttatttagggtatgagctacagttccgattaggcccaactttacagggaaaagcagttaccgtgtatacaaattacccatttcctggagaaacatttaatagagaaaaattccgttctctggattgggaaaatccaacagaaagagaagatgattctgataaatactgtaaacttaatctgcaacaatctggttcatttcagtattatttccttcaagggtaagtcaggtgttttgtttgtgagaaaaaaagttaatttgttctgtaatttgaagtcacctaacttgtaaatgttactgtatgaaccatggcagtgcaatttttatagtgcttccttgagatgcaaatagaatattctttgatttctaggaggtaattttatggtccattgcagagctaaagtatcaagtaaatgtattttaagtaacatcttaaaatgtagtaatttcatgcaacctgattataggttgctgtttatttgcgtgcccttgttattactgataggttttagtatacttatatttcattaaaccaacattcttggatattttgtgtattatacatgtaattatgtagattgtgaaagggtaaaagtagcttttccattaagttttgttgcaacttttaaaatgattttatgtgcttagaaataaatacattttatttgggacaattaaccttttagttagagtcagactatattatatgaggattttttttctatcactgactgaaaagtttttgttttgttttttcccttagaaatgagaaaagtggtggaggttacatagttgtggaccccattttacgtgttggtgctgataatcatgtgctacccttggactgtgttactcttcagacatttttagctaagtgtttgggaccttttgatgaatgggaaagcagacttagggttgcaaaagaatcaggtaatgtcagcttgctttctttttcttatttaaaaaaataaatgtaattatcctctgtgatatagatttcaaaagttttgtgtattagtccattctctcattgcagtaaagaactacctgagactgggtaatttataaagaaaagaggtttgactcacagttccgcaggctatacaggaagcatggctggggaggcctcaagaaacttacagtcatggcagaaggcaaaggggaagcaggcatgtcttacatggccagagaaggaggaagagaacaaagtgggaggtgctacatgcttttaaacaaccagatcttgtgaaaactcactcactatcatgagaacaagggggaaatccacctctgtgatcaaacacctctcaccaggcccctcctccaacatcggggattacaattcgaatgagatttgggcagggacacaaatccaaaccatatctttttgcctgtatgtttaattttgtttcttattatttagtaatataagtagatagaaccatattaaaaaaaaattttttttttttgagacggagtatcaccctgtcacataggctgcagtggtgcgatctcagctcactacaacctccacctcccgggttcaaacgattttcctgcctcagcctcctgagtagctgggattataggcacccgccaccatgcctcactaatttttgtatttttagtagagacggggtttcaccatgttggccaggctggtctcaaacttctgacctcgtgatctgcccaccttggcctcccaaagtgctgggattataggcatgagctgctgtgcttggcccatattacatttttgatacttaaccatttttaacctataaaaatggcaaattttgtggttcagcttaagaaatgaaggaactccataatgaaacacttatcatttctaagactttaccatataaaaatcagaaataagctattgaaaagtgaaggaaaatgtattatcattatgtatcattttaattcaacaaacattggttaaccatcttttgtgtagaagacatgtgctaccataaataccaagagcaaaatgaaacttgtgtttcattttggcgcaatctcggctcactgcaagctccgcctcctgggttcacaccattcttctgcctcagcctcccgagtagcttgggactgcaggcgcctgccaccacgcctggctaatattttgtatttttagtagagacagggtttcacggtgttaggatggtctcgatctcctgacctcatgatccacctgcctcagcctcccaaagtgctgggattacaggcatgagccactgcgcctggccttttttttttttttttttttaagacagtgtctctgtcacccagactggagtgcagtggcctgatctattttttgtagagacaaaagtctcactgtgttgcccaagctggtcttgaactcctgggctcaagcagtcctcttgccttggcctcccaaagtgctgggattacaggtgcaaaccactgcatctgatctcaatattaattttctgcttttaagttggataatacatgaagaaaggaatgagaagttcactgacataactaaaacagaatacaagtactatggaacattaaaagtagtagaaacacgtgttgatatactcgtagaagataaatttactacatgttaagtatataaattttctaataggcagtgtgtgtgaattttttcaaatattatctcattatctctgtcttgtatatgaggacacatatcttgaaagatttaaataaacttgcttaaagtctcttgtggtacagttaggatttgaacccaagtgtttgacctcttttccagtatcatgcttgccttgctatttataattacttaagaaagtttaaatttatattttcttcattttagcctggttttgtttgtttgtttttacagtggtctttcctttatttgctttgcaggctacaacatgattcattttaccccattgcagactcttggactatctaggtcatgctactcccttgccaatcagttagaattaaatcctgacttttcaagacctaatagaaagtatacctggaatgatgttggacagctagtggaaaaat

SEQ ID NO: 1291 - DNA, 455 bp, Homo sapiens
ttttaagtaacatgacaaactctcatgccatcctgctctatcccacctggaatgtgactcatccttttgtccagtgcatccatgctgtaaatactacctgtacaccagttacttaatagcctgctcagttatcagataaaaaaacacaaaatatcaaaatatatatatatatagggtttcatactatctatagttttacacatccacttgaggtcttggaaggtacccctaaggataagaggggactactctattaatcctttcccaagtaactcatggatcctatattagcaggagctctggtactatagtactatagcatatatgaaaaaactgaatgacttctattatttggagagaaacttattagtaaactctcagaagttgtatttggaaattatgtcttctacatgttaaaagagcttattaaatttagtctgttttggttcctaaga

SEQ ID NO: 1292 - DNA, 455 bp, Homo sapiens
ttttaagtaacatgacaaactctcatgccatcctgctctatcccacctggaatgtgactcatccttttgtccagtgcatccatgctgtaaatactacctgtccaccagttacttaatagcctgctcagttatcagataaaaaaacacaaaatatcaaaatatatatatatatagggtttcatactatctatagttttacacatccacttgaggtcttggaaggtacccctaaggataagaggggactactctattaatcctttcccaagtaactcatggatcctatattagcaggagctctggtactatagtactatagcatatatgaaaaaactgaatgacttctattatttggagagaaacttattagtaaactctcagaagttgtatttggaaattatgtcttctacatgttaaaagagcttattaaatttagtctgttttggttcctaaga

SEQ ID NO: 1293 - DNA, 520 bp, Homo sapiens
cttcagcaagctacctgcagccctctgtctgacatcatgtccttcaactgctccacaagaaattgctcttccaggcccattggaggacgctgcattgttccagtggcccaagttaccacgacttccaccactgatgctgactgcctgggcggcatctgtttgcccagttccttccagactggctcttggctcctggaccactgtcaagagacctgctgtgagcccactgcttgccagccaacctgttaccggcgaacttcatgtgtctccaacccttgccaggtgacttgctctcgacaaactacctgtatttccaacccctgctcaactacctacagccggccgctcacctttgtctctagtggatgtcagcccctgggaggcatctccagtgtctgccaaccagtgggcggcatctctactgtctgccaaccagtgggaggagtctctactgtctgccagccagcctgtggggtctccaggacgtatcagcagtcctgcgtgtccagctgccgaagaa

SEQ ID NO: 1294 - DNA, 520 bp, Homo sapiens; identical to SEQ ID NO: 1293

SEQ ID NO: 1295 - DNA, 520 bp, Homo sapiens; identical to SEQ ID NO: 1293

SEQ ID NO: 1296 - DNA, 103 bp, Homo sapiens
ttttgagatggagtctcactctgtcgcccaggctggagtgcagtggcacgatcttggctcactgtaaactctgcctactgggttcaagtgattctcctgcctc

SEQ ID NO: 1297 - DNA, 12047 bp, Homo sapiens
ttccgcagctgctgccctttcggatctcctggtccctcgtaggggaccccacttctctgacaccgcgttgggttcccggggcctacagcgaggcctgtaactccgggagagaccctggagcggggtgtgggagaacggtctggaggaagggctccgagcacttcgaaagtataaaccgcggtcccaaagaggcgtgctgtgtctgcattttcctgggagtgcacggtttacattctgtaaagcagtgctgtcgactagaaattttgtgcgatacacatgtacaagttttgtcacttaaaaagaatttgaaaaaacttcatagatgcaaaaaaaaaaacccaccattattaaagaatacttaggcatttgtggaatgcattgaagagttaacaaaatggataggcaggaaatatcgcagacctagagtgaattacagttacccactgtggaactgaggagctagggtttctcataaaactccctgataggagacgacttttgataaaaatttttttccgccaacaaaatcccctgtcttctccactagttattgtctgtccactaaataagaggtggtccgtcacttcttcagatgagcaactacaggcttttcaaaagataattgctaatcaacccctttgtgcctgggttttcttatttgtaaaaatagatactactacctaactccaaagtgtgtggtgaagacaaacaactggggtgatgtatactaaagtaacgaaagtgttgaccacacactacgggctggttagtgttagattcccttgtttttccctcagtatcaaaaacagatctaatttaggtttacataaagacaaagtatgaagataaggtgacttacagttggtactactaacaaaatgggctaagatttgcattattgcatgaaaacaacaaaacatatcaataaataacaaaaagcttggaattcagacaacagatcaagtctgggcttgatctcaagctagtgttttgatgttgaaaaaatgttatttggtctttctaaccccatttccttatgtaaaattggggatgatgataaattcactgataataagagttaaatgagattcttgaggactcagaatggttctaacgtgtaagtattagcagtcatactgtagcataagaaaataccgtctgctgaaagaggaacaataaagattatctacatggtcatcatttaaaagctaccagatataggaagaaggggccataaaatgataacgttatgatgattaattttgatgcttaggtcagagtccattctaggatatctgctgcccaaaaacagcagagactcatttctttggaatcacaggacgctgagtgagaggaaagaaaaagaaaagaaatatttaagtcacatatgtgatttctaaaagtaaaaagaaacagatgaaattagtaatatatttttaaaatccagtatatcccaagtatggttattttagcatgtaatcaatataaaataataagatattttacattctttttttctagtctttgaaatttggtgcatattttacacttatggcacatctcaattcagactatccacatttcaagtgctcagtggctgcatgtgcctggtggctaccatattggacagcacaggtctaaggatttcattcctgccacaagtccaaactcctagctttaattttgagtgtttttaacaaactggcctctgtttatcattctttcttctagtacttccccaaggatgattgtaccctcagcactcaagaccgcttgcggtttccctacacactttttgttcaagctgtttcttttacctggaatgctgtctttgcaccttcttcctggacctggttcactcttgttgcctaggctggagtgccatggcgcgatcttggcacactgcaacctccacctccccggttcaagtgattctccttcctcagcctcccgagtagccgggattacaggcatgcaccaccacgcctggctaattttgtatttttagtagagatggagtttcaccatgttggtcagactggtctcgaactcccgacctcaggtgatctgcctgccttcgcctcccaaagtgctgggattacaggcgtgagccgctgcgcccggccgagaggcacacattctgctaagagctttttcctgactcccctaactccaagagggatttgtcactccttagctttgtactcatgactggagtagaatgaatttaatttgagtttagttgtttttgagactctccctggctagtgtagtgtcttattcgtctttgttgtgatcatggcctgcacctaacagatgatcagtagatgtttgcagacagaaagtaaaccactcatcaggtgtattcagtcccgttcttgaacgggcttgctgcctcctttttgaggagatctgtgtatgtactcttctttcacgcatatgtgtgagcaaacacacacacactaacaagaaattcatctgaagatgtgcacaggaaatatcttgcatctttaccccctttgtgatcttacatatgggagaactgaggcacagaaataagttaggacagccagcaaacttgcatcagtataaatacaaagaagggaagggaggaacatgcttgaaaggggtgtgctggtctcagagggttaggtttctcagttggctgggcatcagctggccatgctttagttatttgatgggaggaaaaataagtgggaggtgaggagtaactcctgggctctgatgagtattctaggcaagtacagatctggaaagcctgtatgcaaaggaggaactcactgaaaagtgctggcctgaggagggcagaagggagggctggggaagccagcagggggagcaaaggagtaggctccagctgggtgaagatgttggtgtggtatgttatgtaaaatatacaaattattattgggaataaccacgtctcagcagtgcgagttctcagtttgaagaatgggaaatggaaaggatcagattcagagacggcaacttactcaaggtcacagcattttaaacccaaatgaaatctcctaggcccttcatgccacactcatccatccctacctacttgtgttgcaaccaagggccccactgtagtgcctaggggagcaggtctagggcatagtgccaggcctgattaatgtcttccttaccattttccagcgaggggctgtgattaggcctatttataggggcctggtcccttaatattctgcctggtgcatctcttgccaatcaaatcagtgctgtctgcagtgtgattgctgctttagtggcaccagggagaggagttaattaaacccaatataaatagactctgccctcactgtgcaattccaggagtgtttttccttcctgtcctctacccccacaggcacctctttcctcttggccccctaagctctagcctgggtgagcagggctggatactcctatacctagagtcactagccactgcccagtctgtttcaggagcaggcctcaaattcctcaggggttaaagtgggaagaacccgtgtgtgcgcattttttgtgcttttccagaactgggtaccatttggcagttgatcacgcaatctcccccgctaccccatttctacccctttgtttccagcctcttctttcctctgcaaccaaggtttcttgtttatccaaggtggggagctgaactgagacaatgtatggaaagggtgcctggcaggtagcaagcaccttgtagggggtcagaaatgttgcaccttctctgaactcctccattgaccctacagattccccagtccctggccctgccctttccctcattcactcagcaggcatcagcagagtcccatctatgcgctcctggcctctcagcaaatgctctgtcccctactcccctatctgtgcaggctgaagctatgtgcatagttgggatgagggctgtgttgtctcaacaccacgctgccctgtggtgggggcgtgccggtggtcgtgggtggctctgatgctccggctccgacccacaggcaccatgactcctgtgaggatgcagcactccctggcaggtcagacctatgccgtgcccctcatccagccagacctgcggtgagaggaggccgtccagcagatggcagatgccctgcagtacctgcagaaggtctctggagacatcttcagcaggtgggtgctgccactcacccccacctgatgagagggccatccctgtcctgggcaatcccagcaacacaccctctgggagcagcccccttggggaatcccggtcctggggaacccatctggcttccctgtgtgggaggggctgaagtgagagcccaacttggaagcttttactcctgggagtccgagagctcactcccttccaccccacttagcctcctggtttcctgtggtggctctgctctcacaactcatgcttttcctcccattggagggcctattccttcacgttttcctgcagccaacaaatatttacccagtagtgctcgtgtgcaaggcagtgtgggaatctctatatatccagccacggataaggcaacatacctctccacctggagcgcacattctggcaggagagaaagacctaaataagcaatagatgattagttcttcaataacagttgtgacaaggtctattgataatattttgtaatcactaatattcatataaaccgtgcaccaccattgatttgagtgcattaactcacacttcatgagcaggcactgcggtcatctcattttatagatgaggaaactgaggcaacagaaaggctgagagacctggcctagtgacagagccaggattcaaagccatagatcatggtcatgggttatgtaggttattactgcatctgttcaggggagatagggtactgtgaggctcgtcatggaaagcctggcttggtctcaggtcagggaaggcagatgtgaggaaatgacatttatggtaaagtctgagggttgagtgggtaggttgggaagaacattccagaaagaagcacatgaactacagcctggaggtggaggacctaaaaggaagccagcatggctggagcacggagtggccattgagggaggcgagctggagggctgcagcttcttgtattggcagtgctgacctcgcacagtccttgggctccagtgacttcactcagtgtttatctaacatgagtgagtgaatggtgtttgctgtttttttggcaaaggtcccaggggttgtcgggtacacaggtcctgtctttggccataagcaaactgaaatgaggcttggtctccttcccaggattccacaccatgcctcacatggtagaccccagcgggaagtatgtgactgcctgactcaggtgcctctcgtggtccaagccatccctgccctgtcccttccctggttgttgccagacctggagcccctgctccttcgctttgcagcctcctcttctgtcaccaactgggaacccacttcttcctgaaagtcctcccccacggactcaccggcttgccccaagcttgtcaagaatgtcccagtaaccaggggacacacactgaagtgactgaggggttaccttggagttgatgccttggctcagatccagctcccctgttttcttcctctgtaaccttgggcaacccaacccctctaagcctcggtgttctcatttgtgaagttgtggtaataatggtagcttcctggtagaattattgtaaatattaaattaatcaaaacatgcaaaggaatggaacagtgcctggcacctaggaagccttcaggaaatgctatctcttccctgttgataatcttgacccgtacactgcctttggttgccattcatgaacctgccaccaatagtaacaaagtgctggatgcaccttttgtgcttatctttgtgctaaatgtgcccgagggaagcctagggaagaggatgcaggtctttaagagccatcagctccagattatggccaccccatgtccagcacttagaatggaggccaaaaccattccctcggaaattgtgtttccttgccaagatggggactgcgtggttgcccttctctgagggcagcgctggatttttggcgtctttcctttcctgtcctggtacttggcaccttgtagacagttgcatgtcccctgcccagggatgggatgaggagagggcaggaaggcatttcctgggtagtggagtgctgcgttcattgagtgtgggttctccaagctgctggcacagcgcagggagggccagatgcctctcaggagccttgggcctgagtcctggctccctcactcctgggttccaggtcactgcatctgtctctccaccatgtgctccacctcgtgctggaccttaagagataccaattatgtggctgccactgtgtcctagaggctggaatgggaacacatagggcgagattgattgttaattgctagcatgaaccgcgtgggcttctcagggtctagagtggagagaaatcggtaagaattggtggcacgcctgtcagaactccccagaccaagctaagcagaaattaaccaatcagtagagcagccttcggagtaagggctaaaatgatgtcctcagggcctggttttgctttccttccatgtcagtttgcttctttgggtctggctgcattcccagacaggccatgctgtcgtggtagcaaggtgacatgacacagggtcaggtccagcaggaaagaatgctctcctgtgtccccacttcctccagaagccacactcacccatcccacctggcttggtcctcatgtctatcccagaatccattactggggccaggggactatgacacaaccacttggcttagactgaggagctctgtgggcagccccacctgaagctctgggactaagcctgcgagagagatggattccccaagggaaatggggccattgcttgagtaaaaaggaaatagttgctgaagaggaaaaccacgtgcttactccacacagggcagactcctggaagaggggggcagggtagggaggtggatatgcaggttgccctggtggggtctggaaatgggggccgcaggcttggagggaggcctcagtgtggcttggaacgtggtgtatggtggtctgccgcgaaggccggcctgcacaggggtgggaggggggtgcttctgcatgggaagcacagacagcgctgcctctcccttgcactcagctctcggggcatgagaggctgactttccgtgagcctgtgggccaggcctctttgaatgtggctgagggagctttgccctggttcctttgtgtccccacggtgccacgggaggctccctggcagggtgtggggcaaggcagtgagtgaagagttgggatgagtgagttagggcccacggattactcaagacaggacttcacgttgattcaggagtgttagggagctgtgattggattttgagcagggcagggatgggacagaagagtttggggaaggttcctcaggcatccgtcacggaagggataagaagggagagagagtggatgccggggacacccagaagctgttattgtagtcaggatgtgacaggggtgaggctacagacaggggacttgcaagcagggagggcagggtgagacattcagaggaaacgacgacaggaaatggtgacagatagggaatgaggatgaagggaagggagagccagtgacgactggcagtggagtggggagcaccgccacctctcctcctccacttgcccctcctgtggcactggacaagttagtgggcttttcgttgtccatgggcttttttggtggggatgtgaccagctttgaacccttccccttaaacatgctcctcctgcacggaagagacaggggcaggggagagactctctccccaccacccagctcaggccccagcacagcccggcttctggcctcactgacgtctgtgcccagtgacgcaggcaggtgagctcctggcaaattagcattgcaggctgtgctctctcctcctgctctgctgcagctgggagtgtgcagagactggaggggatgacagtcacccctctgttttctgtggtggctctgttttctgtggtgctggatgcacctctgttttctgtgttggctcccagagagtgcacggtccctgctgattgaaagaaggatgaagggcagaagaggggcggggagctgtgtgccctaagatctcattgcctttttatgccgattaacatgcttttagcccctactgagcttatagttaacagaagtttccaggtctttcttcacctgaactgtgtctaaagcaagttccctccaccttctgtatttatacgcttgatttttaaaacctaaatgggcttcacatttattccttgtaaatttcatcttggtgattgcagtctaccctctggcctttaaaaattgtctgagccttgattcgatcatgaaaccagcttacccttcccctgtgtgctggccccagttttctaaccaggtgttgaatgaactgccagatccctccgtgcaaggctggaatcagtccattgttcaactgtgccctttggggctgtggttcatttggctctgatttttcctatatgttctctcctccaacccccatagctccatcttgtctacaagattttgttagaagccgtcaaaatcctgctgactcgagatgcactgtgctgcatgttttccccgggcacagcaggctaataatcctgttacaaagagaaatgctgtacatttcgagcagtgctggcccctgggactcaccgtggccttttctaagtgcttacagactctgtttaataatccattccagaaattttccagggctcattgttgagcttggtgttcgcaactttgagtgatcagcccttctcctttgtgggagcaccaggacagagcagcctttgtccctccccagtctcagttccctcccattgcccctgtggacctcgaatgcagagcttatgcacctactgaaggtcgtgtcagcacccaaggcagaatgaggctgtcctgggaactagggtaaattaaaacagcttgtgctggaggaccctttacagcagatgaaggcctctccccagccagaaaagatggagcacacgctgggtggtggccccgcttcctcactgaaaggagatggtgctcttcttttttctttctgaattgtggccaccttcataccagtctgtcatggaacacttaagccgcttgagtgcctgctggtactcccagccctgccatgcctgagccccctgcacacaaggagccaggagtaatcagggcagacccattagggcacggggacttctggattgtgaaattggctctctgggggccaaggccttctaacgttggtggaagtggctttggcttattgggtcggattctaggccattcattccaacctttagagacatcccagctttccctagcccagagtctgcagcccctccaccatcccacatcctccccctccctttcctcatgaaccccagtcgcgcctctgccttctcaaacccctccaccatcccacaccctcctcctgcccttcctcatgaaccccagtcgcgcctctgccttctcatccctgcgcaccacacaggctcgctcgtgcccggtgagtgctgaggctgctctgcacatggagtgtggccctgtgggcaagggctgggctcttggaggtaggggagctacaggggcgactgggaggaggatgtcgtgttacacacgcatcagagttaactttgcagtgagagcggccttgctgcggccaaagaacatggaaaagcatgagtggggtgatgtgtgccttaaagcatcagacacttgggcctcgggcatcaggagccagccacagggatgtctggggaaatggcgttccatgagatgcaagcacacaagaatgcacttggcacatctggggaacagcaggcagctgatatcactgggcccaccctgcaccagggaggatggaagcaggtgaggagctagaccacactgaggcggtggtcgggactcagggtttgctcagtgagccgttcactatgtgcaggggcagttccccgtctgaatttaggtgacgacactcaggtccagccttgccagtctcagcctccggtctccgttccccctctgcagaggccactttgtctgctgcacgtgatcatgaggggctgtgaagtgcttgccccatcagtagccatgtgtgcatgtgtaaataccatcctctgtgtgccctggaggctgtccttcagatagcatgtacaggtggcagcatagggcctgtccctactgagagtgcagggaactcagcaccgtcaactcctcgaccctgcaggtcagattatccttgtagaggccccctggatggcaccaagatcggccctggcaagcaggtgaccctgacttcagagcccttgcctgagggcctggcctggcagctctgctgttagaagcaggaggtgtgcagggggtggggagcagcccagcctctgtgatcttctccatggcaggatctcccagcaggtagagcagagccggagccaggtgcaggccattggagagaaggtctccttggcccaggccaagattgagaagatcaagggcagcaagaaggccatcaaggtagtccccatgcccctgtgtcctgaggctactgggcagtccctccatttccccgtgcctctgaggctgcccagtctctgccctgctgcccacctgtaccttgggctttcttctcgcccaggctcccaactccaccctcttcctgccaagcaatcctagccctctgagcctcttggggccccctcagacttgtccctgtgtccacaggtgttctccagtgccaagtaccctgctccagagcgcctgcaggaatatggctccatcttcacgggcgcccaggaccctggcctgcagagacgcccccgccacaggatccagagcaagcaccgccccctggacgagcgggccctgcaggtctgctggctgcgcacataacttagcctgtcacacaccaggaggactggatgctggggaggagccggggccaccatagggttctgtcccccagaggaggctgactgggatggggtggcagctgattaggcccagcaccaaatattcaccatcccttggccatcctggccctcccaggagaagctgaaggactttcctgtgtgcgtgagcaccaagccggagcccgaggacgatgcagaagagggacttgggggtcttcccagcaacatcagctctgtcagctccttgctgctcttcaacaccacctagaacctgtatggccagaaggcagggccgaggggtgtgggcgggaggcccggcctggcttagtggggacccagggcatcagacacaggtacagcacatgggccaggagccagggggtgactggggtggctcggctcgggaggcttgggaccccaagtgcacgctgtgcccctgatgatgtgggagaggaacatgggctcaggacagcgggtgtcagcttgcctgacccccatgtcacctctgtaggtacaagaagtatgtcttcctggaccccctggctggtgctgtaacaaagacccatgtgatgctgggggcagagacagaggagaagctgtttgatgcccccttgtccatcagcaagagagagcagctggaacagcaggtgggaggggtgggacagaggtggagacaggtgcagtggcccagggccttgccagagctcctctccagtcaaggctgttgggccccttattccacccatgggaggtgcacacaaggtcttgttggctgcccctgcaggtccctgtcacctctcacatgtccctgcctaatcttgcaggtccctgagaactacttctatgtgccagacctgggccaggtgcctgagattgatgttccatcctacctgcctgacctgcccggcattgccaacgacctcatgtacattgccgacctgggccccagcattgccccctctgcccctggcaccattccagaactgcccaccttccacactgggtaccgagctc

SEQ ID NO: 1298 - DNA, 13715 bp, Homo sapiens
ttaattttgatgcttaggtcagagtccattctaggatatctgctgcccaaaaacagcagagactcatttctttggaatcacaggacgctgagtgagaggaaagaaaaagaaaagaaatatttaagtcacatatgtgatttctaaaagtaaaaagaaacagatgaaattagtgatatatttttaaaatccagtatatcccaaatatggttattttagcacgtaatcaatataaaataataagatattttacattctttttttctagcctttgaaatttggtgcatattttacacttatggcacatctcaattcagactatccacatttcaagtgctcagtggctgcatgtgcctggtggctaccatattggacagcacaggtctaaggatttcattcctgccacaagtccaaactcctagctttaattttgagtgtttttaacaaactggcctctgtttatcattctttcttctagtacttccccaaggatgattgtaccctcagcactcaagaccgcttgcgttcccctacacactttttgttcaagctgtttcttttacctggaatgctgtctttgcaccttcttcctggacctggttcaccctcgttgcctaggctggagtgccatggcgcgatcttggcacactgcaacctccaccttcctggttcaagtgattctccttcctcagcctcccgagtagcggggattacaggcatgcaccaccacgcctggctaattttgtatttttagtagagatggagtttcaccatgttggtcagactggtctcgaactcccgacctcaggtgatctgcctgccttcgcctcccaaagtgctgggattacaggcgtgagccgtgcgcccggccgagaggcacacattctgctaagagctttttcctgactcccctaactccaagagggatttgtcactccttagctttgtacccatgactggagtagaatgaatttaatttgagtttagttgtttttgagactctccctggctagtgtagtgtcttattcgtctttgttgtgatcatggcctgcacctaacagatgatcagtagatgtttgcagacagaaagtaaaccactcatcaggtgtattcagtcccattcttgaacgggcttgctgcctcctttttgaggagatctgtgtatgtactcttctttcacgcatatgtgtgagcaaacacacacacactaacaagaaattcatctgaagatgtgcacaggaaatatcttgcatctttaccccctttgtgatcttacatatgggagaactgaggcacagaaataagttaggacagccagcaaacttgcatcagtataaatacaaagaaggggagggaggaacatgcttgaaaggggtgtgctggtctcagagggttgggtttctcagttggctgggcatcagctggccatgctttagttatttgatgggaggaaaaataagtgggaggtgaggagtaactcctgggctctgatgagtattcaaggcaagtacagatctggaaagcctgtatgcaaaggaggaactcactgaaaagtgctggcctgaggagggcagaagggagggctggggaagccagcagcgggacgaaaggagtaggctccaactgggtgaagatgttggtgtggtgcgttatgtaaaatatacaaattattattggaaataaccacgtctcagcagtgctagttctcagtttggagaatgggaaatcgaaaggatcagattcagagacggcaacttactcaaggtcacagcattttaaacccaagtgaaatctcctaggcccttcatgccacactcatccatccctacctacttgtgttgcaaccaagggccccactgtagtgcctaggggagcaggtctagggcacagtgccaggcctgattaatgtcttccttaccattttccagtgaggggctgtgattaggcctatttataggggcctggtcccttaatattctgcctggtgcatctcttgccaatcaaatcagtgctgtctgcagtgtgattgctgctttagtggcaccagggagaggagttaattaaacccaatataaatagactctgccctcactttgcaattccaggagtgtttttccttcctgtcctccacccccacaggcacctctttcctcttgtccccctaagctctagcctgggtgagcagggctggatactcctatacctagagtcactagccactgcccagtctgtttcaggagcaggcctcagattcctcaggggttaaagtgggaagaacccgtgtgtgcacattttttgtgcttttccagaactgtgtaccatttggcagttgatcaggcaatctcccctgctaccccatttctacccctttgtttccagcctcttttttcctctgcaaccaaggtttcttgtttatccaaggtggggagctgaactgagacaaggtatggaaagggtgcctggcaggtagcaagcaccttgtagggggtcagaaatgttgcaccttctctgaactcctccattgaccctacagattccccagtcccgggccctgccctttccctcattcactcagcaggcatcagcagagtcccatctatgcgctcctggcctctcagcaaatgctctgtcccctactcccctatctgtgcaggctgaagctatgtgcatagttgggatgagggctgtgttgtctcaacaccacgctgccctgtggtgggggcgtgccggtggtcgtgggtggctctgacgctccggctccgacccacaggcaccatgactcctgtgaggatgcagcactccctggcaggtcagacctatgccgtgcccttcatccagccagacctgcggcgagaggaggccgtccagcagatggcggatgcctgcagtacctgcagaaggtctctggagacatcttcagcaggtgggtgctgccactcacccccacctgatgagagggccatccctgtcctgggcaatcccagcaacacaccctctgggagcagcccccttgggaatcccggtcctggggaacccatctggcttccctgtgtgggaggggctgaagtgagagcccaacttggaagcttttactcctgggagtccgagagctcactcccttccaccccacttagcctcctggtttcctgtggtggctctgctctcacaactcatgcttttcctcccattggagggcctattccttcacgttttcctgcagccaacaaatatttacccagcagtgctcgtgtgcaaggcagtgtgggaatctctatatatccagccacggataaggcaacatacctctccacctggagcgcacattctggcaggagagaaagacctaaataagcaatagatgattagttcttcaataacagttgtgacaaggtctattgataatattttgtaatcactaatattcatataaaccgtgcacaaccattgatttgagtgcattaactcacacttcatgagcaggcactgccgtcatctcattttatagatgaggaaactgaggcacagaagggctgagagacctggcctagtgacagagccaggattcaaagccatagatcatggccccgggttatgtaggttattactgcatctgttcaggggagatggggtactgtgaggctcgtcatgggaagcctggcttggtctcaggtcagggaaggcagacgtgaggaaatgacatttatggtaaagtctgagggttgagtgggtaggttgggaagaacattccagaaagaagcacatgaactacagcctggaggtggaggacctaaaaggaagccagcatggctggagcacggagtggccattgagggaggcgagctggagggctgcagcttcttgtattggcagtgctgacctcgcacagtccttgggctccagtgacttcactcagtgtttatctaacatgagtgagtgaatggtgtttgctctttttttggtaaaggtcccaggggttgtcgggtacacaggtcctgtctttggccataagcaaactgaaatgaggcttggtctccttcccaggatcccacaccatgcctcacatggtagaccccagtgggaagtatgtgactgcctgactcaggtgcctctcgtggtccaagccatccctgccctgtcccttccctggttgtcgccagacctggagcccctgctccttcactttgcagcctcctcttctgtcaccaactgggaacccacctcttcctgaaagtcctcccccactgactcaccggcttgccccgagtttgtcaagaatgtcccagtaaccaggggacacacagtgaagtgactgaggggttaccttggagttgatgccttggctcagatccagctcccctgttttcttcctctgtaaccttgggcaacccaacccctctaagcctcggtgttctcatttgtgaagttgtggtaataatggtagcttcctggtagaattattttaaatattaaattaatcaaaacatgcaaaggaatggaacagtgcctggcacctaggaagccttcaggaaatgctatctcttccctgttgataatcttgacccgtacactgcctttggttgccattcataaacctgccaccaatagtaacaaagtgctggatgcaccttttgtgcttatctttgtgctaaatgtgcccgagggacacctagggaagaggatgcaggtctttaagagccatcagctccagattatggccaccccatgtccagcacttagaatggaggccaaaaccattccctcggaaattgtgtttccttgccaagatggggactgcgtggttgcccttctctgagggcagcgctggatttttggcgtctttcctttcctgtcctggtacttggcaccttgtagacagttgcatgtcccctgcccagggatgggatgaggagagggcaggaaggcatttcctgggtagtggagtgctgcgttcattgagtgtgggttctccaagctgctggcacagcgcagggagggccagatgcctctcaggagccttgggcctgagtcctggctccctcactcctgggttccaggtcactgcatctgtctctccaccatgtgctccacctcgtgctggaccttaagagataccaattatgtggctgccactgtgtcctagaggctggaatgggaacacatagggcgagattgattgttaattgctagcatgaaccgcgtgggcttctcagggtctagagtggagagaaatcggtaagaattggtggcacgcctgtcagaactccccagaccaagctaagcaaaaattaaccaatcagtagagcagccttcggagtaagggctaaaatgatgtcctcagggcctggttttgctttccttccatgtcagtttgcttctttgggtctggctgcattcccagacaggccatgctctcgtggtagcaaggtgacatgacacagggtcaggtccagcaggaaagaatgctgtcctgtgtccccacttcctccagaagccacactcactcatcccacctggcttggtcctcatgtctatcccagaatccattaatggggccaggggactatgacacaccacttggcttagactgaggagctctgtgggcagccccacctgaagctctgggactaagcctgcgagagagatggattccccaagggaaatggggccattgcttgagtaaaaaggaaatagttgctgaagaggaaaaccacgtgcttactccacatagggcagactcctggaagaggggggcagggtagggaggtggatatgcaggttgccctggcagggtctggaaatgggggctgcaggcttggagggaggcctcagtgtggcttggaacgtggtgtatggtggtctgccgcgaaggccggcctgcacaggggtgggaggggggtgcttctgcatgggaagcacagacagcgctgcctctcccttgcactcagctctcggggcatgagaggctgactttccgtgagcctgtgggccaggcctctttgaatggggctgagggagctttgccctggttcctttgtgtccccacggtgccacgggaggctccctggcagggtgtggggcagggcagtgagtgaagagttgggatgagtgagttagggcccacggattactcaagacaggacttcaagttgattcaggcgtgttagggagctgtgattggattttgagcagggcagggatgggacagaagagtttggggaaggttcctcaggcatccgtcacggaagggacaagaagggagagagagtggatgccagggacacccagaagctgttattgtagtcaggatacgacaggggtgaggctacagacaggggacttgcaagcagggagggcagggtgagacattcagaggaaacgacgacaggaaatggtgacagatagggaacgaggatgaagggaagggagagccagtgacgactggcagtggagtggggagcaccgccacctctcctcctccacttgcccctcctgtggcactggacaagctagtgggcttttcgttgtccatgggctttttcggtggggatgtgaccagctttgaacccgtccccttaaacatgctcctcctgcacggaagagacaggggcaggggagagactctctccccaccacccggctcaggccccagcacagcccggcctctggcctcactggcgtctgtgcccagtgacgcaggcaggtgagctcctggcaaattagcattgcaggctgtgctctctcctcctgctctgctgcagctgggagtgtgcagagactggaggggatgacagtcaccctctgttttctgtggtggctctgttttctgtggtgctggatgcacctctgttttctgtggtggctccaagagagtgcacggtccctgctgattgaaagaaggatgaagggcagaagaggggcggggagctgtgtgccctaagatctcattgcctttttatgccgattaacatgcttttagcccctactgagcttatagttaacagaagtttccaggtctttcttcacctgaactgtgtctaaagcaagttccctccaccttctgtatttatacgcttgatttttaaaacctaaatgttgggcttcacatttgttccttgtaaatttcatcttggtgattgcagtctaccctctggcctttaaaaattgtctgagccttgattcgatcatgaaaccagcttacccttcccctgtgtgctggccccagttttctaaccaggtgttgaatgaactggatggactctgccagatccctccgtgcaaggctggaatcagtccattgttcaactgtgccctttggggctgtggttcatttggctctgatttttcctatatgttctctcctccaacccccatagctccatcttgtctacaagattttgttagaagccgtcaaaatcctgctgactcgagatgcactgtgctgcatgttttccccgggcacagcaggctaataatcctgttacaaagagaaatgctgtacatttcgagcagtgctggcccctgggactcaccgcggccttttctaagtgcttacagactctctgtttaataatccattccagaaattttccagggctcattgttgagcttggtgttcgcaactttgagtgatcagcccttctcctttgtgggagcaccaggacagagcagcctttgtccctccccagtctcagttccctcccactgcccctgtggacctcgaatgcagagcttatgcacctaccgaaggtcgtgtcagcacccaaggcagaacgaggctgccctgggaactagggtcaattaagacagcttgtgctggaggaccctttacagcagatgaaggcctctccccagccagaaaagatggagcacacgctgggtggtggtcccgcttcctcactggaaggagatggtgctcttcttttttctttctgaattgtggccaccttcataccagtctgtcatggaacacttaagccgcttgagtgcctgctggtactcccagccctgccatgcctgagccccctgcacacaaggagccaggagtaatcagggcagaccctttagggcacggggacttctggattgtgaaattggctctctgggggccaaggccttctaacgttggtggaagtggctttggcttattgggtcggattctaggccattcattccaacctttagagacatcccagctttccctagcccagagtctgcagcccctccaccatcccacatcctccccctccctttcctcatgaaccccagtcgcgcctctgccttctcaaacccctccaccatcccacaccctcctcctgcccttcctcatgaaccccagtcgcgcctctgccttctcatccctgcgcaccacacaggctcgctcgtgcccggtgagtgctgaggctgctctgcacgtggagtgtggccctgtgggcaagggctgggctcttggaggtaggggagctacaggggcgactgggaggaggatgttgtgttacacacgcatcagagttaactttgcagtgagagcggccttgctgcggccaaagaacatggaaaagcatgagtggggtgatgtgccttaaagcatcagacacttgggcctcgggcatcaggagccagccacagggatgtctggggaaatggcgttccatgagatgcaagcacacaagaatgcacttggcacatctggggaacagcaggcagctgatatcactgggcccaccccgcaccagggaggatggaagcaggtgaggagctagaccacactgaggcggtggtcgggactcggggtttgctcagtgagccgttcagtatgtgcaggggcagttccccgtctgaatttaggtgacgacactcaggtccagccttgccagtctcagcctccggtctccgttccccctctgcagaggccacattgtctgctgcacgtgatcatgaggggttgtgaagtgcttgccccatcagtagccatgtgtgcatgtgtaaataccatcctctgtgtgccctggaggctgtccttcagatagcatgtacaggtggcagcatagggcctgtccctactgagagtgcagggaactcagcaccgtcaactcctcgaccctgcaggtcagattatccttgtagaggccccctggatggcaccaagatcggccctggcaagtaggtgaccctgacttcagagcccttgcctgagggcctggcctggcagctctgctgttagaagcaggaggtgtgcagagggtggggagcagcccagcctctgtgatcttctccatggcaggatctcccagcaggtagagcagagccggagccaggtgcaggccattggagagaaggtctccttggcccaggccaagattgagaagatcaagggcagcaagaaggccatcaaggtagtccccatacccctgtgtcctgaggctactgggcagtccctccatttccccgtgcctctgaggctgcccagtctctgccctgctgcccacctgtaccttgagctttcttctcgcccaggcttccaactccaccctctcctgccaagcaatcctagccctctgagcctcttggggccccctcagacttgtccctgtgtccacaggtgttctccagtgccaagtaccctgctccagggcgcctgcaggaatatggctccatcttcacgggcgcccaggaccctggcctgcagagacgcccccgccacaggatccagagcaagcaccgccccctggacgagcgggccctgcaggtctgctggccgcgcatatagcctgtcacacaccaggaggactggatactggggaggagccggggccaccatagggttctgtcccccagaggaggctgactgggatgggatggcagctgattaggcccagcaccaaatattcaccatcccttggccatcctggccctctcaggagaagctgaaggactttcctgtgtgcgtgagcaccaagccggagcccgaggacgatgcagaagagggacttgggggtcttcccagcaacatcagctctgtcagctccttgctgctcttcaacaccaccgagaacctgtatggccagagggcagggccgaggggtgtgggcgggaggcccggcctggcttagtggggacccagggcatcagacacaggtacagcacataggccaggagccagggggtgacgggtggctcggctcgggaggcctgggaccccacagtgcacgctgtgcccctgatgatgtgggagaggaacatgggctcaggacagcgggtgtcagcttgcctgacccccatgtcgcctctgtaggtagaagaagtatgtcttcctggaccccctggctggtgctgtaacaaagacccatgtgatgctgggggcagagacagaggagaagctgtttgatgcccccttgtccatcagcaagagagagcagctggaacagcaggtgggaggggtgggacagaggtggagacaggtgcagtggcccagggccttgccagagctcctctccagtcaaggctgttgggccccttattccacccatgggaggtgcacacaaggtcttgttggctgcccctgcaggtccctgtcacctctcacatgtccctgcctaatcttgcaggtcccagagaactacttctatgtgccagacctgggccaggtgcctgagattgatgttccatcctacctgcctgacctgcccggcattgccaacgacctcatgtacattgccgacctgggccccggcattgccccctctgcccctggcaccattccagaactgcccaccttccacactgaggtagccgagcctctcaaggtaggtgagctgggttctgggatgggagctgggccggggacctccctggtcacacaccttcttccctagacaccccacactttgtgtttcagacctacaagatggggtactaacaccacccccaccgcccccaccaccacccccagctcctgaggtgctggccagtgcacccccactcccaccctcaaccgcggcccctgtaggccaaggcgccaggcaggacgacagcagcagcagcgcgtctccttcaggtgggagcagctctttgaggccacctgatttctggcgtgctcagtgcactcgggtggattttctgtgggtttgttaagtggtcagaaattctcaattttttgaatagtttccatttcaaatatcttgttctacttggttcataaaatagtggttttcaaactgtagagctctggacttctcacttctagggcagagggagcctgaacaagtgaggctctgggttccccattcctaattaaaccaatggaaagaaggggtctaataacaaactacagcaacacatttttcatttcagcttcactgctgtgtctcccagtgtaaccctagcatccagaagtggcacaaaacccctctgctggctcgtgtgtgcaactgagactgtcagagcatggctagctcaggggtccagctctgcagggtgggggctagagaggaagcagggagtatctgcacacaggatgcccgcgctcaggtggttgcagaagtcagtgcccaggcccccacacacagtctccaaaggtccggcctccccagcgcagggctcctcgtttgaggggaggtgacttccctcccagcaggctcttggacacagtaagcttccccagccctgcctgagcagcctttcctccttgccctgttccccacctcccggctccagtccagggagctcccagggaagtggttgacccctccggtggctggccactctgctagagtccatccgccaagctgggggcatcggcaaggccaagctgcgcagcatgaaggagcgaaagctggagaagcagcagcagaaggagcaggagcaaggtgagcgggccctggagcttgcagtcggagggccttgggcaagatcgcctcctcccctccagccctgagtccaccgggtgctttctgcccaccccctgctcttgccagctggcccctgcttcccctagggcacatgctggaagccctgggccgccaccagaggtcctcagccctcctgcctgggctatggctccttcctggtttgggagccatagtggagctttcctctctaagctcacccagctcaaactgacaggagaatcttcttcgactgccaagagcggtccaaggcaatggtcagccactgcagcctcctgagatatttttagagactggacctgaggcctctggaggctactgatgatgcctgctgtgaacgcagacactggtgtgatgcgatgcctgcgcctgcagcggcagtgccctgggcactatggttttgagcttgtacccagcgctgcttttgccttgctctgtgaccccaggcaagctgcctcacctctctgggccagtttccccattgtacagtggtgctgcacaccctggccctggccccgaggtggctgggaggtggctcctcaaacagccgctgtctcatcagtgcccggtgctgggtcagggatcgactgaggctctgagctaactgggaaacacagtggccttggagggctggggagtgtcatgggggtggggacagggagtcaccggtcgcatgtgactgaactcttcaccccagtctgtggctttcccgttgcagtgagagccacgagccaaggtgggcacttgatgtcggatctcttcaacaagctggtcatgaggcgcaagggtaggaggcagggccgctgcccgccctgggccagcaccttgtaattctgtcctgcctttttcttcctgtatttaagtctccgggggctgggggaaccagggtttcccaccaaccaccctcactcagccttttccctccaggcatctctgggaaaggacctggggctggtgaggggcccggaggagcctttgcccgcgtgtcagactccatccctcctctgccgccaccgcagcagccacaggcagaggaggacgaggacgactgggaatcgtagggggctccatgacaccttcccccccagacccagacttgggccgttgctctgacatggacacagccaggacaagctgctcagacctacttccttgggagggggtgacggaaccagcactgtgtggagaccagcttcaaggagcggaaggctggcttgaggccacacagctggggcggggacttctgtctgcctgtgctccatggggggacggctccacccagcctgcgccactgtgttcttaagaggcttccagagaaaacggcacaccaatcaataaagaactgagcagaaaccaacagtgtgcttttaataaaggatctctagctgtgcaggatgcaaacgtctcggggtcagtgactgcctcctgcccctgttggtccctaggcagtgggggcagaagctcccagctgacctgtttctctgggatgagagggaggagagaagggcagtcagcaggggcagctgttgcagatgggaggaatagtctcccacaaaaaaggtttcagtgacagacacggggtctctaaaaatagtcatgctgagagcctaatggcccttggcacaattgctggtgttggggtagaagatgtcttggagtttgctcaagtggttgagagggagggaggtgccatcgacttggaggaactggcaccaagccagggagatagaaatccaggcaaggctgtggggcaggttagggagcaaggctgcaggaatgactcaggaagaaggtgggggaggtgacaagccccca

SEQ ID NO: 1299 - DNA, 393 bp, Homo sapiens
ccgtcacggaagggataagaagggagagagagtggatgccggggacacccagaagctgttattgtagtcaggatgtgacaggggtgaggctacagacaggggacttgcaagcagggagggcagggtgagacattcagaggaaacgacgacaggaaatggtgacagatagggaatgaggatgaagggaagggagagccagtgacgactggcagtggagtggggagcaccgccacctctcctcctccacttgcccctcctgtggcactggacaagttagtgggcttttcgttgtccatgggcttttttggtggggatgtgaccagctttgaacccttccccttaaacatgctcctcctgcacggaagagacaggggcaggggagagactctctcc

SEQ ID NO: 1300 - DNA, 10915 bp, Homo sapiens
ggcggcgggagcttccgggagggcggctcgcaggtaggaggcgtccggggccgcgggaagtagggtcgtgggggcctggcggggcgaagtaggggacccggaggggctggagggaggcgggcgggaggcccgggaccgttcctgaccgagaagcctgcgccaagctggtgttccgcggccgctgcccggtgcccggctccactgcgaacgccgccgctgggccccgaccgcccgggaggcgtcttgggctcgccccggagcttcctccctggagccgcgccctgcacccggccttgcccggccctagcagggaagccaaggcttgtggggcgcagggacccgggctctgcggggtcccggttccgcctccccactcctgcgtcttcccgcccctgccgggttctgggaagcctcgcgcggctcttccgcagctgctgcccgcccggagctcctggtccctcgtaggggaccccacttctctgacaccgcgttgggttcccggggcctacagcgaggcttgtaactccgggagagaccctggagcggggtgtgggagaacggtctggaggaagggctccgagcacttcgaaagtataaaccgcggtcccaaagaggcgtgctgtgtctgcattttcctgggagtgcacggtttacattctcgaaagcagtgctgtcgactagaaatattgagcgatacacatgtacaagttttgtcacttaaaaagaatttgaaaaaacttcatagatgcaaaaaaaaaaaaaacccaccattattaaagaatacttaggtatttgtggaatgcattgaagagttaacaaaatggataggcaggaaatatcgcagacctagaatgaattacagttacccactgtggaactgaggagctagggtttctcataaaactccctgatagaagacgacttttgataaatttttttttccgccaacaaaatcccctgtcttctcaactagttactgtctgtccactaaataagaggtggtccgtcacttcttcagatgagcaactacaggcttttcaaaagataattgctaatcaacccctttgtgcctgggttttcttatttgtaaaaatagatactactacctaactccaaagtgtgtggtgaagacaaacaattggggtgatgtatactaaagtaacgaaagtgttgaccacacactacgggctggttagtgttagattcccttgtttttccctcagtatcaaaaacagatctaatttaggtttacataaagacaaagtatgaagataaggtgacttacagttggtactactaacaaaatgtttgggctaagatttgcattattgcatgaaaacaacaaaacatatcaataaataacaaaaagcttggaattcagacgacagatccaagtctgggcttgatctcaagctagtgttttgatgttgaaaaaatgttatttggtctttctaaccccatttccttatgtaaaataggggatgatgataaattcactgataataagagttaaatgagattcttgaggagtcagaatggttctaacatgtgtaggtattattagcagtcatactgtagcataagaaaataccgtctgctgaaagagggacaataaagattatctacatggtcatcatttaaaagctaccagatataggaagaaggggccataaaatgataacgttatgatgattaattttgatgcttaggtcagagtccattctaggatatctgctgcccaaaaacagcagagactcatttctttggaatcacaggacgctgagtgagaggaaagaaaaagaaaagaaatatttaagtcacatatgtgatttctaaaagtaaaaagaaacagatgaaattagtgatatatttttaaaatccagtatatcccaaatatggttattttagcacgtaatcaatataaaataataagatattttacattctttttttctagcctttgaaatttggtgcatattttacacttatggcacatctcaattcagactatccacatttcaagtgctcagtggctgcatgtgcctggtggctaccatattggacagcacaggtctaaggatttcattcctgccacaagtccaaactcctagctttaattttgagtgtttttaacaaactggcctctgtttatcattctttcttctagtacttccccaaggatgattgtaccctcagcactcaagaccgcttgcggttcccctacacactttttgttcaagctgtttcttttacctggaatgctgtctttgcaccttcttcctggacctggttcaccctcgttgcctaggctggagtgccatggcgcgatcttggcacactgcaacctccaccttcccggttcaagtgattctccttcctcagcctcccgagtagcggggattacaggcatgcaccaccacgcctggctaattttgtatttttagtagagatggagtttcaccatgttggtcagactggtctcgaactcccgacctcaggtgatctgcctgccttcgcctcccaaagtgctgggattacaggcgtgagccgctgcgcccggccgagaggcacacattctgctaagagctttttcctgactcccctaactccaagagggatttgtcactccttagctttgtacccatgactggagtagaatgaatttaatttgagtttagttgtttttgagactctccctggctagtgtagtgtcttattcgtctttgttgtgatcatggcctgcacctaacagatgatcagtagatgtttgcagacagaaagtaaaccactcatcaggtgtattcagtcccattcttgaacgggcttgctgcctcctttttgaggagatctgtgtatgtactcttctttcacgcatatgtgtgagcaaacacacacacactaacaagaaattcatctgaagatgtgcacaggaaatatcttgcatctttaccccctttgtgatcttacatatgggagaactgaggcacagaaataagttaggacagccagcaaacttgcatcagtataaatacaaagaaggggagggaggaacatgcttgaaaggggtgtgctggtctcagagggttgggtttctcagttggctgggcatcagctggccatgctttagttatttgatgggaggaaaaataagtgggaggtgaggagtaactcctgggctctgatgagtattcaaggcaagtacagatctggaaagcctgtatgcaaaggaggaactcactgaaaagtgctggcctgaggagggcagaagggagggctggggaagccagcagcgggagcaaaggagtaggctccaactgggtgaagatgttggtgtggtgcgttatgtaaaatatacaaattattattggaaataaccacgtctcagcagtgctagttctcagtttggagaatgggaaatcgaaaggatcagattcagagacggcaacttactcaaggtcacagcattttaaacccaagtgaaatctcctaggcccttcatgccacactcatccatccctacctacttgtgttgcaaccaagggccccactgtagtgcctaggggagcaggtctagggcacagtgccaggcctgattaatgtcttccttaccattttccagtgaggggctgtgattaggcctatttataggggcctggtcccttaatattctgcctggtgcatctcttgccaatcaaatcagtgctgtctgcagtgtgattgctgctttagtggcaccagggagaggagttaattaaacccaatataaatagactctgccctcactttgcaattccaggagtgtttttccttcctgtcctccacccccacaggcacctctttcctcttgtccccctaagctctagcctgggtgagcagggctggatactcctatacctagagtcactagccactgcccagtctgtttcaggagcaggcctcagattcctcaggggttaaagtgggaagaacccgtgtgtgcacattttttgtgcttttccagaactgtgtaccatttggcagttgatcaggcaatctcccctgctaccccatttctacccctttgtttccagcctcttttttcctctgcaaccaaggtttcttgtttatccaaggtggggagctgaactgagacaaggtatggaaagggtgcctggcaggtagcaagcaccttgtagggggtcagaaatgttgcaccttctctgaactcctccattgaccctacagattccccagtcccgggccctgccctttccctcattcactcagcaggcatcagcagagtcccatctatgcgctcctggcctctcagcaaatgctctgtcccctactcccctatctgtgcaggctgaagctatgtgcatagttgggatgagggctgtgttgtctcaacaccacgctgccctgtggtgggggcgtgccggtggtcgtgggtggctctgacgctccggctccgacccacaggcaccatgactcctgtgaggatgcagcactccctggcaggtcagacctatgccgtgcccttcatccagccagacctgcggcgagaggaggccgtccagcagatggcggatgccctgcagtacctgcagaaggtctctggagacatcttcagcaggtgggtgctgccactcacccccacctgatgagagggccatccctgtcctgggcaatcccagcaacacaccctctgggagcagcccccttggggaatcccggtcctggggaacccatctggcttccctgtgtgggaggggctgaagtgagagcccaacttggaagcttttactcctgggagtccaagagctcactcccttccaccccacttagcctcctggtttcctgtggtggctctgctctcacaactcatgcttttcctcccattggagggcctattccttcacgttttcctgcagccaacaaatatttacccagcagtgctcgtgtgcaaggcagtgtgggaatctctatatatccagccacggataaggcaacatacctctccacctggagcgcacattctggcaggagagaaagacctaaataagcaatagatgattagttcttcaataacagttgtgacaaggtctattgataatattttgtaatcactaatattcatataaaccgtgcacaaccattgatttgagtgcattaactcacacttcatgagcaggcactgccgtcatctcattttatagatgaggaaactgaggcacagaagggctgagagacctggcctagtgacagagccaggattcaaagccatagatcatggccccgggttatgtaggttattactgcatctgttcaggggagatggggtactgtgaggctcgtcatgggaagcctggcttggtctcaggtcagggaaggcagacgtgaggaaatgacatttatggtaaagtctgagggttgagtgggtaggttgggaagaacattccagaaagaagcacatgaactacagcctggaggtggaggacctaaaaggaagccagcatggctggagcacggagtggccattgagggaggcgagctggagggctgcagcttcttgtattggcagtgctgacctcgcacagtccttgggctccagtgacttcactcagtgtttatctaacatgagtgagtgaatggtgtttgctctttttttggtaaaggtcccaggggttgtcgggtacacaggtcctgtctttggccataagcaaactgaaatgaggcttggtctccttcccaggatcccacaccatgcctcacatggtagaccccagtgggaagtatgtgactgcctgactcaggtgcctctcgtggtccaagccatccctgccctgtcccttccctggttgtcgccagacctggagcccctgctccttcactttgcagcctcctcttctgtcaccaactgggaacccacctcttcctgaaagtcctcccccactgactcaccggcttgccccgagtttgtcaagaatgtcccagtaaccaggggacacacagtgaagtgactgaggggttaccttggagttgatgccttggctcagatccagctcccctgttttcttcctctgtaaccttgggcaacccaacccctctaagcctcggtgttctcatttgtgaagttgtggtaataatggtagcttcctggtagaattattttaaatattaaattaatcaaaacatgcaaaggaatggaacagtgcctggcacttaggaagccttcaggaaatgctatctcttccctgttgataatcttgacccgtacactgcctttggttgccattcataaacctgccaccaatagtaacaaagtgctggatgcaccttttgtgcttatctttgtgctaaatgtgcccgagggacacctagggaagaggatgcaggtctttaagagccatcagctccagattatggccaccccatgtccagcacttagaatggaggccaaaaccattccctcggaaattgtgtttccttgccaagatggggactgcgtggttgcccttctctgagggcagcgctggatttttggcgtctttcctttcctgtcctggtacttggcaccttgtagacagttgcatgtcccctgcccagggatgggatgaggagagggcaggaaggcatttcctgggtagtggagtgctgcgttcattgagtgtgggttctccaagctgctggcacagcgcagggagggccagatgcctctcaggagccttgggcctgagtcctggctccctcactcctgggttccaggtcactgcatctgtctctccaccatgtgctccacctcgtgctggaccttaagagataccaattatgtggctgccactgtgtcctagaggctggaatgggaacacatagggcgagattgattgttaattgctagcatgaaccgcgtgggcttctcagggtctagagtggagagaaatcggtaagaattggtggcacgcctgtcagaactccccagaccaagctaagcaaaaattaaccaatcagtagagcagccttcggagtaagggctaaaatgatgtcctcagggcctggttttgctttccttccatgtcagtttgcttctttgggtctggctgcattcccagacaggccatgctctcgtggtagcaaggtgacatgacacagggtcaggtccagcaggaaagaatgctgtcctgtgtccccacttcctccagaagccacactcactcatcccacctggcttggtcctcatgtctatcccagaatccattaatggggccaggggactatgacacaccacttggcttagactgaggagctctgtgggcagccccacctgaagctctgggactaagcctgcgagagagatggattccccaagggaaatggggccattgcttgagtaaaaaggaaatagttgctgaagaggaaaaccacgtgcttactccacatagggcagactcctggaagaggggggcagggtagggaggtggatatgcaggttgccctggcagggtctggaaatgggggctgcaggcttggagggaggcctcagtgtggcttggaacgtggtgtatggtggtctgccgcgaaggccggcctgcacaggggtgggaggggggtgcttctgcatgggaagcacagacagcgctgcctctcccttgcactcagctctcggggcatgagaggctaactttccgtgagcctgtgggccaggcctctttgaatggggctgagggagctttgccctggttcctttgtgtccccacggtgccacgggaggctccctggcagggtgtggggcagggcagtgagtgaagagttgggatgagtgagttagggcccacggattactcaagacaggacttcaagttgattcaggcgtgttagggagctgtgattggattttgagcagggcagggatgggacagaagagtttggggaaggttcctcaggcatccgtcacagaagggacaagaagggagagagagtggatgccagggacacccagaagctgttattgtagtcaggatacgacaggggtgaggctacagacaggggacttgcaagcagggagggcagggtgagacattcagaggaaacgacgacaggaaatggtgacagatagggaacgaggatgaagggaagggagagccagtgacgactggcagtggagtggggagcaccgccacctctcctcctccacttgcccctcctgtggcactggacaagctagtgggcttttcgttgtccatgggctttttcggtggggatgtgaccagctttgaacccgtccccttaaacatgctcctcctgcacggaagagacaggggcaggggagagactctctccccaccacccggctcaggccccagcacagcccggcctctggcctcactggcgtctgtgcccagtgacgcaggcaggtgagctcctggcaaattagcattgcaggctgtgctctctcctcctgctctgctgcagctgggagtgtgcagagactggaggggatgacagtcaccctctgttttctgtggtggctctgttttctgtggtgctggatgcacctctgttttctgtggtggctccaagagagtgcacggtccctgctgattgaaagaaggatgaagggcagaagaggggcggggagctgtgtgccctaagatctcattgcctttttatgccgattaacatgcttttagcccctactgagcttatagttaacagaagtttccaggtctttcttcacctgaactgtgtctaaagcaagttccctccaccttctgtatttatacgcttgatttttaaaacctaaatgttgggcttcacatttgttccttgtaaatttcatcttggtgattgcagtctaccctctggcctttaaaaattgtctgagccttgattcgatcatgaaaccagcttacccttcccctgtgtgctggccccagttttctaaccaggtgttgaatgaactggatggactctgccagatccctccgtgcaaggctggaatcagtccattgttcaactgtgccctttggggctgtggttcatttggctctgatttttcctatatgttctctcctccaacccccatagctccatcttgtctacaagattttgttagaagccgtcaaaatcctgctgactcgagatgcgctgtggtgcatgttttccccgggcacagcaggctaataatcctgttacaaagagaaatgctgtacatttcgagcagtgctggcccctgggactcaccgtggccttttctaagtgcttacagactctctgtttaataatccattccagaaattttccagggctcattgttgagcttggtgttcgcaactttgagtgatcagcccttctcctttgtgggagcaccaggacagagcagcctttgtccctccccagtctcagttccctcccactgcccctgtggacctcgaatgcagagcttatgcacctaccgaaggtcgtgtcagcacccaaggcagaacgaggctgccctgggaactagggtcaattaagacagcttgtgctggaggaccctttacagcagatgaaggcctctccccagccagaaaagatggagcacacgctgggtggtggccccgcttcctcactggaaggagatggtgctcttcttttttctttctgaattgtggccaccttcataccagtctgtcatggaacacttaagtcgcttgagtgcctgctggtactcccagccctgccatgcctgagccccctgcacacaaggagccaggagtaatcagggcagaccctttagggcacggggacttctggattgtgaaattggctctctgggggccaaggccttctaacgttggtggaagtggctttggcttattgggtcggattctaggccattcattccaacctttagagacatcccagctttccctagcccagagtctgcagcccctccaccatcccacatcctccccctccctttcctcatgaaccccagtcgcgcctctgccttctcaaacccctccaccatcccacaccctcctcctgcccttcctcatgaaccccagtcgcgcctctgccttctcatccctgcgcaccacacaggctcgctcgtgcccggtgagtgctgaggctgctctgcacgtggagtatggccctgtgggcaagggctgggctcttggaggtaggggagctacaggggcgactgggaggaggatgtcgtgttacacacgcatcagagttaactttgcagtgagagcggccttgctgcggccaaagaacatggaaaagcatgagtggggtgatgtgccttaaagcatcagacacttgggcctcgggcatcaggagccagccacagggatgtctggggaaatggcgttccatgagatgcaagcacacaagaatgcacttggcacatctggggaacagcaggcagctgatatcactgggcccaccccgcaccagggaggatggaagcaggtgaggagctagaccacactgaggcggtggtcgggactcggggtttgctcagtgagccgttcactatgtgcaggggcagttccccgtctgaatttaggtgacgacactcaggtccagccttgccagtctcagcctccggtctccgttccccctctgcagaggccacattgtctgctgcacgtgatcatgaggggttgtgaagtgcttgccccatcagtagccatgtgtgcatgtgtaaataccatcctctgtgtgccctggaggctgtccttcagatagcatgtacaggtggcagcatagggcctgtccctactgagagtgcagggaactcagcaccgtcaactcctcgaccctgcaggtcagattatccttgtagaggccccctggatggcaccaagatcggccctggcaagtaggtgaccctgacttcagagcccttgcctgagggcctggcctggcagctctgctgttagaa

SEQ ID NO: 1301 - DNA, 15987 bp, Homo sapiens
cttcacaaaagtggactcatacgatatctgtagttttgcgtctggcttctctatttaattcttaaaggggggtgggaactaaacagatcacaagggagctgcccacagaggtaaagacaaggtcagataggctgagagacgcaggaaagcgggtcaatgtgtagggctggagggcaggggcgggccctgggcctgggctgggggtcctgccccggggcgcacccagggcgagggctgcccggaggagccgaggctggcggacagcttggccctgagcttgaggggaaggcagcgatgggacaaaggacggaggtctaggaagagggtctgcagagcagaaagcacgggtaggggcggcctgacgctcggaagacaacggatgggagccgtgtgcacgtcgggagctcggagtgagcgtgagttccgtgcccaggcccgcgactcggtccaccaggacagcgctccgggtcgacggggtcctggagccgcgctcggggagggcgcagcggagggtgagcggcggcgttaggacccggaggcgcgggcggaggtggcggggctaggacccagcggctccggcagagcggaagcggcggcgggagcttccgggagggcggctcgcgggtgaggaggcgtccggggccgcgggaagtagggtcgtgggggcctggcggggcgaagtaggggacccggaggggctggagggaggcgggcgggaggcccgggaccgttcctgaccgagaagcctgcgccaagctggtgttccgcggccgctgcccggtgcccggctccactgcgaacgccgccgctgggccccgaccgcccgggaggcgtcttgggctcgccccggagcttcctccctggagccgcgccctgcacccggccttgcccggccctagcagggaagccaaggcttgtggggcgcagggacccgggctctgcggggtcccggttccgcctccccactcctgcgtcttcccgccccggccgggttctgggaagcctcgcgcggctcttccgcagctgctgcccgcccggatctcctggtccctcgtaggggaccccacttctctgacaccgcgttgggttcccggggcctacagcgaggcctgtaactccgggagagaccctggagcggggtgtgggagaacggtctggaggaagggctccgagcacttcgaaagtataaaccgcggtcccaaagaggcgtgctgtgtctgcattttcctgggagtgcacggtttacattctgtaaagcagtgctgtcgactagaaattttgtgcgatacacatgtacaagttttgtcacttaaaaagaatttgaaaaaacttcatagatgcaaaaaaaaaaacccaccattattaaagaatacttaggcatttgtggaatgcattgaagagttaacaaaatggataggcaggaaatatcgcagacctagagtgaattacagttacccactgtggaactgaggagctagggtttctcataaaactccctgataggagacgacttttgataaaaatttttttccgccaacaaaatcccctgtcttctccactagttattgtctgtccactaaataagaggtggtccgtcacttcttcagatgagcaactacaggcttttcaaaagataattgctaatcaacccctttgtgcctgggttttcttatttgtaaaaatagatactactacctaactccaaagtgtgtggtgaagacaaacaactggggtgatgtatactaaagtaacgaaagtgttgaccacacactacgggctggttagtgttagattcccttgtttttccctcagtatcaaaaacagatctaatttaggtttacataaagacaaagtatgaagataaggtgacttacagttggtactactaacaaaatgggctaagatttgcattattgcatgaaaacaacaaaacatatcaataaataacaaaaagcttggaattcagacaacagatcaagtctgggcttgatctcaagctagtgttttgatgttgaaaaaatgttatttggtctttctaaccccatttccttatgtaaaattggggatgataaattcactgataataagagttaaatgagattcttgaggactcagaatggttctaacgtgtaagtattagcagtcatactgtagcataagaaaataccgtctgctgaaagaggaacaataaagattatctacatggtcatcatttaaaagctaccagatataggaagaaggggccataaaatgataacgttatgatgattaattttgatgcttaggtcagagtccattctaggatatctgctgcccaaaaacagcagagactcatttctttggaatcacaggacgctgagtgagaggaaagaaaaagaaaagaaatatttaagtcacatatgtgatttctaaaagtaaaaagaaacagatgaaattagtaatatatttttaaaatccagtatatcccaagtatggttattttagcatgtaatcaatataaaataataagatattttacattctttttttctagtctttgaaatttggtgcatattttacacttatggcacatctcaattcagactatccacatttcaagtgctcagtggctgcatgtgcctggtggctaccatattggacagcacaggtctaaggatttcattcctgccacaagtccaaactcctagctttaattttgagtgtttttaacaaactggcctctgtttatcattctttcttctagtacttccccaaggatgattgtaccctcagcactcaagaccgcttgcggtttccctacacactttttgttcaagctgtttcttttacctggaatgctgtctttgcaccttcttcctggacctggttcactcttgttgcctaggctggagtgccatggcgcgatcttggcacactgcaacctccacctccccggttcaagtgattctccttcctcagcctcccgagtagccgggattacaggcatgcaccaccacgcctggctaattttgtatttttagtagagatggagtttcaccatgttggtcagactggtctcgaactcccgacctcaggtgatctgcctgccttcgcctcccaaagtgctgggattacaggcgtgagccgctgcgcccggccgagaggcacacattctgctaagagctttttcctgactcccctaactccaagagggatttgtcactccttagctttgtactcatgactggagtagaatgaatttaatttgagtttagttgtttttgagactctccctggctagtgtagtgtcttattcgtctttgttgtgatcatggcctgcacctaacagatgatcagtagatgtttgcagacagaaagtaaaccactcatcaggtgtattcagtcccgttcttgaacgggcttgctgcctcctttttgaggagatctgtgtatgtactcttctttcacgcatatgtgtgagcaaacacacacacactaacaagaaattcatctgaagatgtgcacaggaaatatcttgcatctttaccccctttgtgatcttacatatgggagaactgaggcacagaaataagttaggacagccagcaaacttgcatcagtataaatacaaagaagggaagggaggaacatgcttgaaaggggtgtgctggtctcagagggttaggtttctcagttggctgggcatcagctggccatgctttagttatttgatgggaggaaaaataagtgggaggtgaggagtaactcctgggctctgatgagtattataggcaagtacagatctggaaagcctgtatgcaaaggaggaactcactgaaaagtgctggcctgaggagggcagaagggagggctggggaagccagcagggggagcaaaggagtaggctccagctgggtgaagatgttggtgtggtatgttatgtaaaatatacaaattattattgggaataaccacgtctcagcagtgcgagttctcagtttgaagaatgggaaatggaaaggatcagattcagagacggcaacttactcaaggtcacagcattttaaacccaaatgaaatctcctaggcccttcatgccacactcatccatccctacctacttgtgttgcaaccaagggccccactgtagtgcctaggggagcaggtctagggcatagtgccaggcctgattaatgtcttccttaccattttccagcgaggggctgtgattaggcctatttataggggcctggtcccttaatattctgcctggtgcatctcttgccaatcaaatcagtgctgtctgcagtgtgattgctgctttagtggcaccagggagaggagttaattaaacccaatataaatagactctgccctcactgtgcaattccaggagtgtttttccttcctgtcctctacccccacaggcacctctttcctcttggccccctaagctctagcctgggtgagcagggctggatactcctatacctagagtcactagccactgcccagtctgtttcaggagcaggcctcaaattcctcaggggttaaagtgggaagaacccgtgtgtgcgcattttttgtgcttttccagaactgggtaccatttggcagttgatcacgcaatctcccccgctaccccatttctacccctttgtttccagcctcttctttcctctgcaaccaaggtttcttgtttatccaaggtggggagctgaactgagacaatgtatggaaagggtgcctggcaggtagcaagcaccttgtagggggtcagaaatgttgcaccttctctgaactcctccattgaccctacagattccccagtccctggccctgccctttccctcattcactcagcaggcatcagcagagtcccatctatgcgctcctggcctctcagcaaatgctctgtcccctactcccctatctgtgcaggctgaagctatgtgcatagttgggatgagggctgtgttgtctcaacaccacgctgccctgtggtgggggcgtgccggtggtcgtgggtggctctgatgctccggctccgacccacaggcaccatgactcctgtgaggatgcagcactccctggcaggtcagacctatgccgtgcccctcatccagccagacctgcggtgagaggaggccgtccagcagatggcagatgccctgcagtacctgcagaaggtctctggagacatcttcagcaggtgggtgctgccactcacccccacctgatgagagggccatccctgtcctgggcaatcccagcaacacaccctctgggagcagcccccttggggaatcccggtcctggggaacccatctggcttccctgtgtgggaggggctgaagtgagagcccaacttggaagcttttactcctgggagtccgagagctcactcccttccaccccacttagcctcctggtttcctgtggtggctctgctctcacaactcatgcttttcctcccattggagggcctattccttcacgttttcctgcagccaacaaatatttacccagtagtgctcgtgtgcaaggcagtgtgggaatctctatatatccagccacggataaggcaacatacctctccacctggagcgcacattctggcaggagagaaagacctaaataagcaatagatgattagttcttcaataacagttgtgacaaggtctattgataatattttgtaatcactaatattcatataaaccgtgcaccaccattgatttgagtgcattaactcacacttcatgagcaggcactgccgtcatctcattttatagatgaggaaactgaggcacagaaaggctgagagacctggcctagtgacagagccaggattcaaagccatagatcatggtcctgggttatgtaggttattactgcatctgttcaggggagatggggtactgtgaggctcgtcatgggaagcctggcttggtctcaggtcagggaaggcagatgtgaggaaatgacatttatggtaaagtctgagggttgagtgggtaggttgggaagaacattccagaaagaagcacatgaactacagcctggaggtggaggacctaaaaggaagccagcatggctggagcacggagtggccattgagggaggcgagctggagggctgcagcttcttgtattggcagtgctgacctcgcacagtccttgggctccagtgacttcactcagtgtttatctaacatgagtgagtgaatggtgtttgctgtttttttggcaaaggtcccaggggttgtcgggtacacaggtcctgtctttggccataagcaaactgaaatgaggcttggtctccttcccaggattccacaccatgcctcacatggtagaccccagcgggaagtatgtgactgcctgactcaggtgcctctcgtggtccaagccatccctgccctgtcccttccctggttgttgccagacctggagcccctgctccttcgctttgcagcctcctcttctgtcaccaactgggaacccacttcttcctgaaagtcctcccccacggactcaccggcttgccccaagcttgtcaagaatgtcccagtaaccaggggacacacactgaagtgactgaggggttaccttggagttgatgccttggctcagatccagctcccctgttttcttcctctgtaaccttgggcaacccaacccctctaagcctcggtgttctcatttgtgaagttgtggtaataatggtagcttcctggtagaattattgtaaatattaaattaatcaaaacatgcaaaggaatggaacagtgcctggcacctaggaagccttcaggaaatgctatctcttccctgttgataatcttgacccgtacactgcctttggttgccattcatgaacctgccaccaatagtaacaaagtgctggatgcaccttttgtgcttatctttgtgctaaatgtgcccgagggaagcctagggaagaggatgcaggtctttaagagccatcagctccagattatggccaccccatgtccagcacttagaatggaggccaaaaccattccctcggaaattgtgtttccttgccaagatggggactgcgtggttgcccttctctgagggcagcgctggatttttggcgtctttcctttcctgtcctggtacttggcaccttgtagacagttgcatgtcccctgcccagggatgggatgaggagagggcaggaaggcatttcctgggtagtggagtgctgcgttcattgagtgtgggttctccaagctgctggcacagcgcagggagggccagatgcctctcaggagccttgggcctgagtcctggctccctcactcctgggttccaggtcactgcatctgtctctccaccatgtgctccacctcgtgctggaccttaagagataccaattatgtggctgccactgtgtcctagaggctggaatgggaacacatagggcgagattgattgttaattgctagcatgaaccgcgtgggcttctcagggtctagagtggagagaaatcggtaagaattggtggcacgcctgtcagaactccccagaccaagctaagcagaaattaaccaatcagtagagcagccttcggagtaagggctaaaatgatgtcctcagggcctggttttgctttccttccatgtcagtttgcttctttgggtctggctgcattcccagacaggccatgctgtcgtggtagcaaggtgacatgacacagggtcaggtccagcaggaaagaatgctctcctgtgtccccacttcctccagaagccacactcacccatcccacctggcttggtcctcatgtctatcccagaatccattactggggccaggggactatgacacaaccacttggcttagactgaggagctctgtgggcagccccacctgaagctctgggactaagcctgcgagagagatggattccccaagggaaatggggccattgcttgagtaaaaaggaaatagttgctgaagaggaaaaccacgtgcttactccacacagggcagactcctggaagaggggggcagggtagggaggtggatatgcaggttgccctggtggggtctggaaatgggggccgcaggcttggagggaggcctcagtgtggcttggaacgtggtgtatggtggtctgccgcgaaggccggcctgcacaggggtgggaggggggtgcttctgcatgggaagcacagacagcgctgcctctcccttgcactcagctctcggggcatgagaggctgactttccgtgagcctgtgggccaggcctctttgaatggggctgagggagctttgccctggttcctttgtgtccccacggtgccacgggaggctccctggcagggtgtggggcaaggcagtgagtgaagagttgggatgagtgagttagggcccacggattactcaagacaggacttcacgttgattcaggagtgttagggagctgtgattggattttgagcagggcagggatgggacagaagagtttggggaaggttcctcaggcatccgtcacggaagggataagaagggagagagagtggatgccggggacacccagaagctgttattgtagtcaggatgtgacaggggtgaggctacagacaggggacttgcaagcagggagggcagggtgagacattcagaggaaacgacgacaggaaatggtgacagatagggaatgaggatgaagggaagggagagccagtgacgactggcagtggagtggggagcaccgccacctctcctcctccacttgcccctcctgtggcactggacaagttagtgggcttttcgttgtccatgggcttttttggtggggatgtgaccagctttgaacccttccccttaaacatgctcctcctgcacggaagagacaggggcaggggagagactctctccccaccacccagctcaggccccagcacagcccggcttctggcctcactggcgtctgtgcccagtgacgcaggcaggtgagctcctggcaaattagcattgcaggctgtgctctctcctcctgctctgctgcagctgggagtgtgcagagactggaggggatgacagtcacccctctgttttctgtggtggctctgttttctgtggtgctggatgcacctctgttttctgtgttggctcccagagagtgcacggtccctgctgattgaaagaaggatgaagggcagaagaggggcggggagctgtgtgccctaagatctcattgcctttttatgccgattaacatgcttttagcccctactgagcttatagttaacagaagtttccaggtctttcttcacctgaactgtgtctaaagcaagttccctccaccttctgtatttatacgcttgatttttaaaacctaaatgggcttcacatttattccttgtaaatttcatcttggtgattgcagtctaccctctggcctttaaaaattgtctgagccttgattcgatcatgaaaccagcttacccttcccctgtgtgctggccccagttttctaaccaggtgttgaatgaactgccagatccctccgtgcaaggctggaatcagtccattgttcaactgtgccctttggggctgtggttcatttggctctgatttttcctatatgttctctcctccaacccccatagctccatcttgtctacaagattttgttagaagccgtcaaaatcctgctgactcgagatgcactgtgctgcatgttttccccgggcacagcaggctaataatcctgttacaaagagaaatgctgtacatttcgagcagtgctggcccctgggactcaccgtggccttttctaagtgcttacagactctgtttaataatccattccagaaattttccagggctcattgttgagcttggtgttcgcaactttgagtgatcagcccttctcctttgtgggagcaccaggacagagcagcctttgtccctccccagtctcagttccctcccattgcccctgtggacctcgaatgcagagcttatgcacctactgaaggtcgtgtcagcacccaaggcagaatgaggctgtcctgggaactagggtaaattaaaacagcttgtgctggaggaccctttacagcagatgaaggcctctccccagccagaaaagatggagcacacgctgggtggtggccccgcttcctcactgaaaggagatggtgctcttcttttttctttctgaattgtggccaccttcataccagtctgtcatggaacacttaagccgcttgagtgcctgctggtactcccagccctgccatgcctgagccccctgcacacaaggagccaggagtaatcagggcagacccattagggcacggggacttctggattgtgaaattggctctctgggggccaaggccttctaacgttggtggaagtggctttggcttattgggtcggattctaggccattcattccaacctttagagacatcccagctttccctagcccagagtctgcagcccctccaccatcccacatcctccccctccctttcctcatgaaccccagtcgcgcctctgccttctcaaacccctccaccatcccacaccctcctcctgcccttcctcatgaaccccagtcgcgcctctgccttctcatccctgcgcaccacacaggctcgctcgtgcccggtgagtgctgaggctgctctgcacatggagtgtggccctgtgggcaagggctgggctcttggaggtaggggagctacaggggcgactgggaggaggatgtcgtgttacacacgcatcagagttaactttgcagtgagagcggccttgctgcggccaaagaacatggaaaagcatgagtggggtgatgtgtgccttaaagcatcagacacttgggcctcgggcatcaggagccagccacagggatgtctggggaaatggcgttccatgagatgcaagcacacaagaatgcacttggcacatctggggaacagcaggcagctgatatcactgggcccaccctgcaccagggaggatggaagcaggtgaggagctagaccacactgaggcggtggtcgggactcagggtttgctcagtgagccgttcactatgtgcaggggcagttccccgtctgaatttaggtgacgacactcaggtccagccttgccagtctcagcctccggtctccgttccccctctgcagaggccactttgtctgctgcacgtgatcatgaggggctgtgaagtgcttgccccatcagtagccatgtgtgcatgtgtaaataccatcctctgtgtgccctggaggctgtccttcagatagcatgtacaggtggcagcatagggcctgtccctactgagagtgcagggaactcagcaccgtcaactcctcgaccctgcaggtcagattatccttgtagaggccccctggatggcaccaagatcggccctggcaagcaggtgaccctgacttcagagcccttgcctgagggcctggcctggcagctctgctgttagaagcaggaggtgtgcagggggtggggagcagcccagcctctgtgatcttctccatggcaggatctcccagcaggtagagcagagccggagccaggtgcaggccattggagagaaggtctccttggcccaggccaagattgagaagatcaagggcagcaagaaggccatcaaggtagtccccatgcccctgtgtcctgaggctactgggcagtccctccatttccccgtgcctctgaggctgcccagtctctgccctgctgcccacctgtaccttgggctttcttctcgcccaggctcccaactccaccctcttcctgccaagcaatcctagccctctgagcctcttggggccccctcagacttgtccctgtgtccacaggtgttctccagtgccaagtaccctgctccagagcgcctgcaggaatatggctccatcttcacgggcgcccaggaccctggcctgcagagacgcccccgccacaggatccagagcaagcaccgccccctggacgagcgggccctgcaggtctgctggctgcgcacataacttagcctgtcacacaccaggaggactggatgctggggaggagccggggccaccatagggttctgtcccccagaggaggctgactgggatggggtggcagctgattaggcccagcaccaaatattcaccatcccttggccatcctggccctcccaggagaagctgaaggactttcctgtgtgcgtgagcaccaagccggagcccgaggacgatgcagaagagggacttgggggtcttcccagcaacatcagctctgtcagctccttgctgctcttcaacaccacctagaacctgtatggccagaaggcagggccgaggggtgtgggcgggaggcccggcctggcttagtggggacccagggcatcagacacaggtacagcacatgggccaggagccagggggtgactggggtggctcggctcgggaggcttgggaccccaagtgcacgctgtgcccctgatgatgtgggagaggaacatgggctcaggacagcgggtgtcagcttgcctgacccccatgtcacctctgtaggtacaagaagtatgtcttcctggaccccctggctggtgctgtaacaaagacccatgtgatgctgggggcagagacagaggagaagctgtttgatgcccccttgtccatcagcaagagagagcagctggaacagcaggtgggaggggtgggacagaggtggagacaggtgcagtggcccagggccttgccagagctcctctccagtcaaggctgttgggccccttattccacccatgggaggtgcacacaaggtcttgttggctgcccctgcaggtccctgtcacctctcacatgtccctgcctaatcttgcaggtccctgagaactacttctatgtgccagacctgggccaggtgcctgagattgatgttccatcctacctgcctgacctgcccggcattgccaacgacctcatgtacattgccgacctgggccccggcattgccccctctgcccctggcaccattccagaactgcccaccttccacactgaggtagccgagcctctcaaggtaggtgagctgggttctgggatgggagctgggccggggacctccctgctcacacaccttcttccctagacaccccacactttgtgtttcagacctacaagatggggtactaacaccacccccaccgcccccaccaccacccccagctcctgaggtgctggccagtgcacccccactcccaccctcaaccgcggcccctgtaggccaaggcgccaggcaggacgacagcagcagcagcgcgtctccttcaggtgggagcagctctttgaggccacctgatttctggcgtgctcagtgcactcgggtggattttctgtgggtttgttaagtggtcagaaattctcaattttttgaatagtttccatttcaaatatcttgttctacttggttcataaaatagtggctttcaaactgtagagctctggacttctcacttctagggcagagggagcctgaacaagtgaggctctgggttcctcattcctaattaaaccaatggaaagaaggggtctaataacaaactacagcaacacatttttcatttcagcttcactgctgtatctcccagtgtaaccctagcatccagaagtggcacaaaacccctctgctggctcatgtgtgcaactgagactgtcagagcatggctagctcaggggtccagctctgcagggtgggggctagagaggaagcagggagtatctgcacacaggatgcccgcgctcaggtggttgcggaagtcagtgcccaggccccacacagtcttcaaaggtctggcctccccagcgtggggctcctcgtttgaggggaggtgacttccctcccagcaggctcttggacacagtaagcttccccagccctgcctgagcagcctttcctccttgccctgttccccacctcccggctccagtccagggagctcccagggaagtggtcgacccctccggtggccgggccactctgctagagtccatccgccaagctgggggcatcggcaaggccaagctgcgcagcatgaaggagcgaaagctggagaagaagaagcagaaggagcaggagcaaggtgagcgggccctggagcctgcggtcggagggccttgggcaagatcgcctcctcccctccagccctgagtccaccgggtgctttctgcccaacccctgctcttgccagctggcccctgcttcccctagggcacatgctggaagccctgggctgccaccagaggtcctcagccctcctgcctgggctatggctccttcctggtttgggagccatagtggagctttcctctctaagctcacccagctcaaactgtgacaggagaatcttcttcgactgccaagagcggtccaaggcaatggtcagccactgcagcctcctgagatatttttagagactggacctgaggcctctggaggctactgatgatgcctgctgtgaacgcagacactggtgtgatgcgatgcctgcgcctgcagcggcagtgccctgggcactatggttttgagcttgtacccagcgctgcttttgccttgctctgtgaccccaggcaagctgcctcacctctctgggccagtttccccatcgtacagtggtgctgcacaccctggccctgtccccgaggtggctgggaggtggctcctcaaacagccgctttctcatcagtgcccagtgctgggtcagggatcgactgaggctctgagctaactgggaaacacagtggccttggagggctggggagtgtcatgggggtggggacagggagccaccggtcgcatgtgactgaactcttcaccccagtctgtgactttcccgttgcagtgagagccacgagccaaggtgggcacttgatgtcggatctcttcaacaagctggtcatgaggcgcaagggtaggaggcagggccgctgcccgccctgggccggcacattgtaattctgtcctgcctttttcttcctgtatttaagtctccgggggctgggggaaccagggtttcccaccaaccaccctcactcagccttttccctccaggcatctctgggaaaggacctggggctggtgaggggcccggaggagcctttgcccgtgtgtcagactccatccctcctctgccgccaccgcagcagccacaggcagaggaggacgaggatgactgggaatcctagggggctccatgacaccttcccccccagacccagacttgggccgttgctctgacatggacacagccaggacaagctgctcagacctgcttccctgggagggggtgacggaaccagcactgtgtggagaccagcttcaaggagcggaaggctggcttgaggccacacagctggggcggggacttctgtctgcctgtacttcatggggggacggctccacccagcctgcgccactgtgttcttctcttaagaggcttccagagaaaacggcacaccaatcaataaagaactgagcagaaaccaacagtgtgcttttaataaaggacctctagctgtgcaggatgcaaacgtctcggggtcagtgactgcctcctgcccctgttggtccctaggcagtgggggcagaagctcccagctgacctgtttctctgggatgagagggaggagagaagggcagttagcaggggcagctgttgcagatgggaggaatagtctcccacaaaaaaggtttcagtgacagacacggggtctctaaaaatagtcatgctgagagcctaatggcccttggcacaattgctggtgttggggtagaagatgtcttggagtttgctcaagtggttgagagggagggaggtgccatcgacttggaggaactggcaccaagccagggagatagacatccaggcaaggctgtggggcaggttagggagcaaggctgcaggagtgactcaggaagaaggtgggggaggtgacaagccccca

SEQ ID NO: 1302 - DNA, 1612 bp, Homo sapiens
cattcatgaacctgccaccaatagtaacaaagtgctggatgcaccttttgtgcttatctttgtgctaaatgtgcccgagggaagcctagggaagaggatgcaggtctttaagagccatcagctccagattatggccaccccatgtccagcacttagaatggaggccaaaaccattccctcggaaattgtgtttccttgccaagatggggactgcgtggttgcccttctctgagggcagcgctggatttttggcgtctttcctttcctgtcctggtacttggcaccttgtagacagttgcatgtcccctgcccagggatgggatgaggagagggcaggaaggcatttcctgggtagtggagtgctgcgttcattgagtgtgggttctccaagctgctggcacagcgcagggagggccagatgcctctcaggagccttgggcctgagtcctggctccctcactcctgggttccaggtcactgcatctgtctctccaccatgtgctccacctcgtgctggaccttaagagataccaattatgtggctgccactgtgtcctagaggctggaatgggaacacatagggcgagattgattgttaattgctagcatgaaccgcgtgggcttctcagggtctagagtggagagaaatcggtaagaattggtggcacgcctgtcagaactccccagaccaagctaagcagaaattaaccaatcagtagagcagccttcggagtaagggctaaaatgatgtcctcagggcctggttttgctttccttccatgtcagtttgcttctttgggtctggctgcattcccagacaggccatgctgtcgtggtagcaaggtgacatgacacagggtcaggtccagcaggaaagaatgctctcctgtgtccccacttcctccagaagccacactcacccatcccacctggcttggtcctcatgtctatcccagaatccattactggggccaggggactatgacacaaccacttggcttagactgaggagctctgtgggcagccccacctgaagctctgggactaagcctgcgagagagatggattccccaagggaaatggggccattgcttgagtaaaaaggaaatagttgctgaagaggaaaaccacgtgcttactccacacagggcagactcctggaagaggggggcagggtagggaggtggatatgcaggttgccctggtggggtctggaaatgggggcgcaggcttggagggaggcctcagtgtggcttggaacgtggtgtatggtggtctgccgcgaaggccggcctgcacaggggtgggaggggggtgcttctgcatgggaagcacagacagcgctgcctctcccttgcactcagctctcggggcatgagaggctgactttccgtgagcctgtgggccaggcctctttgaatggggctgagggagctttgccctggttcctttgtgtccccacggtgccacgggaggctccctggcagggtgtggggcaaggcagtgagtgaagagttgggatgagtgagttagggcccacggattactcaagacaggacttcacgttgattcaggagtgttagggagctgtgattggattttgagcagggca

SEQ ID NO: 1303 - DNA, 1795 bp, Homo sapiens
ttcttcgggattcccctgttttctccaacgggcactaatgcctgtgcctgggtcctggcaacactctggactccacactctcctgggtttcacctttgtagcaggatccctgcagaccaggcccatgacaaacaccgtctccagcgggcagagcaaaggaagggcacagcgccaggcagtggtgcagctgcctgtcaggaagaggcctacttctggtgaaactgggcagacaaaaggcagtgagaaatgtgatctcggggtggtggaggctctagggaaaggaaaaggcaggagtgaacttccacacagcagcaatggcagaaccaaaggtggctttgacctccaccagggctcagatccaggccaacagcgtgtccaggacagggtgccgggtgtatcactggtccaggagcactatgctggcagaatccctttggtgcctgatggccctgccttcgtgggaacagaggctaaggctttgagttacagctgcctccccaacagtgcatccccttctccttcctcagcctcaggtaggagacagggcaggcaacctcactttcctcttctccccttctccagcccctgtctgtcgacccagctggaggcagccaggcttgcctatggactggttgacagccttcatgcacaggttctccaccagagcctttcttgggggcccctggcctgggctctgagctgggagtgaaggggatgacccatgcagactgtttgctgcttgtagctttccctgggaaagactctgccaggccttggagccagactaggaggctttataggccaccgcaagcagcagggctccagatgacatcacagggaagatcaagagggtgtggaggggcatcgaagcctctccaggagacaggagacgccggccccgtagagccctagggcgtcgcactcccactcactgtctactctcctctcacctctgcaacactggggacactcacaagagtgtgatccaagtcggccgtcgtcttctgcagctctggagacctgatgctggggaagggcatgcctggcatcaccacacacctggggggagacaggagcctggggccggtgggcccacacatcaccagctgctccgttctaccatttcttcagccctcttggctgtgcctgcggctctgcccctcccgtctctgcacctaccacccagagagggcttgttgagctcagagatcccacctaggccaatccactgggttctgtggcagcgatggcctgcctgatcttccacctgctctcccagggccaaagccagacctgctgagcccctccctccagccggctggtctgagcagtcacagcccggctttgggctccgatggcagcagacggcaggtaggggtccagctgctggagcgagggccggccacgtatcacagccaaggagatgagcacaagcactacttactggcctaggttgtgagagaagttgatgctctcactcatctttcctccaatctttcccctatgcctggttgtggtattaagttacatgcagacaacaggggccagaagatgaacaatggcccatcccactctaggcatggctcctctccacaggaaaactccactccagtgctcagcttgcaccctggcacaggccagcagttgctggaagtcagacacctgcagatgaagaccacagcatcaagaccctgtgacctctcaaaggcccggtggaaaggacacgggaagtctgggctaagagacagcaaatacacatgaacagaaagaagaggtcaaagaaaaggctgacggc

SEQ ID NO: 1304 - DNA, 260 bp, Homo sapiens
ctggaggggatgacagtcacccctctgttttctgtggtggctctgttttctgtggtgctggatgcacctctgttttctgtgttggctcccagagagtgcacggtccctgctgattgaaagaaggatgaagggcagaagaggggcggggagctgtgtgccctaagatctcattgcctttttatgccgattaacatgcttttagcccctactgagcttatagttaacagaagtttccaggtctttcttcacctgaactgtgt

SEQ ID NO: 1305 - DNA, 385 bp, Homo sapiens
cttcacaaaactggactcatacgatatctgtagttttgcgtctggcttctctattgaattcttaaaggggggtgggaactaagcagatcacaagggagctgcccacagaggtaaagacaaggtcaggtaggctgagagacgcaggaaagcgggtcaaggcgtagggctggagggcaggggcgggccctgggcgtgggctgggggtcctgccccggggcgcaccccgggcgagggctgcccggaggagccgaggttggcggacagcttggccctgagcttgaggggaaggcagcgatgggacaaaggacggaggtctaggaagagggtctgcagagcagaaagcacgggtaggggcggcctgacgctcggaagacaacgcatggga

SEQ ID NO: 1306 - DNA, 569 bp, Homo sapiens
gactttaaaatcatacatttatccctcacagttctggaggcttggaagtccaagttcaaggtggcagctggacgggttcctggtgagggctctcttcctggtttgcagacagccaccttctcttcgcatcctcacttggtgggaaaagacagaggagagaaagagagagagagaaatgagatagagagagagagagaaatgagatagagatagagagagagagagagagagagagagagagagggagacagagagacaatgctctcttttcttaccagatctataatgagggccccaccccatgacctcatctaaccgtaattacctaccaaaggcccatctccacataccatcacattaggggttagggtttcaacataagaatttggagaggacataaacattctgtctacaacatgagtggagatccatctcttccttacctctggtaaggggaccacacgctgcagccagtgagacagtggcatgttcttgttacaactcaatctaactcccccagaagaggaggcagggaaggcggacaaaactgggagagggagagagtgtta

SEQ ID NO: 1307 - DNA, 1795 bp, Homo sapiens
ttctttgggattcccgttttctccaacgggcactaatgcctgtgcctgggtcctggcaacactctggactccacactctcctgggtttcacctttgtagcaggatccctgcagaccaggcccatgacaaacaccgtctccagcgggcagagcaaaggaagggcacagcgccaggcagtggtgcagctgcctgtcaggatgaggcctacttctagtgaaactgggcagacaaaaggcagtgagaaatgtgatctcggggtggtggaggctctagggaaaggaaaaggcaggagtgaacttccacacagcagcaatggcagaaccaaaggtggctttgacctccacgagggctcagatccaggccaacagcttgtccaggacagggtgccgggtgtatcactggtccaggagcactatgctggcagaatccctttggtgcctgatggccctgccttcgtgggaacagaggctaaggctttgagttacagctgcctccccaacagtgcatccccttctccctcctcagcctcaggtaggagacagggcaggcaaccccctttcctcttctccccttctccagcccctgtctgtccacccagctggaggcagccaggcttgcctatggactggttgacagccttcatgcagaggttctccaccagagcctttcttgggggcccctggcctgggctctgagctgggagtgaaggggatgacccatgcggactgtttgctgcttgtagctttccctgggaaagactctgccaggccttggagccagaccaggaggctttataaggccaccgcaagcagcagggctccagatgacatcacagggaagatcaagagggtgtggaggggcatcgaagcctctccaggagacaggagacgctggtccagtagagccctaggggcgacgccactcccactcactgtctactctcctctcacctctgcaacactggggacactcacaagagtgtgatccaagtcggccgtcgtcttctgcagctctggagacctgatgctagggaagggcatgcctggcatcaccacacacctggggggagacaggagcctggggccggtgggcccacacatcaccagctgctccgttctaccatttcttcagccctcttggctgtgcctgcagctctgcccctcccctctctgcacctaccacccagagagggcttgttgagctcagagatcccacctaggccaatccactgggttctgcggcagcgatggcctgcctgatcttccacctgctctcccagggccaaagccagacctgctgagcccctccctccagccggctggtctgagcagtcacagcccggctttgggctccgatggcagcagacggcaggtaggggtccagctgctggagcgagggccggccacctatcacagccaaggagatgagcacaagcactacttactggcctaggttgtcagagaagttgatgctctcactcatctttcctccaatctttcccctatgcctggttgtggtattaagttacatgcagacaacaggggccagaagatgaacaatggcccatcccactctaggcatggctcctctccacaggaaaactccactccagtgctcagcttgcaccctggcacaggccagcagttgctggaagtcagacacctgcagatcaagaccacagcatcaagaccctgtgacctctcaaaggaccggtggaaaggacacgggaagtctgggctaagagacagcaaatacacatgaacagaaagaagaggtcaaagaaaaggctgacggc

SEQ ID NO: 1308 - DNA, 5792 bp, Homo sapiens
  SITE (150): n equals a,t,g, or c
tccatggtgacggggcgccaggctagggcggcctggccactgagccggggtgcagtggcagcgggagagtacctggcgatggcgatatgagcggtgcgggggtggcggctggacgcggccccccagctcgccgaccccgggctctcgcgnccggccaggcccctctgtgggcgtccagtccttgaggccgcagagcccgcagctcaggcagagcgacccgcagaaacggaacctggacctggagaagagcctacagttcctgcagcagcagcactcggagatgctggccaagctccatgaggagatcgagcatctgaagcgggaaaacaagggtgagccggcgcgggccctaggccgccctgcctccccaggcacactcaacactgccgctcccgcagcacagaaacacagccatcaactccagcacacgcctgggctcagggggaacacaggacggtaagcccgccctgccacgctgagctgtcccctcctcccagagggagacccgcgtggcccccgggcagtgccgaacctgtctgcctgtctcctagggcagcagcatttcagatgctgactccgccagtcctctcctctccaagcagggtcagacacacctctgttaaaaactttatagaggggcccgggcgcggcggctcacgcctgtaattccagcactttgggagaccgagacgggcggatcgcgaggtcaggagatcgagaccatcctggctaacacggtgaaaccccgtctctactaaaaatacaaaaagttagctgggtgtggtggtgggcgtctgtagtcccagctactcgggaggctgaggcaggagaatggcgtgaacccgggaggcggagcttgcagtgagccgagatcttgccactgcactccagcctcggtgacagagcgagactccgtctcaaaaaaaacaaaaacaaacaaacaaaaactttatgcagggaaacgtgcccaagtgcgagtgcgcagctcagtgaatttcttccagctaaacacatcggatcaggagcaggcattcccccgccccccaccccgtccccgcttcgcctgtgcccatgctgtcctccggcggggccttcccaactgcacccttagctgctcctcacccccacgcccccctttctccctccctcctcccccacccctcctgccccgagcaggaggagggcccgccaggatgtgggatgtggctccgctcctcgctcttgcttcaggagggctccagcaagggcaccagtgcccgcggcctcctctcccgccccgttccctgctgctgccttacctgagtgccgagtatcccatcaccaggcgtctgttttgtcaggaccccgcttccccatgtcttcttgagcctcaggacgccccgttcctcatatcttcttgagcctccccccagtccctgatgcccacgggatcatgacaccgccatagccagggattccagagttcacctctgtacccctaaagcccaggttctgcctggcagtgtggacgccctccagtcatctcagatggatgaggctgatatgccaggtgggctctgcctagggaacaggcaggggcactcctggcctgacacccacgacaaaggcatggtggagagcgggatccatggggcagggcccaatcagccagtgggggggcaggactttcgggctcagcagccaggagaggacaggccaggcttcttctctcagaatggctgtggtttcacaagtgctgaggagagcgtgtgcttgctttcagatctccgttacaagctcataatgaatcagacatcacagaagaaaggtgagaactgggcccttcagttcctgatgggatgctcttgccacccaggggagcccctccagactgtccttgcccacctggctgcactggcccctgtatgccaacccagtggggacaggttctgggggacctggacagatgccgctacctctagccgtggctggatgatgttacgcagccaagcacagcacgtgctgctctcaggaagcccagggcctgaggtcattgcagtggggaggtgggcacagggtgctccccagacctccctcctccaagtagagctgaaatgggaaggaacccctgggacagcccctgccctgctagatctttgcctcagattgctgctgtggccaggcccaggatctccagccctatggctctgagtcctgacatgctgggggcccaggggctctggacacactccatccagggatcccttcctgccatctgggcagcaaccatggggacaaagggaggaagcagagtcctgtttccttgccacttgtccaaggcacttccccatcctgacagcggcccccacccagcccaggattctgggttgtggtctcgagctcacttcccgttatctttggggctggggctgacatcaggaggacatctgactggtggatggagccagcctgggaacatcgtagctggggcagtgcctagggctctcccttcccagagagacatggagaatggggttgagggagggcccttccctagccgctgtggcaactccagtgagctgttctgggcaaagtgtggcccaagtcggcagccccagccctgcagtgctggggacgctgacaggacacgggaagaggccatgctctccctcgggacctgctgttccatgtgtcccaagccctcctgctttccagatggcccctcaggaaaccacctttccagggcctctgctcccttgggcgctcgctgggtctgcatcaacggagtgtgggtagagccgggaggacccagccctgccaggctgaaggagggctcctcacggacacacaggccaggaggcaagcatgggcgtcttgcgggcggtagcgccgacactgtgcgctctcctgcagacagcctctccacgtcaagcttccagtctgtcaagtccatctctaattcaggtgagcaggctggcgtccatgtgctcacaggggtgagtgccccacggggaccccagcctgggtggcctctaggggtgctgaccaggtaccctctgctgggccaagctccaggatttggggatgaaggtgcagctgaaaagagccctgcaagctgaagccaccgggaggggattaagggggggtgggcaggaccagggaccagtcacagggcagtaaggcctcacagcaggcaccccagggtggggcagcaagcaggcaggaggggcctccccgggtggccgcctagggaggacgtaccctggctgcccagcagcagccctgcttggccgtgtccccgccacaagcaggcaggacacaggagggatggcactgcccacggagccctgggctcatggcaccttctgcagagtgaactgggagcagagagcctcttttccccactctgtgaggccgggcattttcctcagcccagccctaaccctcaccattcctgtgatgggcccaggtgctggacgggccttgtccttgccgaggaaacccatgcaggctgggtcccaagcctctcatgcagtttcattttacccaagatggggccagcttccactatgttgattgttctagagtgttcacaggcaccacccatgggcttcaccctcagaaccacattgattccccccagaaccctccaaggcaggcttccctttacagaggaggaaactgaggcagggacaggggcttcttgggtacacacagctgttcctggaaaacttgggcggtgactgttggtgcctgcagtgaccggccttgtagggtctgacttgcagccaactctcaaggcaaggccaggccccagcccggctccttcaacaagcaagattcaaaagctgacgtcccccagaaggcggacctggaagaggagcccctacttcacaacagcaagctggacaaggttcctggggtacaagggcaggccaggtaaggcttgggtgttcctggggtgcaagggcaggccaggtaagtcttgcctgcaccctaagggccccatgactacatttactaggctcacgccctgcagtcagccaactgctctgcccctagctccaggggcctgtctccagggctcatgatagcagatgacggccacgctctacccatcggtgggcgctgtcttcctcccttcccctgggggtcctgcagagtacctgtgctgacctgagcccacgagggggccagtagcggcccctaaaccacttcctcagagaaaagtaaagtaatattctgaccaagagaaggcttgctgcccctggccacagcctgcctttggagggcactaggccagcaggtcagagtaggaacaggttctggtgatccctgagtttgcgggactgccctgagatgctacagagcgcacactttcagcagcgcaaccagcaggacaggctcctgcatctgcacatcccgagaccaggcctggagcaagatgccccactgggtgtggggtcacgatcaagagcagcctggcagctagctggtcacccactgaagcccatctgacccttagggcaccttcagaggggagaaagggacaggccccagtcccagagacccccacctggtgcccagagcaccctgctcagtgggagaggggaaccaggccctcttccccacattggcctgggcgctgcctggggaggtatgctgggtgggtggttagacgcacctgggcaggtcacctctggctgctgcaatgactgtttcagaaaggagaaagcagaggcctctaacgcaggagctgcctgtatggggaacagccagcaccagggcaggcagatgggggcggcggcacaccccccaatgatcctgccccttcccctgcgaaagcccaccacacttaggcagtgcgaagtgctcatccgcgagctgtggaataccaacctcctgcagacccaagaggtgaggccctgggtggtgggggtggccctgggcagtctggcaccgccacaggccccaccacgcccctgcccctgcctttcagctgcagcacctcaagtccctcctggaagggagccagaggcccaggcagtcccggaggaagctagctttcccaggtgagtgcctggtgcacccctgccccatccctgggggcctatccacagctcactgctgactcttccttcacccagggaccaagaagccacgcatttccccaaggtctccaccaagagcctctccaagaaatggtaagtcccacaggcatggggacagtggggcagccctgcagcctgggccccagggagggagtggggaagggagcgtggcagcgcagaagcggagctcgctgaggcctctctgtgcccccgtgagggccatgcaggccgcactccccacacactccactcgcgaggatgctcacggtgacagtccctctacccgcccccagcctgcttctgagcccacctgtggcggagcgtgccatcctgcccgcactgaagcagaccccgaagaacaactttgccgagaggcagaagaggctgcaggcaatgcagaaacggcgcctgcatcgctcggtgctttgagctacccgcatctggtcagtgccaggcccaccaacctgcagctggagattggctctctatagcatttcctgacacttccgctacttttaggcctggctaaattccaagatagataacactcaagatagataaagtacttgatctccaaactgacaaactgtttattttctagctgttattttgctatttggcatttacataaaagcacacgatgaagcaggtatcgccttacctgttgaaactgaaaataaagcttgtttatttccaagttgt

SEQ ID NO: 1309 - DNA, 5788 bp, Homo sapiens
  SITE (2041): n equals a,t,g, or c
  SITE (2044): n equals a,t,g, or c
  SITE (2051): n equals a,t,g, or c
  SITE (4926): n equals a,t,g, or c
tccatggtgacggggcgccaggctagggcggcctggccactgagccggggtgcagtggcagcgggagagtacctggcgatggcgatatgagcggtgcgggggtggcggctgggacgcggccccccagctcgccgaccccgggctctcggcgccggcgccagcgcccctctgtgggcgtccagtccttgaggccgcagagcccgcagctcaggcagagcgacccgcagaaacggaacctggacctggagaaaagcctgcagttcctgcagcagcagcactcggagatgctggccaagctccatgaggagatcgagcatctgaagcgggaaaacaagggtgagccggcgcggggccctaggccggccctgcctccccaggcacactcaacactgccgctcccgcagcacagaaacacagccatcaactccagcacacgcctgggctcagggggaacacaggacggtaagcccgccctgccacgctgagctgtcccctcctcccagagggagacccgcgtggcccccgggcagtgccgaccctgtctgcctgtctcgtagggcagcagcatttcagatgctgactccgccaatcctctcctctccaagcagggtcagacacacctctgttaaaaactttatagaggggcccgggcgcggcggctcacgcctgtaattccagcactttgggaggccgagacgggcggatcacgaggtcaggagatcgagaccatcctggctaacacggtgaaatctcgtctctactaaaaatacaaaacaattagctaggcgtggtggtgggcgtctgtagtcccagctactcgggaggctgaagcaggagaatggcgtgaacccgggaggcggagcttgcagtgagccgagatcttgcgactgcactccagcctcggtgacagagcgagactccgtctcaaaaaaacaaaaacaaaaactttatacagggaaacgtgcccaagtgcgagtgcgcagctcaatgaatttcttccagctaaacacatcggatcaggagcaggcattcccccgccccccaccccgtccccgcttcgcctgtgcccatgctgtcctccggcggggccttcccaactgcacccttagctgctcctcacccccacgcccccctttctccctccctcctcccccacccctcctgccccgagcagaaggagggcccgccaggatgtgggatgtggctccgctcctcgatcttgcttcaggagggctccagcaagggcaccagtgcccgcggcctcctctcccgccccgttccctggtgctgccttacctgagtgccgagtatcccatcaccaggcgtctgttttgtcaggaccccgcttccccatgtcttcttgagcctcaggacgcccagttcctaatgtcttcttgagcctcccccgcagtccctgatccccacgggatcatgacactgccatagccaggggttccggagttcacctctgtacccctaaagcccaggccctgcctgggcagtgtggatgccctccagtcatctcagatggatgaggccgatatgcccggtgggctctgcctagggaacaggcagggccattcctggcctgacacccacgacgaaggcgtggtggagagcgggatccatggggcagggcccaatcagccagtgggggggcaggacttttgggctcagcagccaggagaggacaggccaggcttcttctctcagaatagctgtggtttcacaagtgctgaggagagcgtgtgcttgctttcagatctccattacaagctcataatgaatcagacatcacagaagaaaggtgagaactgggcccttcagtgactgatgggatgctcttgccacccaggggagcccctccagactgtccttgcccacctggctgcactggcccctgtatgccaacccagtgggtacaggttctgggggacctggacagatgccgctacctctagccgtggctggacgatgttatgcagccaagcacagcacgtgctgctctcgggaagcccagggcctgaggtcattgcagggnggnaggtggncacagggtgctccccagacctccctcctccaagtagagctgaaatgggaaggaacccctgggacagcccctgccctgctagatctttgcctcagattgctgctgtggccaggcccaggatttccagccctatggctctgagtcctcacatgctgggggcccaggggatatggacacactccatccagggatcccttcctgccatctgggcagcaaccatggggacaaagggaggaagcagagtcctgtttccttgccacttgtccaaggcacttccccatcctgacagcggcccccacccagcccaggatcctgggctgtggtctcaagctcacttcccattatctttggggctggggctgacatcaggaggacatctgactggtggatggagccagcctgggaacatcgcagctggggcagtgcctagggctctcccttcccagggagacatggagaagggggttgagggagggcccttccctagccgctgtggcaactccagtgagctgttctgggcaaagtgtggcccaagtcggcagccccagccctgcagtgctggggacgctgacaggacacgggaagaggccatgctttccctcgggacctgctgttccatgtgtcccaagccctcctgctttccagatggcccctcaggaaaccacctttccagggcctctgctcccttgggcgctcgctgggtctgcatcaacggagtgtgggtagagccgggaggacccagccctgccaggctgaaggagggctcctcacggacacacaggccaggaggcaagcgtgggcgtcttgcgggcggtagcgccgacactgtgcgctctcctgcagacagcctctccatgtcaagcttccagtctgtcaagtccatctctaattcaggtgagcaggctggcgtccatgtgctcacaggggtgagtgccccacggggaccccagcctgggtggcctctaggggtgctgaccaggcgccctctgctgggccaagctccaggatttggggatgaaggtgcagctgaaaagagccctgcaagctgaagccaccgggaggggattaagggggggtgggcaggaccagggaccagtcacagggcagtaaggcctcacagcaggcaccccagggcggggcagcaagcaggcaggaggggcctccccgggtggccttctagggaggatgtaccctggctgcccagcagcagccctgcttggccgtgtccctgccacaagcaggcaggacacaggagggatggcactgcccacggagccctgggctcatggcaccttctgcagagtgagccgggagcagagagcctcttttccccactctgtgaggccgggcattttcctcagccctgccctaacccccaccattcctgtgatgggcccaggtgctagacgggccttgtccttgccgaggaaacccatgcaggctgggtcccaagcctctcatgcagtttcattttacccaagatggggccagcttccactatgttgattgttctaaagtgttcacaggcaccacccatgggcttcaccctcagaaccacattgattccccccagaaccctccaaggcaggcttccctttacagaggaggaaactgaggcagggacaggggcttcttgggtacacacagctgttcctggaaaacttgggcggtgactgttggtgcctgcagtgaccggccttgtagggtctgacttgcagccaactctcaaggcaaggccaggccccagcccggctccttcaacaagcaagattcaaaagctgacgtctcccagaaggcggacctggaagaggagcccctacttcacaacagcaagctggacaaagttcctggggtacaagggcaggccaggtaaggcttgggtgttcctggggtgcaagggcaggccaggtaagtcttgcctgcaccctaagggccccatgactacatttactaggctcacgccctgcagtcagccaactgctctgcccctagctccaggggcctgtctcctgggctcatgatagcagatgacggccacgctctacccatcggtgggcgctgtcttcctcccttcccctgggggtcctgcagagtacctgtgctgacctgagcccacgaggggggccagtagcagcccctaaaccacttcctcagagaaaagtaaagtaatattcttaccaagagaaggcttgctgcccctggccacagcctgcctttggagggcactaggccagcaggtcagagtaggaacaggttctggtgatccctgagtttgcgggactgccctgagatgctacagagtgcacactttcagcagcgcaaccagcaggacaggctcctgcatctgcacatcccaagaccaggcctggagcaagatgccccactgggtgtggggtcacgatcaagagcagcctggcagctagctggtcacccactgaagcccatctgacccttagggcaccttcagaggggagaaagggacaggccccagtcccagagacccccacctggtgcccagagcaccctgctcagtgggagaggggaaccaggccctcttccccacattggcctgggcgctgcctggggaggtatgctgggtgggtggttagacgcacctgggcaggtcacctctggctgctgcaatgactgtttcagaaaggagaaagcagaggcctctaatgcaggagctgcctgtatggggaacagccagcaccagggcaggcagatgggggcgggggcacaccccccaatgatcctgccccttcccctgcgaaagcccaccacacttaggcagtgcgaagtgctcatccgcgagctgtggaataccaacctcctgcagacccaagaggtgaggccctgggtggtgggggtggccntgggcagtctggcaccgccacaggccccaccatgcccctgcccctgcctttcagctgcggcacctcaagtccctcctggaagggagccagaggccccaggcagccccggaggaagctagctttcccaggtgagtgcctggtgcacccctgccccatccctggggtcctatccacagctcactgctgactcttccttcacccagggaccaagaagccacgcatttccccaaggtctccaccaagagcctctccaagaaatggtaagtcccacaggcatggggacagtggggcagccctgcagcctgggccccagggagggagtggggaagggagggtggcagcgcagaagcagagctcgctgaggcctctctgtgcccccgtgagggccatgcaggccgcactccccacacactccactcccggggatgctcacggtgacagtccctctacccgccccagcctgagcccacctgtggcggagcgtgccatcctgcccgcactgaagcagaccccgaagaacaactttgccgagaggcagaagaggctgcaggcaatgcagaaacggcgcctgcatcgctcagtgctttgagccaccccaatctggtcagtgccaggcccaccaacctgcagctggagactggctctctatagcatttcctgatacttccgctacttttaggcctggctaaattccaagacagataacactcaagatagataaagtacttgatctccaaactgacaaactgtttattttctagctgttattttgctatttggcatttacataaaagcacacgatgaagcaggtatcgccttacctgttgaaactgaaaataaagcttgtttatttccaagttgt

SEQ ID NO: 1310 - DNA, 219 bp, Homo sapiens
tattattattattattattattattttagatagagtctctgtcgcccaggttggagtgcagcggtgcgatctcggctcactgcaacctctgcctcccggttcaagctattctcctgccttagcctccggagtagctgggattactggctcccgccactacgcccggctaaattttgtatttttagtagagtcggggtttcgccatgttggtcaggctgg

SEQ ID NO: 1311 - DNA, 1957 bp, Homo sapiens
tgcaggaattctacaatggcaagtaagacattttatttctgtaattgaacataagcaattccaaatgcttttctaggcaagacatgccagcgattagaaaatgagacagcttaaagacagaggtacatttaacagagaaaacacgcctggaagctcggccggccccgcccatgctggctcagttcctgcccctggagggaaggggccgaggggcttcctgtcccagggaactcccaccacaggagtctgcagacgggctggcctggcagtcagtcccaggaacactgaccatccccttagggaggcaccacgccctggggagcacagttccaggccagggccatgggtcttgccctgaagaccctccctcagggaccacgcgccctgaccctcattgcctcaccatattataaaacactaaaaccgcttaagttcttccccacagagttggggaactaattgtaaacagaatacacgtctacatatcagccctgagacagctggccccgctgcacacgcagcctgctggccccagcaagacacggtcagagctggtaagtgctctacagcattcagaaatctgaccacagcgtacacacagctcacaagtcagtgcaaacagaagctaatgacatcctccaagaaaattccatacagttatgacaatggaaaacctgttatacattgtaaccatacatcattagcaatgtttaatacatcttactataaacactgaatttctaagtacatgatactcctagcagcttaatccagaaaataacgatgtgaatccctccaatactgtaaacacaagaccaagtgctgcccatgagagtgccccgtgccacccgcgggcaccaccggcctctgaggacccctgagccacacactgctgctgcttcagggaagcatccatgtcacaggacttccccaggggcctgatttctgccacagctgcaccaactacccagagatatgctgtccgcccacagatccagacgctcccatgccatggttgctggggacgggcgctgcacacacggctgctgtgggggggggcggggcgcagtgattattttgacagcaactctgaagaaacaggtgctgactctcgcgcggggttcctctcaccagaacgaccacacacaggaggagggatgcctgggcccaccacttctctcctctgaagggaaaaattcagaccgccagatgggaaatggctgaaatcactgcacttctattgggtggaagggttcaaacatcggggactcaggtactcagattcccttgccgcctccctctgaaacacgaaccttcctttatgagctggcttcagggaggccccctggcttctcttaccccaacacacagtgctcccacagccacagtgctgcagaggccacctcggccctaaagtcccatggctggaagccacagcaggctccacagaggccccacacaacctcgtctgcacccatcagtctgaagaggttaaaattcaactccatattcagccctatgtttattccttctaaatgccctttttcctttccagataactgtcactaagggaaactgtctgggttccaaactctgctcagcatcctcacagggagaaggcacccccaccacaagggaagctccggagccctcctccctgtcgcctgtgcacagacatagcccactacgggggcagccacggcacctgtcaggggaagctgctctacacccccctttttttggggggggttggcttctcacaacccatcaaattatatatgtatatatatgtatgtatatatatatatatacacacacacacatatatatatatatacacatggttttttttgctagacacagggactcgctgtgttgcccaagctgttcttgaactgggctcaagtgatcctcccgcctcagcctcccaaagtgctaagattataggattactggc

SEQ ID NO: 1312 - DNA, 1797 bp, Homo sapiens
gcaggaattctacaatggcaagtaagacattttatttctgtaattgaacataagcaattccaaatgcttttctaggcaagacatgccagcgattagaaaatgagacagcttaaagacagaggtacatttaacagagaaaacacgcctggaagctcggccggccccgcccatgctggctcagttcctgcccctggagggaaggggccgaggggcttcccgtcccagggaactcccaccacaggagtctgcagacgggctggcctggcagtcagtcccagaacactgaccatccccttagggaggcaccacgccctggggagcacagttccaggccagggccatgggtcttgccctgaagaccctccctcagggaccacgcgccctgaccctcattgcctcaccatattataaaacactaaaaccgcttaagttcttccccacagagttggggaactaattgtaaacagaatacacgtctacatatcagccctgagacagctggccccgctgcacacgcagcctgctggccccagcaagacacggtcagagctggtaagtgctctacagcattcagaaatctgaccacagcgtacacacagctcacaagtcagtgcaaacagaagctaatgacatcctccaagaaaattccatacagttatgacaatggaaaacctgttatacattgtaacgatacatcattagcaatgtttaatacatcttactataaacactgaatttctaagtacatgatactcctagcagcttaatccagaaaacaacgatgtgaatccctccaatactgtaaacacaagaccaagtgctgcccatgagagtgccccgtgccacccgcgggcaccaccggcctctgaggacccctgagccacacactgctgctgcttcagggaagcatccatgtcacaggacttccccaggggcctgatttctgccacagctgcaccaactacccagagatatgctgtccgcccacagatccagacgctcccatgccatggttgctggggacgggcgctgcacacacggctgctgtgggggggggcggggggcgggggcgcagtgattattttgacagcaactctgaagaaacaggtgctgactctcgcgtggggttcctctcaccagaacgaccacacacaggaggagggatgcctgggcccaccacttctctcctctgaagggaaaaattcagaccgccagatgggaaatggctgaaatcaccgcacttctattgggtggaagggttcaaacatcggggactcaggtactcagattcccttgccgcctccctctgaaacacgaaccttcctttatgagctggcttcagggaggccccctggcttctcttaccccaacacacagtgctcccacagccacagtgctgcagaggccacctcggccctaaagtcccatggctggaagccacagcaggctccacagaggccccacacaacctcgtctgcacccatcagtctgaagaggttaaaattcaactccatattcagccctatgtttattccttctaaatgccctttttcctttccagataactgtcactaagggaaactgtctgggttccaaactctgctcagcatcctcacagggagaaggcacccccaccacaagggaagctccggagccctcctccctgtcgcctgtgcacagacatagcccactacgggggcagccacggcacctgtcaggggaagctgctctacacccccctttttttggggggggttggcttctcacaacccatcaaattatatatgtatatatatg

SEQ ID NO: 1313 - DNA, 17862 bp, Homo sapiens
aggacggcgggaagaggagtgcggaacccgcgggaggtgaggcccgccgagccgggctgcgagccgggctgcgagccgggcggcagcggggtcggaggtcgtgggcggcagcgggcgtgaggggtgaggcagggtcaaggggcgggggcggccgcgggtctccattgcccgagcctgtgggagcaggcgggcctggggctgcagcactcaccccgggagccccgccgcagctcgggtagcgttcaggcacctcgccggggccgggccgcgtgcgttcggagcggggaaggcggtctccggggcccccggtgcgcgcggggaggcgtccgctcaggggaggccgaggtgggcccgcggctgcgcccccggccttcgatgccttcgctcgtccgcctgggaccgcgctggcttcgcatcgaagtgggagaggtctgaacagttattttaatactttgatttggaaagaaaatcctttaggccgggcgcggtggctcacgcctgtaatccgagcactttgggaggccgaggcgggcggatcacgaggtcaggagttcaagaccagcctggccaacatggtgaaaccccgtctctactaaaaatacaaaaattagctgggtgtggtggcacgtgcctgtaatcccagctgcttgggaggctgaggcaggagaattgtttgaaccaggacccgggaggcggaggttgcagtgagccgagatcacattactgcactccagcctgggctacagaaaaagactccatctcagaaagcacacaaaaaaaagaagaaaatgtttgttcatcctgcctttaattccttattacaaggcgtgaatttttattgttttttttgagacagtctggctctgtcatccggggtggagtgcagtggcgtcttcacagctaggcacaacctcgacctcccaggctctcaagtagctgggaccgcaagcgccactacactggccagctatttttctttttttttttttttttcggtagagagtaggtcttgctgtgttgcccaggctggtcttgaactcctgggctcaggcgaccttggccgccttggcctcccacggtgctgggatgacaggcatcagcagtgttgaagcctgtgaggtggggtccctgtggctgactctgccctctcctggggccattggcagtgcaggggtccttgtgtgtggaggaaataaggagatgatcaaagtatgattccacgaatcacacggtttattgtcaaagaagatttgttctcgggttcacagtgctcagaggggaggagaggggaggaggtgaagacacctggcagggaagcagggcctccatggatggggtgcattcacggcagggaggtgagtggcagaacggccagggtccggttgctctgctgggatggagcgggcccctggagagtgagatctggtgagagttcgaggtttgccttggtagcagtggagagcgtgagagcgggagctctctgagaagctgggaccgaggtccagctcccaggccagcagcgtatagcttgcctcaaagcatctgcacaaccttcaagctgatgtctgtttttgcagtccagcagtcagggtcagtaactcacataagggagtgtctgacaaggtttaagtggcattcccaaggttgcggagttcactcaagtcctcacatatgtggtctgataagacatcacactcttgcaggggggtcaggtcaccccaaaacatcagactatgtaagtgctgtgaatcacttcaaagctacacagcaggtcccagggcccaaggcagaggagtgagtccacctcggaaggctcagagcagctccaggcagtaaccacggcatttccagagtctggtgtgtgagcctaacagctctggtgtgaccgtccgtactcacctagcagcacgtgacatcagctctccccctgaagtcattgctcagctcgggtgctgcaggaagacatacaggtctgtcttgggccagccccttgcctgctgtgggctgctccctgtgtgtggccttcaccccggtgtagagagatgggctggtcacacccctgcccctcacagcggcgagaggacagaggcatgtgccgggctgtctgtggagctcccaggccagtgtctgggatgcggcaggtgcttggtgttaaagggaaaatattccaggatatctgtgaaagcacgttaggcagagaccaggctttcattcagaacctttgagagatgtgggaaccaccacactgcggtcttgcagtgggagagaggctgggctcagctctgaacaggccatgggctggtggcggcttacagctccagagctgggcaggggcagaggatggaaggttgctaagaggaacccccaggggcgaaggggatgcaggttcaactgacctgccagatcaggccgcccgggggacagtggaagatgaggcgcctaatcagctgtcaagggtgatgggacacgggaggaggtcgtcgctaaacagactttgagccaggcctgttaaaccaagttctcagcaggatgtgcacagagggcccaggaggagcctcaggagccggactgccgttggccaaccggtgagtctgttatccgtcagtggacactctgcttccaggtgccttggcctcggcccgcgtcctgaaggcgggagacgttgcagccacgtgctggccttcccggtgctcctgccagcgtcccgctgcttgacacagtccaagttttgtatccagacccagcctgggacagcagcctcccgacagcccccaggcccagcctgtctgtgacagtcacgcctgctcagggaaccatccctccgtgcagatctgggctgtgttttgggtggtacctcgggtgtggggtcccctaccaggtgcgaggttcatactccccaggctgcctcctgtcctcagggcttggagagtcccatgttctgaaaatgacctcttttcgagccgggcaaggccgcatctcctttggcagtgtagtgtcttccctggaggtggcattcctttttgatttgccttctgtgcttgggaacctcacttcctcactctggccagctctgccagcagtttggagctggttcagcgccccaccgccctgccttggcctgcgcccggccctccagggtggcttctcgccagttcctgtcaggcctgcctgggcaaccaggcctgggcacctccctgtcccttgctcagaaaacccacaggctgtgggggcccgggagccaagcctggtgcgcgggcaggaaacgcatcctggagcaccagcttccctgccctgcccgcctcacggggtgcctgggggcgtgcctcagcctgctgctcctgtagtctgttctccacgccgggcctgtctccctgagcaggctgaacatgggcatacgagtgaccagcgtgatcgtgtccaggccagtgccgcattctgtgtggtccaagggaaaaccttctccaagtccacggcccgccctttcctctgctgggttacggccaagggcgccaggcctcactggaggacatggatcctggacccggccctcgaggctgctgccttccagtttccccatgtcctggacactcttggtctcaccatttgggaggccgacaggggatgcagagtggcctgttggaaaggccttatgtgaccccaggctgagtccctgagcagcctgctgaggccggaggggagaagagctgagcttctcccttgctgggccaggctcgggctgtggaatggctgccagctcccttcctgggagaggctgggtggggtccacagcaccttcctcccgtcccacaggaagctgtcttctgctgttggctgctgggggcgactgatgtttggatccctgagcaccctgccaatcccagactcaccttcccactctttccagagtccccagggagacacttaagggaaattaaactgcagagtgcaagagatgcctcagtcaagtcagccaaaaacacgcgggtcatccccaagccccagagaggtgagtcgggcagggcactcaactgctgcaggaggatggtcttatttctagcactttccacaggaggtaaatgtggtgggtttggggggtttttcaaatgcatcagtgtctggaatgggttctaagctgctaaataattcttagaggtaaatgacagacatgttgccctagatgtagctagacagccttccctctacagtgaagtctcctccaccctcagtgacagagccccgatgacacggacacctcggctgctgtcacttccctggttcgggcctcccacaggctttgaattgaaggcgagtgcctcagaatttgcatccattgttctgtctttcctgggaagttattcatcctggtggccagcccaccgacaaaatggatttggatctactggacctgaatcccagaattattgctgcaattaagaaaggtacatttatttctatttacataaagggtgtgggtgggtgtgtgcagtttatataaggcaggttaacaaaacgctggctggctaagccttccttcctttgcctaccctgattattaaaccgagggcgggatgtactatgggattttcaggtgtgtgtgtgtgtgtgtgtgtgtgtgtgttcttaactacatggatttctttcagttacttttatttttatcaaagtaatacatgcatattgtctaaaaggtaaaatggagccacataaagtcttttagttttttttttttggagacggggtctcgctctgtcacccaggcttgagtgcagtggtgcgatctcagctcagtgcaagctccgcctcccggggttcacaccattctcctgcctcagcctcccgagtagctgggactacaggcgccagtcaccacgcccggctaatttttttgtaaatttagtagagacagggtttcactgttttagccaggatggtcttgatctcctgacctcgtgatccgcccgcctcagcctcccaaagtgctgggattacaggcatgagccaccgcacccggccgtcttttagttatttttttaaaaaatatttacatctgggctcctaaacgtgtttatgttgtaatgtttgatttgtcagtgttactgattatccatggacttctcttgggggctgtgaggactgagcgtgcctacacctgtgtaccccaacttcctctccccccagctccctgcccatacttagaacctagtttgggtgacatcagctgtcagggttgtgactgggtgcatactggccattgttgaacctggtgtggtggtgcaggggatggttttctttcttacagcatcttttttcgcccgagttagtaaatgctcaaaactcaggccccacgtgcagcccctgccccctgctccccatgccagccgcctggctgtcatccggggaccctcctgccagcttccatcctcccccgtctccccgggcctcagctacgtgaacctcagcacgctgtctgtggcgagaagccggagtgctcatggagctgccgcagcagcctggtgacagggcagggcctcgctgtcctgaccctccatccttggctgttggtttttatcctcctgttggtggccttgtgatcacagctgctgccacagctgcagacacgacgcttgcagaccagggacagagaagggctcagccagggagttcctttctcacctgtgtctcttatccaaaaaccaatgtttccagaagtccctgcagacttcacggctgtgaagggggctggggctgtgaggcttaccagggggagcgccctgccacagccccgatcccggtgagtcctcagggcccacagagccttctggagcagcctgtctgcgggaagccccctccgctggatctggtgaaacccaggggcgctttcttcattcccacccttccatctccttgtgttttctgtgtggcttttctgaagatcacaccagtgcttactgttttccagccgcacaatggttgtcttttcactgcagcgttcagcgcacccgtgttgagggggtttctgatgtggtgggtgtaagtccccgtggccgggtggggcgcttcgtccaccactgctccctctcgtgtgcgcttcctcgcacttccctgatcggctgatcagtctgcagcatttgtcgtctttctacaagtttgaaattagaaagtgatgcacttatctgagtccaaaattaacttccttgccctcctccccagatggcaggtcctggggatctgcacccctgtaactgctgccaccgccgttctgattcgcacatgctctgccccctgccctgactgccctgcgcagctggcgtttggacctgggctctgctaccctcccagcgctcccctccccagggcacatgtcctctcccgcggctcagcccagatccatgcctggtgggcgggtggtggaaagctcggtgctggttttttcctgcccccttctggagcactgtctccagctggcatggaactgggtgcctgtcgtttcttctcagtaccggaacctgctctcagcaccgggacctgcccagccctgtcttctggcttctgccccagctcacgaggctggtatctgtccgagtgccaggactcagggcgcagtgtccagcagccctttcctcgtgcctgtgcatcggccacactgtgtccagggtttccagggagcaggggatccggtccctacccaccttgtccccagaatcggaagcacggtgctctcacagtgctcttaacaaagcaccttttgtcactgtgttgccctgcgttgtgacagtctgacattttcctgtaatttatctgtgttatttcagccaaactgaaatcggtaaaggaggttttacacttttctggaccagacttgaagagactgaccaacctctccagccccgaggtctggcacttgctgagaacggcctccttacacttgcggggaagcagcatccttacaggtaggtgggccctggcatctctgccaggggtgacatgtggctccagcatcatggtcccagtggtgcagggcaggggctgtgcagacttcacccagggaccagcctcagggcgtgtggcagctgctccagccccagagttcccatcttgcttgtcctacacccatggggctgtggtcacagcatcgggtcagaagatgcgtgaggtggacacgggctgtgggacctcctggggaccttgctccatggaccagaggagggggtgcaggaagcaggggtggatttggcagtcagcacccagagcccttcaggctctggcagggtgggaacggtgtgagatggggccctggccacggtcccaccaccacgtgtgggaaaccaggtctcagcaggggaaggaggtacccagggaaccccatgcgcctggacggacaaggtttccatccctgcatctcagcaggccctagtaggcagcggggtcctggcatgagcagggccctctctcccctgcaggtggctcagtggcccaggccccgaggaacgtgctgaacttggggctgccgtggtgggcaggtgccacggccacacacacggtgctgtgggcagggctctgggcaggcctcacagtcagggtggcctgctccacctggacggggtgcccaaggcagtgtgcagactccaagggaggggctgctcctcccggcccaggccccaggccaagagcgcagcctgcaccgcgtgtcccaccttgagccttgccctgaggggcttcggtgtcgtggaggaggctgtgtcaaatggctcatccaaggccctttagccaagaggctgagaccagcattgctccagaatggtatctgtcacagagaactgacggcatgtggtgtgcatgtgtgcgcgcctgcgggagcccattaaagccgcttgagaactgttcagcaccccagggcatcccagctggacagagctgtgcctttttcttcacatggaggctgttagggagcgcctcggggctctctggaagctttggctgaaggcgtctggtgctgcaattgccccatagggggatccctgcgggcatgtgatggtggccctggggctccccctgactctgcatctcaggtgcacccgcccttcccggctgggcccccctccctgccctcagcaccttgctcacccccatgaccgcaggcacctgtgctccagccacactgcacctggcacaggcaggctgaccatgcctcccgcagtccccagccctgcccgcaggcccaggagagtcaggcctgacactatccctgccctttagcactgcagctgcaccagcagaaggagcggttccccacgcagcaccagcgcctgagcctgggctgcccggtgctggacgcgctgctccgcggtggcctgcccctggacggcatcactgagctggccggacgcagctcggcagggaagacccagctggcgctgcagctctgcctggctgtgcagttcccgcggcagcacggaggcctggaggctggtgagtggccaccccttccgtggggtctgggcaggtgggcggcccctgctttgtgtgggacagctttccgttgaggtggggcagtggccgcctcttgcgctgttcctaccattgcgtctccctccttctcaccctgattgccctcgctccttccagaacagggagggggaagtgaggctgggctcagctgacagcaggaggggtgggagggtacgaaccccaccaccaggcagccggccctcagcagagctaggcccccaggggtcgctggctgagcacagcgatgccggcccacgttccgcacagctgccaagcccagagtccacagagccagcaacgcagggagggcagcacagcctttccccgggtgccccgccgccaggccaggtatgctcctggcgcggccccgtgagcctgtacgctctgtctgtgaaacgagggttccctgcattggactaaagcgttcagagcatgcctgcctgggtctctcaggtgttaaaagttcacgtagttttaaactgtgagctgtgagtaggagagatgtttctcagtagctccttaacttttaaactaattccctggtgtcaacatgcgattcccacgttgtcttaaactccacgtgaacagagtggcagtattttttcatcggtggcacctccgagcacatctgctaggctcacttcccacacagggccggaccccaggccctggacccacaggcccagccagccacctcctcacgggcctgacctgccagcagcggtgtggctgggaacctcacctctgccaccctcaggtcagcgtcatccccaggacccagggtgtgctgtgcctgcctgagcttcagtgctgggtggagggtgaggggtctcctgagcctccgtgtcgggtggagggtgaggggtctcctgagagcccagctggggtctgctcacgccacaggcatttttgtccctgcagcccaggggagggcaccctcttgtcaggtgcctgagtccctgcggctggtcttggggatgagcctggagacagccagaagccgggaggacaggagttggccttgaaaatgggagtctcccgcttaccgcacggaagagctgctgtgaggtggaggcgggactcgagcgtgctcaggaacgggacgggagccgccctcattctccagcgtcctccgtgccaggcttcgtgcaaatctgatttgtgcaatgactccccctcagcttccaccccgttggccttttcagtgaagcccacactccccgatacccagggacacagaagccttaggacaccctccctgaatcccccagctgtgcccagcccagtgactgctgcgggatgacagcacagtccagccttgcgggccaggggaagggagggggccccacggccactgtgaccacatgcaaggttaggggtcagatgtgctttcctggggaaatgacttcctttcctggatccaatctaaaggcccgaattttgaaaagaaagcggcaggcgggctctgaagtgattccgactcccgtgcttaagccgcgtgaggctctcccaggcctgctggggccccgcccaccgctgggctgtccacagccaccctcctgccagcttcacgatgtccccatgactgtgcagcccctacataacgtcaccccaacaaaaacacgctgcttgaccggttccacctgcttccgagccttccagcccagcctctctccagccaacaggacggaggaagcccagggccccgaccttcctgtggctcctgactaggggcacagtcactgctggggacactggtggggaagggaaccagccacaaaagggatgtggcctcccaaggcagtatttatacgttcctggcctcaagcgggccagatgcttctcagaagcttagttctgacacagaatggggcggggggttcctgacccatttttgcaactcttctttacgtttgaaattctgtcaaagcaaaatcagctcagaattaaaggttacgcggacactcacaaacaggctgcatgacacggcgtgggggcactggctctcccacaactgcatgtgccactgcaggaacaggacgacgccccgtgggccacggggtcctggctgggcagccttcctggcatagtcagtgcttagagagctcgccggccttgtctttttgtttttgttttgcaggaaactggagttttattattactcaaatcagtccccctaagccttcctgttttttaaattgagatgtaatttacatgccataaaattccctctaaaagtgtacagttcggcctgataggcgcagtacctcatgcctgtaatcccagcactttgggaggccgaggctgaggcaggcggatcatgaagtcaggagttcgagagcagcctgaccaacatggtgaaacccagtctctactaaaaatacaaaaattagctgggcgtggtagcgcacgccttgtaatcccagctactcagaaggctgaggcaggagaatcacttgaacccgggaggcagaggttgcagtgagccgagatcgcaccactgcactccagcctgggcgacagagtgagtctcttgtctctcaaaaattaaaataaaataaataaattcagtggcttttaatagaagcacaaagttctgtgcccgtcaccactatccaattccagaacagttccctcaccccaaaaggaaaccctacccatgagcagtcagcccccacccccagcagcctgcctcccctttccctacctgtgactcttcctgtcctgggagctccatgcaagtgcagccggacagcacgtggtctcgtgacaggcttcctgcattggcattgtgttttcgaggttcatccgtgctggagcaggtgtcagaactgccttcccttttaagattcgatcatcccactgtaaggatgggccgcacttcattcgtccactcctcagttgatggcctttgggccgtctccccccgggctgtcatgaaacgtgctacggtggacgtgctttctcttgggtatctacctaggagtggggctgctgagtcatgtgatttgtttaactttttaaggaagtaccgattgttttccgagctgcaccattttacattcctagcggcagtgcacaggggtcaggggtctgcctcctacacatcctcaccaacacgtgtcttttcaagctggctttttgaatttcaccatggagcccagattgcaggagctttgaagagaggaaacgcttgctcagtgggggccttgagggtggccatgtgtcggggctcaggggccatttccagaaggcgttgccctgatgctgccacttgctccctgccctgcagtggggaacggaggttcacagggggaaggaggggcagggtggagcaggagaggcctcccatctgtggccattccagcccagggcccaggacaggggaagtccttgcctgggtgtcagaagtggagacccagcccatattcctcctgaggggtcacctggccccggaggtggctgccagtgggagggtgagaaaaagcaccagcctcctccctccccaggcgaggggcaaagaacctgtgaggggcagagagttagaaatggcgggagacatctgcacttgatttgtgtggcagtcacaggcccgtctggagtcccctgggcacatcaggcactcttgcttcccaggagccgtctacatctgcacggaagacgccttcccgcacaagcgcctgcagcagctcatggcccagcagccgcggctgcgcactgacgttccaggagagctgcttcagaagctccgatttggcagccagatcttcatcgagcacgtggccgatgtggtgagtgtgggagaagccccatgacacccccaaggcaagctattcaggaccattggggcaggtgtagccaccacggcaatggggtctcacagcagggcagggagagttggggctcagctctgaacacagcatgggtcatgggggtttacgcccgaggagcaggtggggtcagaggatggagagtgactgagaggaactggcaggggagggaattctggctaaagcatcctgccaggacccttgctgaaggtgtgccttggggatcagacggcctctggggactgtggaggatggaccagtcagctactgagggcgactggatacggagagcaggggtcctgctacaatctcagcagggattgccaaaactggatttcatgaggacgtgcacagatgggcctaggaggaggctcaggagcctgacggcagtttggccaaacagaatcctggccaggagtggctgtgggccaggcaggcagggcggcaggctgcgacacccagttacatctgaatctcaggcagctttgaagcgtgttctagaatgaggatgcccatattcagatcaactttcttcatgatctgaaactcagatgtaactgggcgcctgtacaccatctgtcaaccttgcccatgaagacggagtggggaagagaagccccaggcgggtggcaaggacctcctctgggctgtgggcccctgaccagctgccccaggagaccaccgccctgagaaggatgcgacctgctctccaggctgctgccctggtgagatagctgtgttggtttccccttgcctctgaggggaagacagccctcactaggggcacaggggctccacctggccaaggcctgctgggcacccagctcagacaggtgacctcagatccttgaccactgcctggctgctggcttccctgcagacactggctgggcttggaggagggacctatggcagggccttgcagagagcaggggccactcaccgggggccagtggagtccgtcctgtagccaagaagcaggcaagagaggctgggacccatccctgcagctggggcagcagtgctgtgagctgtcagtgcttagtttatagacatcatcctgggagggagaagtgatgaagtagaaaagacgcagaagaaaagatgggacgtttgggagtaaacccctgaccaaaggcaagtaaggaaattccaccctgtgcagggggagcggctgccatgtccagcccaccctagacatggctgtggcctggcagagcagctcctgggtgggccttcccccacttctcttttttttttttaagacagtctcgctctgtcgcccaggctggagtacagtggtgcaatctcagctcactgcaagctccacctcccgggttcacgccattctcttgccttagcctccagagtaggtgggactacaggcgcccaccaacacgcccagctaattctttgtatctttaatagagacggggtttcaccatgttagccaggatggtctcgatctcctgacctggtgatccgcccacctcggcctcccaaagtgctgggattacaggcgtgagccaccgtgcccgccagccttcccccacttctaagaggtcttataaaaactttcaagtaaagcataaggcatataaacttttaatttaaaaaaatgtacaataaaatacgttatcgcacacaacgtgaggaagttacacatgggaagggagccgtgggcccagctcatgccccaggtctcctgggagagaccacgccgcaccagggcaccagcttaggcccagccccagccccaaggtcacgccagccgtgtggttattagtatcatgtcctatgcacacagacgcaggagaaatgagtgagcgctgcggctcccggccaggggccctccctgccgccctggctgtcccgggccagctccgggccacactcggcagtcccaccctggagcggggccaggttggggtcactgcaagagaagatagaaggtcagggctgggccgccaaaacctgacagtgttactaagttctgttctggaaacagctctctggggaacccccaccccaagtctgcctagagaagagggtgttgctggttgtgagcctccctggggccgaggggtcatgggggactggtgcgtctttggtctctgctccctggagcaccaaaggcctgcgtctggcacgggggaagccaggggtgtggacacagagccttctcttgcataagcagagcctggtgccattcccacccccccactctgtggcccttgggcttgcatgaggatggggaccctgagccaagcccctcttggaggcccagcctggcagctagcagcagtcaccacttgcccatccccagctccccccagtccctgcatgtgcaaagtccctccctggcccagctgcctgcttcctggggctgcaggccatgggactcacgttagcggtggcgtcttccaggccactgctgctgctgtcgttttccacaaaaagaggctcggccagagacgccctggagatgaagcacagacgagtttcactcagggcgtgcaggcggccctcaggcgtcttcagagctccgggcgtgacaccagcgtgtggctgcagaccttggacttgagggacagcctaggggccccttagcagcctccatctggccagagctgctggcaaggcccgtggggcctgaactacactgcttggtgccaggagcagctgtgtcaccctcccccatcaccatggctcaccaagctgtgcggtcagaggccagaccagccatgccaatggctctggcacccacaggccacggcagcacccagagggaggccgaggacacctgccttcactgggggggtcctcccctggaagctctcctgggagctggtgggcacagggctgtttccaccccttggccaggccaggccagctcagagcacagggctaaggcctggatgcacgggaggcactggccttgagggtgtctcaacctacagccccatcctgacccccaggtggtctcccagagtgccccacgccttggcagaggcaggccaggcctgactcgcctgagtaacgcctgaagggcatcaggcccctgccttgctgagcgtctgaagaggtcatggccaccacgggctggctttggtggcactgtggccaggtttgggtggtctgagtacctggtgcggggccactgaaggagggggctggttgctgctgacctgtgagggggagagggtgaaaccatggcagaaggagagcagacccccgcaaggactcaggagcctgcgcaaaggacacctctacagaggacggtgttggcacagccaaggggtgactgcctgggggggccagaggaaggacatggggccaagggaaccagttgtgtgagcctgaagcttctatagttggggcctctttgagaaaaatacagaattgggctcagagtatggggactacagagtatgggcactgtgagccccaggtgggtaggaaggttttcagacggtcgagtgacagtccaaacggggtctggtcacctggggcggggacttgctgaccagcatagacaatgacagctgtccccacaggacaccttgttggagtgtgtgaataagaaggtccccgtactgctgtctcggggcatggctcgcctggtggtcatcgactcggtggcagccccattccgctgtgaatttgacagccaggcctccgcccccagggccaggcatctgcagtccctgggggccatgctgcgtgagctgagcagtgccttccagagccctgtgctgtgcatcaaccaggtgagcaccaaggcagggttgcacccctgagctcgtatttttagccaggatgcggaagcagagccggtctggaggtggggcgggtggcagtgaggtggcctccggctcctgcgggtagcagcctgtgcctaaccatcgagaagaccctcagccgttgcagctgacctggactgtgctcttccaggtgacagaggccatggaggagcagggcgcagcacacgggccgctggggtgagtgcagccatgtggtgtgtgcacctctgtgcaggtgccaggggcacagctgggccgaagtgggcggggccaccaagcctgagcgccacttgcctgcttcctgtttctcaggttctgggacgaacgtgtttccccagcccttggcataacctgggctaaccagctcctggtgagactgctggctgaccggctccgcgaggaagaggctgccctcggctgcccagcccggaccctgcgggtgctctctgccccccacctgcccccctcctcctgttcctacacgatcagtgccgaaggggtgcgagggacacctgggacccagtcccactgacacggtggcggctgcacaacagccctgcctgagaagccccgacacacggggctcgggcctttaaaacgcgtctgcctgggccgtggcacagctgggagcctggttcagacacagctcttccagggcagcggctccactttctcatccgaagatggtggccacagactgacccccatctgagctggggggatgttctgcctctccctgggtctggggacaggcccgcttgctgggtacctggtccccactgctgagctggcccttggggagaggtgattctcagggctggagcctggggtgtcctacagtgactccctgggagccgcctgcttcttctctccacatggaagcccaactggggttgcgtctgaggcctgccccctgggctggggcctcagaccccctcagccttgggaccgtgcccacgagggtctcccctcctgcacacagggcagtccttactcccccaccactcaggccacagtggggctgcaggcaggcggctcctcctcacccacctctgggtccttggctcccgggggccccacctcggcacacactgtgccccacaaaacttcagtgtggtacaaggtggagaaagcatatcccaccaacctccagtgtcagggtccaggagagcctgggggtggggggactgccttgtctctagtagtgtggcctgtgccagcaccacagccggtcagaggagcgcaggcagcgcagggctggcacgtgacaggctcgtcagccacctgggaacacagttctgggcaaagaggatccgaggttgagaggaaggagggtcccggtgtatcctggccctgggggtctgggcgtccagctcagccctggcctggctgggtggtattctggtagggatatggcaggactcctggcagggccacctgcaggaccctgtcctgcagtcccacactgtgcagacccagtcccacactgtggccaggccttacatctggctggaaagcagagcctcctgggaacacatctggctgcacaggctgaaatatccacccagcaggcagagtggcgtggcctccccatgggcacagtggtgacccccttgattcccaccgtacaaccccctccaccccccactcagtgcctccacatgctgcctggcacagaccaggcctttgacaaataaatgttcaatggatgcagttccagg

SEQ ID NO: 1314 - DNA, 1736 bp, Homo sapiens
tatatatatataatttaacattttttcttttaatcccatccactattacagaacctatgaaattttcttcaacacctctatgtagcatttagaatgtaagctcctgatccaccagaatctgcaagaatggagtcaggagcctcagaaaaggagccacggccacaggcgagcagctcggggacaacgctggctccacagggcagctcctgggccaggcacccgctggcgactacacggagcttgtcttgtggaaacaaacgcgctttcacaaacacagcagtcctgcgacatgaggcgggatgaaactttgaaaggtattttaaagtctagccttgtaacaaaacctcaggacactctgtccccagccttcgtgccccacggggagcttctagaggctgaaggtgacaagtgtgagcctctgctgtgccaccacccaccctgttacatgacagtggcaagctgagctttcacgggatggctggtgtttcacagaccgcccctccatcccgtagcctagttggctggcatggaggtggcgctgctgagcgtcagcctttggaatcactgatcacctcggcgtctgttttgtatgctctttacctatggactagtttgtggacggctaagaaatacagcctcagcattgatttgaaaaggttcctgtcagagtccaccgtgctccctcattccataaagcttaagcttttaaaaagtgaaacgccatgttagccaggatggtctcgatctcctgaccttgtgatccgcctggcgggtgcctgtagtcccagctactcgggaggctgaggcaggagaatggcgtgaacccaggaggtggagcttgcagtgggccgagattgggccactgcgctccagcctgggcaacagagttagactccgtctcaaaaaaaaaaaaaaaaaaagtgaaacacacgtctctatgggcttcgtgtgcaggggcgtccgggagaacacagctcaaaagggggcatggggccccagggccacaggcatggggaccttggaaagagagacccggaagatgctccagctgggaaggaattcacttcccactgaccagtgtccgctaagcttcaggctttactgccatagatcactaaatgcctatcgttctgaaaggggtactttatgtttccagattcttaatttacagccttattacaatattacaatttaaaagagagtctggtgtcatggcaaaaaggtggcaggcaggaaatgcaacagcatccgtgagcaggagccaatccccagcgtgctgaagccacctcagcgccacctcggcctccctgagccagcctggccgggtcgcggtcggggtggctcctggcactggggctgcaggccgagtaacagaatgctgaggcacggcctcccgggtgttttgaaaaggcacctccaaggttggtggacgtcactatctaggaaaggaagccaaggagtgcggctggcgcctccgggcagggcggtgaggggcgtggcagggcggggcggtctcacactcccaagacaggttacctagccctgctggctctcagtgggccaggtcagtgtggctggcactcagagctcgcgagtcggccagacaattatttcgttcctgcatgaaaaaacaaatagaaaaattacacttaaccaggacttcaaatgatgccagcttcaaatggcctcaggcctaacagtaccagctgcacagctaaatctaggttggcactcga

SEQ ID NO: 1315 - DNA, 17849 bp, Homo sapiens
aggacggcgggaagaggagtgcggaacccgcgggaggtgaggcccgccgagccgggctgcgagccgggctgcgagccgggcggcagcggggtcggaggtcgtgggcggcagcgggcgtgaggggtgaggcagggtcaaggggcgggggcggccgcgggtctccattgcccgagcctgtgggagcaggcgggcctggggctgcagcactcaccccgggagccccgccgcagctcgggtagcgttcaggcacctcgccggggccgggccgcgtgcgttcggagcggggaaggcggtctccggggcccccggtgcgcgcggggaggcgtccgctcaggggaggccgaggtgggcccggcgtgcgcccccggccttcgatgccttcgctcgtccgcctgggaccgcgctggcttcgcatcgaagtgggagaggtctgaacagttattttaatactttgatttggaaagaaaatcctttaggccgggcgcggtgctcacgcctgtaatccgagcactttgggaggccgaggcgggcggatcacgaggtcaggagttcaagaccagcctggccaacatggtgaaaccccgtctctactaaaaatacaaaaattagctgggtgtggtggcacgtgcctgtaatcccagctgcttgggaggctgaggcaggagaattgtttgaaccaggacccgggaggcggaggttgcagtgagccgagatcacattactgcactccagcctgggctacagaaaaagactccatctcagaaagcacacaaaaaaaagaagaaaatgtttgttcatcctgcctttaattccttattacaaggcgtgaatttttattgttttttttgagacagtctggctctgtcatccggggtggagtgcagtggcgtcttcacagctaggcacaacctcgacctcccaggctctcaagtagctgggaccgcaagcgccactacactggccagctatttttctttttttttttttttttcggtagagagtaggtcttgctgtgttgcccaggctggtcttgaactcctgggctcaggcgaccttggccgccttggcctcccacggtgctgggatgacaggcatcagcagtgttgaagcctgtgaggtggggtccctgtggctgactctgccctctcctggggccattggcagtgcaggggtccttgtgtgtggaggaaataaggagatgatcaaagtatgattccacgaatcacacggtttattgtcaaagaagatttgttctcgggttcacagtgctcagaggggaggagaggggaggaggtgaagacacctggcagggaagcagggcctccatggatggggtgcattcacggcagggaggtgagtggcagaacggccagggtccggttgctctgctgggatggagcgggcccctggagagtgagatctggtgagagttcgaggtttgccttggtagcagtggagagcgtgagagcgggagctctctgagaagctgggaccgaggtccagctcccaggccagcagcgtatagcttgcctcaaagcatctgcacaaccttcaagctgatgtctgtttttgcagtccagcagtcagggtcagtaactcacataagggagtgtctgacaaggtttaagtggcattcccaaggttgcggagttcactcaagtcctcacatatgtggtctgataagacatcacactcttgcaggggggtcaggtcaccccaaaacatcagactatgtaagtgctgtgaatcacttcaaagctacacagcaggtcccagggcccaaggcagaggagtgagtccacctcggaaggctcagagcagctccaggcagtaaccacggcatttccagagtctggtgtgtgagcctaacagctctggtgtgaccgtccgtactcacctagcagcacgtgacatcagctctccccctgaagtcattgctcagctcgggtgctgcaggaagacatacaggtctgtcttgggccagccccttgcctgctgtgggctgctccctgtgtgtggccttcaccccggtgtagagagatgggctggtcacacccctgcccctcacagcggcgagaggacagaggcatgtgccgggctgtctgtggagctcccaggccagtgtctgggatgcggcaggtgcttggtgttaaagggaaaatattccaggatatctgtgaaagcacgttaggcagagaccaggctttcattcagaacctttgagagatgtgggaaccaccacactgcggtcttgcagtgggagagaggctgggctcagctctgaacaggccatgggctggtggcggcttacagctccagagctgggcaggggcagaggatggaaggttgctaagaggaacccccaggggcgaaggggatgcaggttcaactgacctgccagatcaggccgcccgggggacagtggaagatgaggcgcctaatcagctgtcaagggtgatgggacacgggaggaggtcgtcactaaacagactttgagccaggcctgttaaaccaagttctcagcaggatgtgcacagagggcccaggaggagcctcaggagccggactgccgttggccaaccggtgagtctgttatccgtcagtggacactctgcttccaggtgccttggcctcggcccgcgtcctgaaggcgggagacgttgcagccacgtgctggccttcccggtgctcctgccagcgtcccgctgcttgacacagtccaagttttgtatccagacccagcctgggacagcagcctcccgacagcccccaggcccagcctgtctgtgacagtcacgcctgctcagggaaccatccctccgtgcagatctgggctgtgttttgggtggtacctcgggtgtggggtcccctaccaggtgcgaggttcatactccccaggctgcctcctgtcctcagggcttggagagtcccatgttctgaaaatgacctcttttcgagccgggcaaggccgcatctcctttggcagtgtagtgtcttccctggaggtggcattcctttttgatttgccttctgtgcttgggaacctcacttcctcactctggccagctctgccagcagtttggagctggttcagcgccccaccgccctgccttggcctgcgcccggccctccagggtggcttctcgccagttcctgtcaggcctgcctgggcaaccaggcctgggcacctccctgtcccttgctcagaaaacccacaggctgtgggggcccgggagccaagcctggtgcgcgggcaggaaacgcatcctggagcaccagcttccctgccctgcccgcctcacggggtgcctgggggcgtgcctcagcctgctgctcctgtagtctgttcctgtctccctgagcaggctgaacatgggcatacgagtgaccagcgtgatcgtgtccaggccagtgccgcattctgtgtggtccaagggaaaaccttctccaagtccacggcccgccctttcctctgctgggttacggccaagggcgccaggcctcactggaggacatggatcctggacccggccctcgaggctgctgccttccagtttccccatgtcctggacactcttggtctcaccatttgggaggccgacaggggatgcagagtggcctgttggaaaggccttatgtgaccccaggctgagtccctgagcagcctgctgaggccggaggggagaagagctgagcttctcccttgctgggccaggctcgggctgtggaatggctgccagctcccttcctgggagaggctgggtggggtccacagcaccttcctcccgtcccacaggaagctgtcttctgctgttggctgctgggggcgactgatgtttggatccctgagcaccctgccaatcccagactcaccttcccactctttccagagtccccagggagacacttaagggaaattaaactgcagagtgcaagagatgcctcagtcaagtcagccaaaaacacgcgggtcatccccaagccccagagaggtgagtcgggcagggcactcaactgctgcaggaggatggtcttatttctagcactttccacaggaggtaaatgtggtgggtttggggggtttttcaaatgcatcagtgtctggaatgggttctaagctgctaaataattcttagaggtaaatgacagacatgttgccctagatgtagctagacagccttccctctacagtgaagtctcctccaccctcagtgacagagccccgatgacacggacacctcggctgctgtcacttccctggttcgggcctcccacaggctttgaattgaaggcgagtgcctcagaatttgcatccattgttctgtctttcctgggaagttattcatcctggtggccagcccaccgacaaaatggatttggatctactggacctgaatcccagaattattgctgcaattaagaaaggtacatttatttctatttacataaagggtgtgggtgggtgtgtgcagtttatataaggcaggttaacaaaacgctggctggctaagccttccttcctttgcctaccctgattattaaaccgagggcgggatgtactatgggattttcaggtgtgtgtgtgtgtgtgtgtgtgtgtgtgttcttaactacatggatttctttcagttacttttatttttatcaaagtaatacatgcatattgtctaaaaggtaaaatggagccacataaagtcttttagttttttttttttggagacggggtctcgctctgtcacccaggcttgagtgcagtggtgcgatctcagctcagtgcaagctccgcctcccggggttcacaccattctcctgcctcagcctcccgagtagctgggactacaggcgccagtcaccacgcccggctaatttttttgtaaatttagtagagacagggtttcactgttttagccaggatggtcttgatctcctgacctcgtgatccgcccgcctcagcctcccaaagtgctgggattacaggcatgagccaccgcacccggccgtcttttagttatttttttaaaaaatatttacatctgggctcctaaacgtgtttatgttgtaatgtttgatttgtcagtgttactgattatccatggacttctcttgggggctgtgaggactgagcgtgcctacacctgtgtaccccaacttcctctccccccagctccctgcccatacttagaacctagtttgggtgacatcagctgtcagggttgtgactgggtgcatactggccattgttgaacctggtgtggtggtgcaggggatggttttctttcttacagcatcttttttcgcccgagttagtaaatgctcaaaactcaggccccacgtgcagcccctgccccctgctccccatgccagccgcctggctgtcatccggggaccctcctgccagcttccatcctcccccgtctccccgggcctcagctacgtgaacctcagcacgctgtctgtggcgagaagccggagtgctcatggagctgccgcagcagcctggtgacagggcagggcctcgctgtcctgaccctccatccttggctgttggtttttatcctcctgttggtggccttgtgatcacagctgctgccacagctgcagacacgacgcttgcagaccagggacagagaagggctcagccagggagttcctttctcacctgtgtctcttatccaaaaaccaatgtttccagaagtccctgcagacttcacggctgtgaagggggctggggctgtgaggcttaccagggggagcgccctgccacagccccgatcccggtgagtcctcagggcccacagagccttctggagcagcctgtctgcgggaagccccctccgctggatctggtgaaacccaggggcgctttcttcattcccacccttccatctccttgtgttttctgtgtggcttttctgaagatcacaccagtgcttactgttttccagccgcacaatggttgtcttttcactgcagcgttcagcgcacccgtgttgagggggtttctgatgtggtgggtgtaagtccccgtggccgggtggggcgcttcgtccaccactgctccctctcgtgtgcgcttcctcgcacttccctgatcggctgatcagtctgcagcatttgtcgtctttctacaagtttgaaattagaaagtgatgcacttatctgagtccaaaattaacttccttgccctcctccccagatggcaggtcctggggatctgcacccctgtaactgctgccaccgccgttctgattcgcacatgctctgccccctgccctgactgccctgcgcagctggcgtttggacctgggctctgctaccctcccagcgctcccctccccagggcacatgtcctctcccgcggctcagcccagatccatgcctggtgggcgggtggtggaaagctcggtgctggttttttcctgcccccttctggagcactgtctccagctggcatggaactgggtgcctgtcgtttcttctcagtaccggaacctgctctcagcaccgggacctgcccagccctgtcttctggcttctgccccagctcacgaggctggtatctgtccgagtgccaggactcagggcgcagtgtccagcagccctttcctcgtgcctgtgcatcggccacactgtgtccagggtttccagggagcaggggatccggtccctacccaccttgtccccagaatcggaagcacggtgctctcacagtgctcttaacaaagcaccttttgtcactgtgttgccctgcgttgtgacagtctgacattttcctgtaatttatctgtgttatttcagccaaactgaaatcggtaaaggaggttttacacttttctggaccagacttgaagagactgaccaacctctccagccccgaggtctggcacttgctgagaacggcctccttacacttgcggggaagcagcatccttacaggtaggtgggccctggcatctctgccaggggtgacatgtggctccagcatcatggtcccagtggtgcagggcaggggctgtgcagacttcacccagggaccagcctcagggcgtgtggcagctgctccagccccagagttcccatcttgcttgtcctacacccatggggctgtggtcacagcatcgggtcagaagatgcgtgaggtggacacgggctgtgggacctcctggggaccttgctccatggaccagaggagggggtgcaggaagcaggggtggatttggcagtcagcacccagagcccttcaggctctggcagggtgggaacggtgtgagatggggccctggccacggtcccaccaccacgtgtgggaaaccaggtctcagcaggggaaggaggtacccagggaaccccatgcgcctggacggacaaggtttccatccctgcatctcagcaggccctagtaggcagcggggtcctggcatgagcagggccctctctcccctgcaggtggctcagtggcccaggccccgaggaacgtgctgaacttggggctgccgtggtgggcaggtgccacggccacacacacggtgctgtgggcagggctctgggcaggcctcacagtcagggtggcctgctccacctggacggggtgcccaaggcagtgtgcagactccaagggaggggctgctcctcccggcccaggccccaggccaagagcgcagcctgcaccgcatgtcccaccttgagccttgccctgaggggcttcggtgtcgtggaggaggctgtgtcaaatggctcatccaaggccctttagccaagaggctgagaccagcattgctccagaatggtatctgtcacagagaactgacggcatgtggtgtgcatgtgtgcgcgcctgcgggagcccattaaagccgcttgagaactgttcagcaccccagggcatcccagctggacagagctgtgcctttttcttcacatggaggctgttagggagcgcctcggggctctctggaagctttggctgaaggcgtctggtgctgcaattgccccatagggggatccctgcgggcatgtgatggtggccctggggctccccctgactctgcatctcaggtgcacccgcccttcccggctgggcccccctccctgccctcagcaccttgctcacccccatgaccgcaggcacctgtgctccagccacactgcacctggcacaggcaggctgaccatgcctcccgcagtccccagccctgcccgcaggcccaggagagtcaggcctgacactatccctgccctttagcactgcagctgcaccagcagaaggagcggttccccacgcagcaccagcgcctgagcctgggctgcccggtgctggacgcgctgctccgcggtggcctgcccctggacggcatcactgagctggccggacgcagctcggcagggaagacccagctggcgctgcagctctgcctggctgtgcagttcccgcggcagcacggaggcctggaggctggtgagtggccaccccttccgtggggtctgggcaggtgggcggcccctgctttgtgtgggacagctttccgttgaggtggggcagtggccgcctcttgcgctgttcctaccattgcgtctccctccttctcaccctgattgccctcgctccttccagaacagggagggggaagtgaggctgggctcagctgacagcaggaggggtgggagggtacgaaccccaccaccaggcagccggccctcagcagagctaggcccccaggggtcgctggctgagcacagcgatgccggcccacgttccgcacagctgccaagcccagagtccacagagccagcaacgcagggagggcagcacagcctttccccgggtgccccgccgccaggccaggtatgctcctggcgcggccccgtgagcctgtacgctctgtctgtgaaacgagggttccctgcattggactaaagcgttcagagcatgcctgcctgggtctctcaggtgttaaaagttcacgtagttttaaactgtgagctgtgaggaggagagatgtttctcagtagctccttaacttttaaactaattccctggtgtcaacatgcgattcccacgttgtcttaaactccacgtgaacagagtggcagtattttttcatcggtggcacctccgagcacatctgctaggctcacttcccacacagggccggaccccaggccctggacccacaggcccagccagccacctcctcacgggcctgacctgccagcagcggtgtggctgggaacctcacctctgccaccctcaggtcagcgtcatccccaggacccagggtgtgctgtgcctgcctgagcttcagtgctgggtggagggtgaggggtctcctgagcctccgtgtcgggtggagggtgaggggtctcctgagagcccagctggggtctgctcacgccacaggcatttttgtccctgcagcccaggggagggcaccctcttgtcaggtgcctgagtccctgcggctggtcttggggatgagcctggagacagccagaagccgggaggacaggagttggccttgaaaatgggagtctcccgcttaccgcacggaagagctgctgtgaggtggaggcgggactcgagcgtgctcaggaacgggacgggagccgccctcattctccagcgtcctccgtgccaggcttcgtgcaaatctgatttgtgcaatgactccccctcagcttccaccccgttggccttttcagtgaagcccacactccccgatacccagggacacagaagccttaggacaccctccctgaatcccccagctgtgcccagcccagtgactgctgcgggatgacagcacagtccagccttgcgggccaggggaagggagggggccccacggccaccgtgaccacatgcaaggttaggggtcagatgtgctttcctggggaaatgacttcctttcctggatccaatctaaaggcccgaattttgaaaagaaagcggcaggcgggctctgaagtgattccgactcccgtgcttaagccgcgtgaggctctcccaggcctgctggggccccgcccaccgctgggctgtccacagccaccctcctgccagcttcacgatgtccccatgactgtgcagcccctacataacgtcaccccaacaaaaacacgctgcttgaccggttccacctgcttccgagccttccagcccagcctctctccagccaacaggacggaggaagcccagggccccgaccttcctgtggctcctgactaggggcacagtcactgctggggacactggtggggaagggaaccagccacaaaagggatgtggcctcccaaggcagtatttatacgttcctggcctcaagcgggccagatgcttctcagaagcttagttctgacacagaatggggcggggggttcctgacccatttttgcaactcttctttacgtttgaaattctgtcaaagcaaaatcagctcagaattaaaggttacgcggacactcacaaacaggctgcatgacacggcgtgggggcactggctctcccacaactgcatgtgccactgcaggaacaggacgacgccccgtgggccacggggtcctggctgggcagccttcctggcatagtcagtgcttagagagctcgccggccttgtctttttgtttttgttttgcaggaaactggagttttattattactcaaatcagtccccctaagccttcctgttttttaaattgagatgtaatttacatgccataaaattccctctaaaagtgtacagttcggcctgataggcgcagtacctcatgcctgtaatcccagcactttgggaggccgaggctgaggcaggcggatcatgaagtcaggagttcgagagcagcctgaccaacatggtgaaacccagtctctactaaaaatacaaaaattagctgggcgtggtagcgcacgccttgtaatcccagctactcagaaggctgaggcaggagaatcacttgaacccgggaggcagaggttgcagtgagccgagatcgcaccactgcactccagcctgggcgacagagtgagtctcttgtctctcaaaaattaaaataaaataaataaattcagtggcttttaatagaagcacaaagttctgtgcccgtcaccactatccaattccagaacagttccctcaccccaaaaggaaaccctacccatgagcagtcagcccccacccccagcagcctgcctcccctttccctacctgtgactcttcctgtcctgggagctccatgcaagtgcagccggacagcacgtggtctcgtgacaggcttcctgcattggcattgtgttttcgaggttcatccgtgctggagcaggtgtcagaactgccttcccttttaagattcgatcatcccactgtaaggatgggccgcacttcattcgtccactcctcagttgatggcctttgggccgtctccccccgggctgtcatgaaacgtgctacggtggacgttctttctcttgggtatctacctaggagtggggctgctgagtcatgtgatttgtttaactttttaaggaagtaccgattgttttccgagctgcaccattttacattcctagcggcagtgcacaggggtcaggggtctgcctcctacacatcctcaccaacacgtgtcttttcaagctggctttttgaatttcaccatggagcccagattgcaggagctttgaagagaggaaacgcttgctcagtgggggccttgagggtggccatgtgtcggggctcaggggccatttccagaaggcgttgccctgatgctgccacttgctccctgccctgcagtggggaacggaggttcacagggggaaggaggggcagggtggagcaggagaggcctcccatctgtggccattccagcccagggcccaggacaggggaagtccttgcctgggtgtcagaagtggagacccagcccatattcctcctgaggggtcacctggccccggaggtggctgccagtgggagggtgagaaaaagcaccagcctcctccctccccaggcgaggggcaaagaacctgtgaggggcagagagttagaaatggcgggagacatctgcacttgatttgtgtggcagtcacaggcccgtctggagtcccctgggcacatcaggcactcttgcttcccaggagccgtctacatctgcacggaagacgccttcccgcacaagcgcctgcagcagctcatggcccagcagccgcggctgcgcactgacgttccaggagagctgcttcagaagctccgatttggcagccagatcttcatcgagcacgtggccgatgtggtgagtgtgggagaagccccatgacacccccaaggcaagctattcaggaccattggggcaggtgtagccaccacggcaatggggtctcacagcagggcagggagagttggggctcagctctgaacacagcatgggtcatgggggtttacgcccgaggagcaggtggggtcagaggatggagagtgactgagaggaactggcaggggagggaattctggctaaagcatcctgccaggacccttgctgaaggtgtgccttggggatcagacggcctctggggactgtggaggatggaccagtcagctactgagggcgactggatacggagagcaggggtcctgctacaatctcagcagggattgccaaaactggatttcatgaggacgtgcacagatgggcctaggaggaggctcaggagcctgacggcagtttggccaaacagaatcctggccaggagtggctgtgggccaggcaggcagggcggcaggctgcgacacccagttacatctgaatctcaggcagctttgaagcgtgttctagaatgaggatgcccatattcagatcaactttcttcatgatctgaaactcagatgtaactgggcgcctgtacaccatctgtcaaccttgcccatgaagacggagtggggaagagaagccccaggcgggtggcaaggacctcctctgggctgtgggcccctgaccagctgccccaggagaccaccgccctgagaaggatgcgacctgctctccaggctgctgccctggtgagatagctgtgttggtttccccttgcccctgaggggaagacggccctcactaggggcacaggggctccacctggccaaggcctgctgggcacccagctcagacaggtgacctcagatccttgaccactgcctggctgctggcttccctgcagacactggctgggcttggaggagggacctatggcagggccttgcagagagcaggggccactcaccgggggccagtggagtccgtcctgtagccaagaagcaggcaagagaggctgggacccatccctgcagctggggcagcagtgctgtgagctgtcagtgcttagtttatagacatcatcctgggagggagaagtgatgaagtagaaaagacgcagaagaaaagatgggacgtttgggagtaaacccctgaccaaaggcaagtaaggaaattccaccctgtgcagggggagcggctgccatgtccagcccaccctagacatggctgtggcctggcagagcagctcctgggtgggccttcccccacttctcttttttttttttaagacagtctcgctctgtcgcccaggctggagtacagtggtgcaatctcagctcactgcaagctccacctcccgggttcacgccattctcttgccttagcctccagagtaggtgggactacaggcgcccaccaacacgcccagctaattctttgtatctttaatagagacggggtttcaccatgttagccaggatggtctcgatctcctgacctggtgatccgcccacctcggcctcccaaagtgctgggattacaggcgtgagccaccgcgcccgccagccttcccccacttctaagaggtcttataaaaactttcaagtaaagcataaggcatataaacttttaatttaaaaaaatgtacaataaaatacgttatcgcacacaacgtgaggaagttacacatgggaagggagccgtgggcccagctcatgccccaggtctcctgggagagaccacgccgcaccagggcaccagcttaggcccagccccagccccaaggtcacgccagccgtgtggttattagtatcatgtcctatgcacacagacgcaggagaaatgagtgagcgctgcggctcccggccaggggccctccctgccgccctggctgtcccgggccagctccgggccacactcggcagtcccatcctggagcggggccaggtcggggtcactgcaagagaagatagaaggtcagggctgggccgccaaaacctgacagtgttactaagttctgttctggaaacagctctctggggaacccccaccccaagtctgcctagagaagagggtgttgctggttgtgagcctccctggggccgaggggtcatgggggactggtgcgtctttggtctctgctccctggagcaccaaaggcctgcgtctggcacgggggaagccaggggtgtggacacagagccttctcttgcataagcagagcctggtgccattcccacccccccactctgtggcccttgggcttgcatgaggatggggaccctgagccaagcccctcttggaggcccagcctggcagctagcagcagtcaccacttgcccatccccagctccccccagtccctgcatgtgcaaagtccctccctggcccagctgcctgcttcctggggctgcaggccgtgggactcacgttagcggtggcgtcttccaggccactgctgctgctgtcgttttccacaaaaagaggctcggccagagacgccctggagatgaagcacagacgagtttcactcagggcgtgcaggcggccctcaggcgtcttcagagctccgggcgtgacaccagcgtgtggctgcagaccttggacttgagggacagcctaggggccccttagcagcctccatctggccagagctgctggcaaggcccgtggggcctgaactacactgcttggtgccaggagcagctgtgtcaccctcccccatcaccatggctcaccaagctgtgcggtcagaggccaggccagccatgccaatggctctggcacccacaggccacggcagcacccagagggaggccgaggacacctgccttcactgggggggtcctcccctggaagctctcctgggagctggtgggcacagggctgtttccaccccttggccaggccaggccagctcagagcacagggctaaggcctggatgcacgggaggcactggccttgagggtgtctcaacctacagccccatcctgacccccaggtggtctcccagagtgccccacgccttggcagaggcaggccaggcctgactcgcctgagtaacgcctgaagggcatcaggcccctgccttgctgagcgtctgaagaggtcatggccaccacgggctggctttggtggcactgtggccaggtttgggtggtctgagtacctggtgcggggccactgaaggagggggctggttgctgctgacctgtgagggggagagggtgaaaccatggcagaaggagagcagacccccgcaaggactcaggagcctgcgcaaaggacacctctacagaggacggtgttggcacagccaaggggtgactgcctgggggggccagaggaaggacatggggccaagggaaccagttgtgtgagcctgaagcttctatagttggggcctctttgagaaaaatacagaattgggctcagagtatggggactacagagtatgggcactgtgagccccaggtgggtaggaaggttttcagacggtcgagtgacagtccaaacggggtctggtcacctggggcggggacttgctgaccagcatagacaatgacagctgtccccacaggacaccttgttggagtgtgtgaataagaaggtccccgtactgctgtctcggggcatggctcgcctggtggtcatcgactcggtggcagccccattccgctgtgaatttgacagccaggcctccgcccccagggccaggcatctgcagtccctgggggccacgctgcgtgagctgagcagtgccttccagagccctgtgctgtgcatcaaccaggtgagcaccaaggcagggttgcacccctgagctcgtatttttagccaggatgcggaagcagagccggtctggaggtggggcgggtggcagtgaggtggcctccggctcctgcgggtagcagcctgtgcctaaccatcgagaagaccctcagccgttgcagctgacctggactgtgctcttccaggtgacagaggccatggaggagcagggcgcagcacacgggccgctggggtgagtgcagccatgtggtgtgtgcacctctgtgcaggtgccaggggcacagctgggccgaagtgggcggggccaccaagcctgagcgccagcttgcctgcttcctgtttctcaggttctgggacgaacgtgtttccccagcccttggcataacctgggctaaccagctcctggtgagactgctggctgaccggctccgcgaggaagaggctgccctcggctgcccagcccggaccctgcgggtgctctctgccccccacctgcccccctcctcctgttcctacacgatcagtgccgaaggggtgcgagggacacctgggacccagtcccactgacacggtggcggctgcacaacagccctgcctgagaagccccgacacacggggctcgggcctttaaaacgcgtctgcctgggccgtggcacagctgggagcctggttcagacacagctcttccagggcagcggctccactttctcatccgaagatggtggccacagactgacccccatctgagctggggggatgttctgcctctccctgggtctggggacaggcccgcttgctgggtacctggtccccactgctgagctggcccttggggagaggtgattctcagggctggagcctggggtgtcctacagtgactccctgggagccgcctgcttcttctctccacatggaagcccaactggggttgcgtctgaggcctgccccctgggctggggcctcagaccccctcagccttgggaccgtgcccacgagggtctcccctcctgcacacagggcagtccttactcccccaccactcaggccacagtggggctgcaggcaggcggctcctcctcacccacctctgggtccttggctcccgggggccccacctcggcacacactgtgccccacaaaacttcagtgtggtacaaggtggagaaagcatatcccaccaacctccagtgtcagggtccaggagagcctgggggtggggggactgccttgtctctagtagtgtggcctgtgccagcaccacagccggtcagaggagcgcaggcagcgcagggctggcacgtgacaggctcgtcagccacctgggaacacagttctgggcaaagaggatccgaggttgagaggaaggagggtcccggtgtatcctggccctgggggtctgggcgtccagctcagccctggcctggctgggtggtattctggtagggatatggcaggactcctggcagggccacctgcaggaccctgtcctgcagtcccacactgtgcagacccagtcccacactgtggccaggccttacatctggctggaaagcagagcctcctgggaacacatctggctgcacaggctgaaatatccacccagcaggcagagtggcgtggcctccccatgggcacagtggtgacccccttgattcccaccgtacaaccccctccaccccccactcagtgcctccacatgctgcctggcacagaccaggcctttgacaaataaatgttcaatggatgcagttccagg

SEQ ID NO: 1316 - DNA, 718 bp, Homo sapiens
tatatatatataatttaacattttttcttttaatcccatccactattacagaacctatgaaattttcttcaacacctctatgtagcatttagaatgtaagctcctgatccaccagaatctgcaagaatggagtcaggagcctcagaaaaggagccacggccacaggcgagcagctcggggacaacgctggctccacagggcagctcctgggccaggcacccgctggcgactacacggagcttgtcttgtggaaacaaacgcgctttcacaaacacagcagtcctgcgacatgaggcgggatgaaactttgaaaggtattttaaagtctagccttgtaacaaaacctcaggacactctgtccccagccttcgtgccccacggggagcttctagaggctgaaggtgacaagtgtgagcctctgctgtgccaccacccaccctgttacatgacagtggcaagctgagctttcacgggatggctggtgtttcacagaccgcccctccatcccgtagcctagttggctggcatggaggtggcgctgctgagcgtcagcctttggaatcactgatcacctcggcgtctgttttgtatgctctttacctatggactagtttgtggacggctaagaaatacagcctcagcattgatttgaaaaggttcctgtcagagtccaccgtgctccctcattccataaagcttaagcttttaaaaagtgaaa

SEQ ID NO: 1317 - DNA, 18871 bp, Homo sapiens
ccaaccgtcacagggcagaggcagcaagagatttgcatctgagaaactaagccatggtcatcatggggaagtggaagggtatgtgctcatgctggggccctcactttggggcttaaggatctgggaagctggctagactctcagggctggtctttgtcacccttaagtcccccaaagaagggttgtccctttcaggccctctactatacagccataactccttagatgccccccagggcagagccagctcttatccctcacactggatcttttacttggcccagctccctctcccctccaccccagggcactcacctcttgtgcagccccctgggtccatagccctgcaaccttggtgacattaccctgcccacacccccctacccagagagcctacagaatgcagaccacttgcctcccatactgctgttacgtctcatccacctcttctgcgccgtcctcgctggaggaaaggtaggctgggaggtgagcctgtggactagagagcagctctttcagtatctctctgctgggtgagccccttgcccactgcccatctctgtccacacctgcaggagaacgggcagatggctgtaagtgatggctctgtgaagggcctgctgagtgtggtgcggggctggagccgtgggccagccccggacccgtgcctagtgccactggctctagaggcactggtaggtgcagtccatgtcttgcatgccagccgcgcacctcctcgtggcccagagcttcgtgccctgcttgagagctacttccatgtccttaatgctgactggccagctggtctgagctcaggccccgaagaggcccttgtcaccctccgggtcagcatgctcggtgggtatgggctcccaggctcttggggaaggggcaccatgagggaaaagcctaagtgatgatggaaggtctggatagggcagcataggaaggaaggcttaaggctgcctagaggggtctgggcagggcctgacccttgacccttccacagacgccatccccatgatgctggcatgtgaagaccggccagtgctgcaagccaccttcctcagcaacaattgctttgaacacctcactcggctcattcagaacagcaaggtgggtagggcccagcctgggggtgagggtctggaagccagaggctaggggagccacgcataggtgccaggctgctgctgagcaaacatgggctggacagagtcagtgttttgcagctggtgggatggcttgcagttcagtgggagggtgtggggcatggacaagggcccatcccttggggcctctataggactgggcttgaggcttaggacatctttgtgccccatggaagcggggcttgttatggaaggaagggagctgctctggtgccttgtttccctttccgtggccccaagtacaggggctagaggagggcaccactgctttcagatgcagtgcctgctcccacccgctcatccccccgactgcccatctgagcagggcacagggggctcagcaccctactcttccctagtgccgggcagggcacctggcagctgcccctggtcctgctctaaccccaccctctcccatcttcctcctctcttctttgcctcctccaccctgtgcctccccacttccccacagctgtacctgcagtcccgggcgccccccgagggggacagtgacctggctacccggttactgactgagcccgatgtccaaaaggtaccatcctggggctgaccagctcagacaccccctgggactccctctttgagcttttcctgcactatagctggggaaatgagcagatgtgtgtaaggcctggtgtggtctagaaatgggtgtgggtcctccatgctgtctcgcctgccttccaagtccccatcctagggaacaggacagaaggtggtctatcccctgcctggtgtttgattgggtgttgggggtctggctgtgccaagctggatggaaccttcgaaactcagccacctacctcatttctcagaaggggagacagaagcccagacactcaaggatttggctatagtcacagagaaaggggtctccctcatggtgccatttctttctgtagattcttgcacccaccctcagcgggtcactgggtgtcccccagcccctgatgatgtgatccctgattcaccttgcatgtgggctgtaggaggctgcagggtgtcagctggcagcttcacagcgggcaccctttctgggggctcaacctgtgggccccaacctccatagcccctaccctggctctgtcttcatgaggtaaccctatgtgttcaccgcatgtggtcattttcttagagcttacacgtctattcatctgcaaagcaggcagggcaaagtgactcccctctgtttttacagatgaggacactgaggcctggagggggaggactgatgccttaggtcacttggggagtcaggcaaagctgggaccaaagggcccatggagccgaatatgacctagtccctgctgagaaactctccaagccctcccaacccctgaccccctcagggtggggccaggagaggcagcagcatgcctctggctgtcaggttcagccaggctgagcctcagtgccccacctggatctagggggaaggggcaaggtgggacttaaaggtctcgaaggttcttctggttctaacatcctgtgattgattgtccctaaatctctgacccctgtcaatcactgtgggtgatggggcacttgctggcctgtctgtactcatgtgtctagctttagggagacaggttgggggtagggccctaactccactagagaaagggggactggagggtgcagtcagagtgtccaccattaatctgtcccagtgaggcccttcccagcctttgttagagtgggtcttgctgagctgctcagagagggccctaggtcatgatagggtcacagcagttggggcaaggagtagaaggcctggtgctctgacagagttgctgatccagcacatgccacatgccttggggtgcttggctctgcaccttttttactgcagggggctgccagctgtgacaccctggcccctgcctctcctgatggcccctccccaccccaaggtcctggaccaagacacagacgccattgcagtccatgtagtcagagtgctgacctgcatcatgagtgactccccctcggccaaggtgaggctgctgcactgcagctttagtaggggtgcggggtggagttcaactgaccatatccccagaacaggcctggccggtggccataagcatcctgctccctggagcaaagcaggcgagctgggaggtgactgccctgccctaaagctcactgggcaggtgtggtcgccagtctgtcctgggagctgcatcttctctgtcagggctggatggggaatggacacttgtaggcccacctccatctacagccttctgagatgtactcacgtcccccccatccctctgcagcccactgcccaccagcactgtcacccagaggcagagctacgcaagggaaccccaaaacatgatgcccctccagagtttccagggggtctgagtttgccctccggcccatgtatgtgttcacttcttccccatactaccttacacaggaggtgtttaaggagcgcatcggctaccctcacctgcaggaggttctgcagagccatggtccccccacccatcggctgttgcaagagctgctcaacatggtgagggaaggggcttgggaccagggtcccaaaggcaaccagaactgagtcagggttaccacagatggtgagctctccaccctgggggaccgtattgactgcggccagtacatactgttacctgtagcctggccatgtctgttagtgtcactggaatgaggattctggccctgtaggggtcctggaagcaactgcatgtgagcaagccccaggattatcttaggaacatgcagttaggggttaggccaacccaggctgaaaactaaggttgagggattaacaatgctgaaggactcttagtagtagtgactgtcatctgtgcccctctgactttcctgagcctcacacacaacctgtgggcaggatggagtagatcatgttgctgactgctgccgtaggcaagtaaatggagccagaaagtcccactgttgacagggtgccacagctgaccagggactgtcattctctccacccacaggctgtggagggtgaccacagcatgtgcccacctccaccaatccgcaacgagcagccggtactggtgctggcgcagtggctgccgtcattgcccaccgctgagctgcggctcttcctagcgcaacgcctcaggtggctctgtgacagctgccctgccagccgtgccacctgtgtgcaggcaggcctggtgggctgcctgttggagacactcagcacagggctagccctggaggcccgctgccaagagcagctgctggcactgctacaagcactgggccgtgtatcaataaggcccatggagctgcgtcacctgctgcgcccccggccaggattggactcggaaccaggcggagctgaggctggaaaggcccgacacgcaggtgctgtcatccgcacattatcaggcatggccaggcaccagggtcctgcacgtgctctgcgctactttgacctcacgcccagcatggcgggcatcatggtaccccctgtacagcgatggccagggcctggcttcacctttcatgcctggctctgtctgcaccctatggatacagcacctacccctgcccccacccgaccactccagcgaaagcagctgtacaggtgggtgactgccaggggccagggacctcctgccagggtgagcaggaacaagcagacataactggcttgcctgcccccagcttctttaccagcagcggctcagggtttgaggccttcttcacggcggccgggaccctggtggtggctgtgtgcacacggaaggagtatttgaccatgagtttgcccgaagtgtcctttgccgactctgcctgggtgagaccccatccttctcatgtggcccagtagagagaggggtgctgagtcccaagtatggcctaatgtgaggcttctgttctagcactgcgtggctatcgtccatgtgcctgggcgccggcccttcagccagaacctggtccatgtctacaaagacggccatctggtcaagacagcaccccttcgctgcccctccctcagtgaggtgtgccaagcaaggtttggggaggccttgggtagatgggaggacttggaacacagtgggcaggtgtagcctggagcccttgtgtcccgtgctgccccacaggccctgactttagccactggggtccatgcagccatgggggtcactgtgaggaactggttgtaggcggagccccaggttctgctgtgacctgaccgctcccccaaccccggccccacagcctttctcctcctgctgtatcggctccgctggataccgcacaacgaccaccaccacagggctgcccacaccaccagtccccgccaccctggcctacactcaccccgccctcacccgctcccagtcagtcccagcctccacagggcttggctgggggtccgggctggtggcccccctgcaggagggcagcatcgactctaccctcgcaggcacccaggacactcggtggggcagccccacatccctggagggtgagctgggggctgtggccatctttcacgaagccctgcaggcgacggctctgaggaccctgtgcaccctgggtatgcagcattctccatctctgccacagccccaggccagaagctaggggtccggggggagaaggcatctctgggggtctctcctgtggtcaggcagtctctggatggggtttggccagaggcctagcaaggtctgaagccccctgcccacctcccagggcccaatgagacggcacccttcaagcctgagggggagctgcatgagctcagcaccaggctgctcctccattactcacctcaggtatttgggggccccaggggagtggttggctcgactgtgctacttccccggctcccacactctgcctgccaccccctcctccctctgaccctggctgcctgcccattcccctatccctaggcttgtaagaacaacatctgcctggacctgtcccccagtcatgggcttgatgggcgcctgacgggccacagagtggagacctgggatgtgaaggtctgtgagcacgtgtgggtggtgtgtgcaggaggcatgaatatggggcacatgtgtgttcggagtcagctggggagcagcgctgtgcctggggaggatttggacagtccagctcaagagagcaaaacttcctttctgggtggtctgctggggtggagtagggcaggaaactggctggaaggtccccctcactgccatcctccttcccccaggatgtggtgaactgcgttgggggtatgggtgccctgctgcccctgctggagcgagtagctgcacagcccaaagaggctgaagcaggtccagctgaaacgcatgacctcgtgggtcctgaactgacctctggtcacaacacccagggcctggttctcccattgggtaaatcttcaggtaagtgttcctggtgcctatgttgtggagagggaatcttggcatggtaggggggtggaatgcccaaggtctcctggccactggcaggcccttgacacacatctgtccccttcctgatggctggcagaggaacggatggagaggaacgcagtggctgcttttctgctgatgctgcggaacttccttcagggtcacatggtgaaccaagagagcctggtgcagtgccaggggcctgccatcatcggggccctcctgcgaaaggtggggcccggtgggacaggcatgggggttaggggtatggtcagcctgtctgaccgaggggactgagtggggaaccctgtcagtcatgaagaacctcctgggagagttgccacttgagtggggcctgaaaggccgagcagggttgggtctggaggatctggggaaaggcccagcacaggtcggggcagggacccgcacagcaggcaggaggcttgcgtgtcagaggcggcaggaagcccccaaagggttctgagcaggctggtggccatgtttgtggccgtcatggctgtgcagggaagagtggcagctgaaaagctcagacagcagacaggcagagcctgagccctcactccagctcctgtcttatcccaggtcccaagctgggccatggacatgaacgtgctcatgtccgcccagctgctgatggagcaggtggcagctgagggcagcgggcccctcctgtacctactctaccagcatttgctcttcaactttcacctctggaccctcagtgacttcgccgtgcgcctcggtaggtgtgaggacctgagcaaggggccggccatagggcagctgagcactgagaagttagaactctgctctgggggatctgagggactcacctgttaggaatccagaatgccatggggcggctgaggggactatgaccctgccctggaagtctgacaggcacatggccctggcctggaggatctgaagggcccagctcagcctagtggcctgagccctctgctcattcccgctcaggtcacatccagtacatgtccagcatagttcgggagcacagacagaagctgcggaagaagtacggcgtccagtttatcttggatgctctgcgcacccactacaggtgaggccagtggggccagatgggccatggggggctgacacagtggcctccggccttggggactgggcggtgcgcttccctgactcacctgcccaccctctctccccgcctttctttgggacctggctgggtgtgcctactgacctgccagcccgcagcgggagcgccccctggctgctgacgacctacgcaccgtgcagacctccctcctgggcctggcgagggagttcctggtgcggagtctctcagcagatgacgtgcaggtcacgcagaccatgctgagctttttggcggccacaggcgatgacggtcaggtaggctggaggttggggagcgggaggcttgggtgaggggagtgggggcccgacacagtgtgagaccctgcatcccacaccgggggtgcgctggacctgctgctggccctgctgcacggttccctggtgcaagagtccttggctgtctttctgttggagccagggaacctcgaagtgctactggccctgctagtgcgggccgggtcactgcccctgctgcccgatcgagtctgcaaggtacacccagcccacccccctcccctggcatcccattcactggcgcccctgcctggggttcagggaggtacatcaggccttgggccaacgcatgaagctgccttcaagggcctcttgagccacacacctgcacggtgacttcccctcctacagtaactccttccacatgatgacagtcctccgatgacccccacacagatcctgcgcagactgcagcagaatgagcggctacctgagcggagccgccagcgcctccggctgcgggagtgtggtctccagggtctggttgcctgcttgcctgaggggactgtttccccccagctctgccagggcctctacaagctgttcctgggggcaggtacaacctggttaaggccaagtggagggggtgacatgtcagaaaaacagggcaggcaggccggaagaaggaagatagtggcataggggccagggctgggccctgccctttctagtctggtcagtccctcaggtccccccaacccatccccccagattgcctgaacctctcagatctgctggctgtggtacagctgtccctccaggctgacctcagcgttcgcctagacatctgtcgccaggtgagcatgagaggtaaaagctttgggggagggggagggtggcttctaccctctggccttccaccttgcctgtctcatgaggggtctctggagccctcctctgcaaaggccctggatgagggtctggagcaggcagttggatgcgtcctcacttgctgtgctctcgcctgcagcttttccacctcatctacggacagccagatgtagtgcggcttctggcccgacaggctggctggcaagatgtgctgacccggctatatgtcctggaggctgccacagccggcagcccccctccgtcttccccagagtcacctacctcccccaagccagccccacccaagccacccactgagtcacctgctgagccttcagatgtcttcctgccctcagaggccccctgccctgaccctgatggcttttaccatgctctctccccattctgcacgccctttgacctgggcctggaacggtctagtgtaggatcaggcaacactgctggtggtggcggcagcagtgggactcttactccagccagccagcccggcactccttcgccactggatgggccgcggccctttcctgctgctcctggccgccacagctccagtctctccaatgtgctggaggacggcagcctcccggagcccaccattagcggggatgatacctcgaacaccagcaacccacaggtgaggtgggcccaccctctgccactgcatggtacccaagggaggacacttctggtacacagggctggcagtgtagcctctccaaaggtgtggccctgtctgaccagggttgcagccactggtcaggcctattgctgtcccctcatagctctcatctgcagttgtgttcccagagggctcctggaacagggtgagtcatgatgagccacagtgggtgacaccagccaggcttcagaagggccctcaagagagcctgtagggcagacacctcacagggtccaagggcagcaaactccaaaggccctgccctgggcttctgggtttggggatgggcctctgcttgttctatgtgaactgcctcatctcctcttgggagtctggcaagaccccaggattctgcctggaactcaggtagtagttgagacccctataccattcttccaggcccttagtgccaggctcactgttagccaaatgctctgactcctgggtggctaccccaggaggggtgctgagtggggatgggtgggcgtcagcctgattccctcccttagccgcccacaacccacgcccacaccacccacctgtgcccacagcaaacctctgaggaagagttgtgcaatctgctcaccaacgtgctgttctcggtgacgtggcgtggcgtggaaggcagcgatgaggctgcctggcgggagcgtggccaggttttctcagtgctcacccagctgggggcctcagccacacttgtgcgcccaccagactgcatcaagcgcaggtgagagggaaagtctggagggggaggggcttcaggaagcctcgggggaaggagagaagatagtcaggtagacccttgagttccccactcacccgccagcctcctggagatgatgctggagtcagccctgaccgacatcaaagaggcccccgtgggggtcctggccagcctcacccagcaagcgctttggctgctgcgtctgctgcaggacttcctgtgtgctgaaggccatggtaaccaggaactgtggagtgagaaggtgcgacccctcagagaggcgtgagccacatgaacactcatgttcatgcaagcctgcagggatctggtctgggaggtggatgggtacacgtgcgcaggtgtgggtgcatcagcatgaatgcctgtgagtgtggacttgcctgtgtgcacaaaccctacctggcccccagcgcaaactttactttgctccctttccatggactcctggcctcccctggtgatgtctgttgggaacctgttttctgtggcagctctttgaaggtgtatgcagcctacttgatcgcctgggagcctggccccacctggccaacggcacagctgatctccgtgagatggcgcagattggcctacggcttgtacttggctacatcctgctggaagacccacaggtgagcacagggtgagcatgggggcagggggcgtgtgagatgtcgggagctccaagagtggctgggtgccactcatctctcttgcgcccacagctgcatgcccaggcctacgtgagattgcacatgctgctacagactgcagtgccagcccgccgcgaggaggcctgctatgtgctctccaagctggaggctgcactggggcgggtgctgaacacctcttccttggagtcagccactgatgaggcagggtccccacttgcagctgcagcagctgcagcagctgcagagcgctgctcctggctggtgccactggtgcgcacgctgctagaccgtgcctatgagccgctggggctgcagtggggactgccctccctgccacccaccaatggcagccccaccttctttgaagacttccaggctttttgtgccacacccgaatggcgccacttcatcgacaaacaggtgcctggaggttggggcccaggaagaggagtgggggctggggcccacatcgagcactgttctcctctgcccaatcctccaggtacagccaaccatgtcccagttcgaaatggacacgtatgctaagagccacgaccttatgtcaggtttctggaatgcctgctatgacatgcttatgagcagtgggcagcggcgccagtgggagcgcgcccagagtcgtcgggccttccaggtgtgccacccggggtaagggatgggaaactgctccacacatgcacccaggagatgactgacaatgtggagaaacgggtagggcaggcagcagccaggggactgacctattacccccaccccaggagctggtgctggaacctgcgcagaggcgggcgcgcctggaggggctacgctacacggcagtgctgaagcagcaggcaacgcagcactccatggccctgctgcactggggggcgctgtggcgccagctcgccagcccatgtggggcctgggcgctgaggtgggccgggcttggggcagggtcgctgtggaggggtggggcttgggagggagggagccacctggagccccagactgcctttggggtgaggccagggagggatgggggtgtctacagccttctaccgacccatgacctgggggacattctgcagggacactcccatcccccgctggaaactgtccagcgccgagacatattcacgcatgcgtctgaagctggtgcccaaccatcacttcgaccctcacctggaagccagcgctctccgagacaatctgggtgagggagtgtgctgagatgggtccacccaactcgattgtcccgtctcctgtcctgccttgcttctgctgagtacccttggccccttgcaggtgaggttcccctgacacccaccgaggaggcctcactgcctctggcagtgaccaaagaggccaaagtgagcaccccacccgagttgctgcaggaggaccagctcggcgaggacgagctggctgagctggagaccccgtgagtggggccctggagagattggactggtgtggtgggcaaggggtctgctccagtgtgtgcatgcctctgtgggatcaactccctgagtgtgtcctcttctgctgcccgactacgtccccctgaagggactgtccaaagccagatggtgagtgggagagtctcctaacagggctgagagttgctcttttaacagccaggcacctgaggacagcactgagaaacacaaaccagagcaggaagggggcccagggagtgggcaggggctgggtgaggggagcaggggacaagggttggcatcctggcaaaatattcagaagcccagtgggtggcaggtgggggacaggggctgggaccagtaggttctggaccctaggcagcccctccccatctctgggagtcatgagagtatataccccatgactcaatggcacttggatgccctttgggcttgtgaagaagggggtcccagagcctacagcgtgaggtgggttgctggtctttaggatggaggcagcagaactggatgagcagcgtgagaagctggtgctgtcggccgagtgccagctggtgacggtagtggccgtggtcccagggctgctggaggtcaccacacagaatgtatacttctacgatggcagcactgagcgcgtggaaaccgaggagggtgcgtcctggtggtgtggtttaggaggatggcagggaatggctgagctctgggtggggctggggtgagtgactcccgtacctgctgttcctccccataggcatcggctatgatttccggcgcccactggcccagctgcgtgaggtccacctgcggcgtttcaacctgcgccgttcagcacttgagctcttctttatcgatcaggccaactacttcctcaacttcccatgcaaggtgggcacgaccccagtctcatctcctagccagactcccagaccccagcctggccccatcccaccccatacccaggtacggaaccaggtgtactcgtggctcctgcgcctacggcccccctctcaaggctacctaagcagccgctccccccaggagatgctgcgtgcctcaggccttacccaggtgagagccctgggtgtgagggatgtgaagtcgggaccctgaatcacggggcagtgctggacagcccacctggctcacatcttgtctgcccctgtccccagaaatgggtacagcgtgagatatccaacttcgagtacttgatgcaactcaacaccattgcggggcggacctacaatgacctgtctcagtaccctgggtgagggtcccactctgcacccctccacccctgcccctctgacctgtcagcccttggttcccccaagtgtaggtacctgccagtgggccaagctctgagcttggtcaagggtagatgtgccaatgaagacctggcctctgttccctgccaacccccagaggtccccagcctcactcccttcccctccctgcctagcctctattcctcaaaaggaatcctgttccaggacactctgtccttctcccctgtgacccctctaagtggtgctcccccaacctgtgggcaggctctgtgcccgccttcttgagggtgtgggcagggcagggtgggctggtaggccatcagggccctcatgcagcccctgctcgggtgggtggccagttcccctgggtcctgcaggactacgtgtccccaaccctggacctcagcaacccagccgtcttccgggacctgtctaagcccatcggtgtggtgaaccccaagcatgcccagctcgtgagggagaagtgagcatgtgggcagggctgggctcagcgggtagggaaaggcgaggggagggcttctgctgacacgtccaactgtggccccaggtatgaaagctttgaggacccagcagggaccattgacaagttccactatggcacccactactccaatgcagcaggcgtgatgcactacctcatccgcgtggagcccttcacctccctgcacgtccagctgcaaagtggccggtgcggcccaggggctggtgggcagactagggggcagataaggggaggaggctggtcctccccacatcctgggcccacccctggctcccttcttccctccagccacagcatctccctccctgtctccattctccccacctcaccttggccccgtgcccctcccccagctttgactgctccgaccggcagttccactcggtggcggcagcctggcaggcacgcctggagagccctgccgatgtgaaggagctcatcccggaattcttctactttcctgacttcctggagaaccagaacggtaggtgtgaggtgctcacactggagcgggcaggtgtagggatggagagcagatggtggagtggccagggggcagtcgggatggacagggagacagctgacccagtcctctgtgccaggttttgacctgggctgtctccagctgaccaacgagaaggtaggcgatgtggtgctacccccgtgggccagctctcctgaggacttcatccagcagcaccgccaggctctggtgaggaaggaaccacaggcaaacggcaggcagccggggttctgaagatcatggggggtcagctgtccctgcactgattgctgcctccctactctcaggagtcggagtatgtgtctgcacacctacacgagtggatcgacctcatctttggctacaagcagcgggggccagccgccgaggaggccctcaatgtcttctattactgcacctatgagggtgggcagtgcgctggactccagtcagggccaggacaagatcaggtcgggtggatgcagagggcacgcagggagccctgactgctctgcctgccttcccaggggctgtagacctggaccatgtgacagatgagcgggaacggaaggctctggagggcattatcagcaactttgggcagactccctgtcagctgctgaaggtaaggccagcttagaggatagtggccagggatgcccatgccatggtgctgaccagccacttacccacaggagccacatccaactcggctctcagctgaggaagcagcccatcgccttgcacgcctggacactaactcacctagcatcttccagcacctggacgaactcaaggcattcttcgcagaggtgaaaggaagacaagacctcaactttatattctgtgaaatgggtttaaccccactgtccttaccaaccacgtggggcagatgggaatcctaatcaaggtcactgatttcaaggcaccttagaaaatgagctaaacatgggaagagtatgggggcaggaggggtgccttcttcatcagggccaggataaagtgtcgactcaacaagctctgaaagccttagggagatcaggagggagatctgtccttggaccccttccatcgccttcctagacaggaacattcctgaatgttgcccccaggcctgactttttttttaggtttccctctcttcctgcctttgggctagggggacaaggaataacagggtgagaggaccaagttgaaactaagtgtgatactctggaagcatcttccatgtctgtcccagcttctcacccactttctgagatgccctcctaaagtctctgcctgtttcttggagggaacctctgcatctgtgacacctactctatgacccctggggactgacagtaaaggaagggatgatgcttcagggagcagatagtgtaatctgatagtactcaggcatagctaggcctgcccttgcccctgcaggttgtcagtgatggtgtacccctggtgctagccctggtcccccaccggcagccccactccttcatcacccagggttccccagacctgttggtaagtgcattgtgcagagccccagctcagctccactcccccttgcctctgccagaaacccacctctgccccctcctgcctgcaggtgactgtgagtgccagtgggctgctgggcacccacagctggttgccctatgaccgcaacataagcaactacttcagcttcagcaaagaccccaccatgggcagccacaagtaggacagagggctgtgggtggggtgggctacaaatgccctgcacccggaattattcccctccctaatcagaatgtaggccagctgcaggggaaaggtctggccaggctccctgagggcctgggtctcttccatgtggcctggcctcacttgctatccccctcactgggtcaggacgcagcgactgctgagtggcccgtgggtgccaggcagtggtgtgagtggacaagcactggcagtggccccggatggaaagctgctattcagcggtggccactgggatggcagcctgcgggtgactgcactaccccgtggcaagctgttgagccagctcagctgccaccttggtatgaacagccttggagctggggagaatgaggcacacaggtatggggccgggttctgaggctggccagggcggatgtgactcctccgttctgcctgtaccctccccttcccatgcagatgtagtaacctgccttgcactggacacctgtggcatctacctcatctcaggctcccgggacaccacgtgcatggtgtggcggctcctgcatcaggtgtgcctcgtgggcagctctgtggggcccccgtagcccagacctgcagcccatccgtccctcagtggccttccagtcctgtcctcctctagtcttggacaaggccttcatttcctgagcctcaggggacagtcctaagccaaccctggtcctccacagggtggtctgtcagtaggcctggcaccaaagcctgtgcaggtcctgtatgggcatggggctgcagtgagctgtgtggccatcagcactgaacttgacatggctgtgtctggatctgaggtgtgtgtatgcatgtgccctggggagggtgagtttcctgggcaatccccctggagcccagactcctgcccaggaccctaagttgccttcctgcaggatggaactgtgatcatacacactgtacgccgcggacagtttgtagcggcactacggcctctgggtgccacattccctggacctattttccacctggcattggggtccgaaggccagattgtggtacagagctcagcgtgggaacgtcctggggcccaggtatggggaaggggtgcccagcaaagatggaggggcagttgggatcctgtccttgctgacactccctgcttcctccaggtcacctactccttgcacctgtattcagtcaatgggaagttgcgggcttcactgcccctggcagagcagcctacagccctgacggtgacagaggactttgtgttgctgggcaccgcccagtgcgccctgcacatcctccaactaaacacgtaagccccccatttatgggttcatggcccctgaaggtggtggtcattggtgtaggataaaggccctaggaacccacacaccatacatgtttgtgggcacatatttcaaggtttgttacctgtcccttcatcttcccatggggaggtcttgccctgggcctccgcttagccacagttgtgggagatttctttgtgtataagaatttcaatttaaccatccttaaaatgaggacagagagggtatatgggataagggatatctgctggtcgcaaagcccccttgcagtcgcaagttggtgtatatcccctctcccttccagactgctcccggccgcgcctcccttgcccatgaaggtggccatccgcagcgtggccgtgaccaaggagcgcagccacgtgctggtgggcctggaggatggcaagctcatcgtggtggtcgcggggcagccctctgaggtgaggatggggcgggggtggggaggcccctcgaacggggcggggcgtggcgcggcgatcccagctgatcctactcaacccttacgcccaccaggtgcgcagcagccagttcgcgcggaagctgtggcggtcctcgcggcgcatctcccaggtgtcctcgggagagacggaatacaaccctactgaggcgcgctgaacctggccagtccggctgctcgggccccgcccccggcaggcctggcccgggaggccccgcccagaagtcggcgggaacaccccggggtgggcagcccaggggggtgagcggggcccaccctgcccagctcagggattggcgggcgatgttaccccctcagggattggcgggcggaagtcccgcccctcgccggctgaggggccgccctgagggccagcactggcgtctgcggccgcagcagcactttttgcacagtctggggcggggttccccggcttccaagtcgctgtttcgtcaaagcacgagggccgcctgtggccttaattcctaacggcggccccggttctcccttctcggcaataaaccaggcctagttttgta

SEQ ID NO: 1318 - DNA, 574 bp, Homo sapiens
ttgtaccctactgtgatcttaaaactctctggtccaatccctttgtccccatagcctccacgcatctccacccatcccggagacacaggaggtatctccacctcctgttccctggctgctggaggatctggtgcccaggacagctgtggctgcctgttcacaggtggtcctgtgaacctgttctccctggtgaccctccacccctgggtcccctctctcctctcattggagggagactggccaggactttagataggctcagggtgggatatggcctggacagaggtgggcagggctgtgaaaaggtggtgacctattgggatattaaatgtctcagtgatgcccccatggagctgtgggcctggatctagagttggggcagcaactccaggaggggaggcacccctagggagctcctcgactttattttcccatagcctgggtgctgttattaaaacaaactggatttcatttctcctcccatcatatcccttgatgtcaacctgacgtcctcaagatgaaatcctactcctcccacagcctttctctccacttgccctgctgctcagcctgg

SEQ ID NO: 1319 - DNA, 4052 bp, Homo sapiens
gccctccggcccctctgcagctatgaggtcctccgtctctcggcaaacatactccacaaaagggggcttcagctccaactctgccagcggagggagtgggtcccaggcccgcaccagcttcagctcagtgacggtgtctcggagcagtggcagtggtggcggggcccactgtggccccggcacaggtggctttggcagccgaagcctctataacttggggggccacaagagtatctctgtcagtgtggccggaggggccttgttggggcgggctctggggggctttggctttggcagcagggcatttatgggacagggggctggcaggcagacgtttgggcctgcttgtcctcctggggggatccaggaggtcactgtcaaccagagcctgctgacccccctccatgtggagattgaccccgagatccagcgagtgcgcactcaggagcgggagcagatcaagaccctcaacaacaagttcgcctccttcatcgacaaggtgggccaagcaggaaggaggaagggagctcttggggaagaagcgggacctctaatagagggtgggctgggccagggctgctgtagcccacttgtactagggtggtggttgatagagctctggagctctcccggtctgagcctgggatgccgagacgtgggtggctggaggcggccttcaggtcttcaccgtgcctgtgcggggggagtctccagtctactcatgagtccggtttgccaagtccaccttgcccgtgttgaagcctgtcctaccaccatgattaatacgattgattgcacagtagccttacctcatcatcaaaaaatggattgtcctcatagctcctcttagtggggtggcctgcattgccttttgtcattttacagctggggaaacaatgctcaggagttgaaagagttgttcaaggctaagagcatggagccctgtttgttccattctttcaggcttggaggaggcttaagggcaagatgtgatcaaaacacagttgtgtgtgggtggggtcctaggggtaggctcccttccgcttctcctttttttacactctgagtgaagaagctcaatttggggtggacaatgaggagggtggtcaccaggtcaccaagctctgggaatgtggaatttgacctgttgcccataggcatgccctgaaccttgcccttgcctccagatggatgggagcaacacttgtgctgggatttcctggtctgtttcgctggcattgtccacctcgatcctgagccaaggcagcgggtcatgatggggaaggtctggcagacaaatgtaccttggttcagtgatttgtgtgtttccgaagaacatgcacatcccttttctcctgaggtacccacagtgcttctatgaagactcagaaatggtgatattgtgcccatttttgagatgagaaaattgaggtctagagagctcaagtgatttgcccaggatgatacaaggagttggaggcagaggcgggactgggacccaggcccctggactctgtggttcttggcactaagagttgttactgctcacaataggcacacctgctgcatgatgctcccagggcatgtgactgaggcccaggtagtgtggagatgggacctggagatattggatgacagaatatgaagcaagccgtcttgcctgcctcctcaccctctcccctagtgacttttggttttcctgtgggactgtcccagaggccaaacaagccaaaacctttctcaggattgcagaatcacagcttgggagctggaggtctgagagattgtcttggaaccccagctgggccaagaactctcgggggtcctgttaaacccacaccgtaagcctccttctgagtctatagaggaagggctcagacattggtactttaaaaaaagttttttttgggaaaaaatgttgaatttacagaaaagttgcaagaatagtacaacatactcctgtatactctttcacccagttcaccaattttcttaatttattattattattttttgagacagggtcttgctctgtttcccagactggagtgcagtggtacagtcatagctcactgcagcctccatctcttgggctcaagtgatcctcccacttcagcctcctgagtagctgggactactggtgcatgccactacacctggctaattgtcttgatttttagtggagacagtcttgctatgttgcctaggctggtcttgaactcctgagctcaagcactcctccagcttcaggctcccaaagtgtgtgattttaaacagttgatttacattttaaacagatgattttaatgcagaattaggggtcagaaacatagatctagtccagtttatgcaggacaagtgagagagggagactcagagagaaatgattcgaccaaggttaccaactagtaaattggtactgctactgagctgggcttttgtgcttattaacttggtagagttctttccatcagattggacggtcgtttccagcagtctattcccctaaggagtgcctccccacagcaaagtgtaggtgcggctgcagcgtccctatgttgccctggccttggaggggaggtggcaatggaccccatccttggctcctctggtgaccggagggtgacatcagcccaccctttctgctctggctcaggtgcggttcctggagcaacagaataaggtgctggagaccaagtgggcactgctgcaggagcagggccagaacttgggtgtcaccaggaacaacctggagcccctctttgaggcctacctgggtagcatgcggagcacgctggacagacttcagagcgagcgggggaggctggactcagagctcaggaacgtgcaggaccttgtggaggacttcaagaacaagtgaggagagcaggccaggcggggccatgtgggagtgaggaggggcagtgggaaacctgccaagagggccaccccattcccagggtcccaggcccacctgggggatgcacagacagagctggctccctcaggtgctcaggtccagcacctgctgccacctggagaattggcaggtttgtttgtaatttaaaaaagtttttaaagtagggggaatagtataatgaaccccatgttcctgtcacccagctttaatcattatcaactcataaccaatcttgttgcattttttacacctccccacttcccttcttcccgtgtagtcttttttttttacctttgcctttttctacgtgttctgattcccttgtagtcttgaagcaaatcccagacatcttgtcatttcattcactaatattttacaagttatattcatatatctgcatgtgaatgtagttcatctatgactcagtaaaacatacagtggcataatcacacctaaaaaattttaaaacaataattcctcaatatcattaaatatccagccagttttgaatttccagtgaccccatacatgtcataaatttaaaaaatacagcttatttgactcaagctccaaaggtttatatattataattggttgatatgcgtatttataacttttaaacacgcacatttaaaaatgacttttcccataaattgaccatggcaatttctaaaccttaaaatctcatcaaaagtggttggggaggagttagctggtttgaatgacactgtgttgttgaaagtgatggtaaaggtcagccactgttgacacatcttcacttgtccctctaaagcctcctaagggcttggatccaaagagatggcagctcttgattgccatattattgcacaaattctgtgcctctttccctaaaatggggtggggagagagaatgtttaaatcaaggcagaccccatgtttcttcactggttggctacattaaagaactgctccccagaggtgttcttgatcagtgagggacccatcagggcttctgtaaggctgagtgggtcccatgcctgaaaggcagagccaggctgagcctggcctgagtctcccatgtgtaacaggtacgaggatgaaatcaacaagcacactgctgcagagaacgagtttgtggtgctcaagaagg

SEQ ID NO: 1320 - DNA, 1612 bp, Homo sapiens
gcggccgcggatcctcgcgcgtgcagatcatccagacctccaccaacacctcccacaggcggatcttggagtagaggcctcgtttctgccacacatcacgcctgcccctcaccgccctctcctcaaactcctcccctccacgcccttcctgatcccctctcattcacttttcttaatgggtctcagcaattttgccaataaattcgactctaatgggggaagcagggtggataagtccaaacagcagatctctctttggagggcactggcttgcagtcagattcacagctaggcacattctcactcagaccccgctctgctggccctgctgctgttcctgctcccaccttttggaagatcggtagcccagggtgagcacaaacattccagttagaggcagaggctgcgtgagttggcaaggtagggagaagtcattgttatcattcctctgcctccaagtagaatgcccttatgccccagttcaagccactgcagctaagtattaatccccagtgctaaaagataccaggcatctagtttagcaatggagggaaacagaaacagcctgtagagagcatcgacaaggcgcataatggagagttggtatctcaaccccaagctccctttgctgtacctgggctgctctgtgaacaagaatccacgcccccctgccctgctggggaccacataatgatccctttgggggaagttgctgattgcagggcaagctagcttggtaaggaaaacctctgcaccagcggcctattcctgcctcttggtccatagcctcatacactcatgttgatggatagtatagatttgctgcccacaccagatatctgtaaggcatcactgtcctgattctgaacctctgtttcaggaagcattctcccctgtgtaaacaactcaaggtggaagtatttcagagggcatagggtcatgaatccttacccaaaggaagcctgttttagcagtggatgcaggagttgatgaacagacaagcaagttctgcttctgtcctgtttcctcctgacagctccattcttttgaagcctgacccttcctaagctctgcatcataaccactctgagaattgccccattgggtgggcatgtgaagcccagctctgttccatccaggtgcctcgggcctgaggagtctgaggatctgacttgggtcttggaagggttccaaccccaagtcagtcaggaagctgcccatttttttgcaaggcattttaatgccctttcccagacctctctagtccctcctgccttctgttctctgtagctgtgagccctttgtgagaatatgactcttaattttgaatcttatgtaagaggcttgagatgtgctggagagggcaggaagaggaaagtatcaggccttgagagagggaatgtagctttgcttctatgatctggagtcaccttcacttgctagctgagtcctaacacaacttccaagtccatgattctcttggggcattggatgggctcagtgtgggtctcttaggctgttcttgtgacttcatcatttcctggttcaaagttgtactgtcaaggggcagcatttctggtatttctataataaattgttctgtgatctcaaa

SEQ ID NO: 1321 - DNA, 1613 bp, Homo sapiens
gcggccgcggatcctcgcgcgtgcagatcatccagacctccaccaacacctcccacaggcggatcttggagtagaggcctcgtttctgccacacatcacgcctgcccctcaccgccctctcctcaaactcctcccctccacgcccttcctaatcccctctcattcacttttcttaatgggtctcagcaattttgccaataaattcgactctaatgggggaagcagggtggataagtccaaacagcagatctctctttggagggcactggcttgcagtcagattcacagctaggcacattctcactcagaccccgctctgctggccctgctgctgttcctgctcccacctttttggaagatcggtagcccagggtgagcacaaacattccagttagaggcagaggctgcgtgagttggcaaggtagggagaagtcattgttatcattcctctgcctccaagtagaatgcccttatgccccagttcaagccactgcagctaagtattaatccccagtgctaaaagataccaggcatctagtttagcaatggagggaaacagaaacagcctgtagagagcatcgacaaggcgcataatggagagttggtatctcaaccccaagctccctttgctgtacctgggctgctctgtgaacaagaatccacgcccccctgccctgctggggaccacataatgatccctttgggggaagttgctgattgcagggcaagctagcttggtaaggaaaacctctgcaccagcggcctattcctgcctcttggtccatagcctcatacactcatgttgatggatagtatagatttgctgcccacaccagatatctgtaaggcatcactgtcctgattctgaacctctgtttcaggaagcattctcccctgtgtaaacaactcaaggtggaagtatttcagagggcatagggtcatgaatccttacccaaaggaagcctgttttagcagtggatgcaggagttgatgaacagacaagcaagttctgcttctgtcctgtttcctcctgacagctccattcttttgaagcctgacccttcctaagctctgcatcataaccactctgagaattgccccattgggtgggcatgtgaagcccagctctgttccatccaggtgcctcgggcctgaggagtctgaggatctgacttgggtcttggaagggttccaaccccaagtcagtcaggaagctgcccatttttttgcaaggcattttaatgccctttcccagacctctctagtccctcctgccttctgttctctgtagctgtgagccctttgtgagaatatgactcttaattttgaatcttatgtaagaggcttgagatgtgctggagagggcaggaagaggaaagtatcaggccttgagagagggaatgtagctttgcttctatgatctggagtcaccttcacttgctagctgagtcctaacacaacttccaagtccatgattctcttggggcattggatgggctcagtgtgggtctcttaggctgttcttgtgacttcatcatttcctggttcaaagttgtactgtcaaggggcagcatttctggtatttctataataaatttttctgtgatctcaaa

SEQ ID NO: 1322 - DNA, 1611 bp, Homo sapiens
gcggccgcggatcctcgcgcgtgcagatcatccagacctccaccaacacctcccacaggcggatcttggagtagaggcctcgtttctgccacacatcacgcctgcccctcaccgccctctcctcaaactcctcccctccacgcccttcctgatcccctctcattcacttttcttaatgggtctcagcaattttgccaataaattcgactctaatgggggaagcagggtggataagtccaaacagcagatctctctttggagggcactggcttgcagtcagattcacagctaggcacattctcactcagacccgctctgctggccctgctgctgttcctgctcccacctttttggaagatcggtagcccagggtgagcacaaacattccagttagaggcagaggctgcgtgagttggcaaggtagggagaagtcattgttatcattcctctgcctccaagtagaatgcccttatgccccagttcaagccactgcagctaagtattaatccccagtgctaaaagataccaggcatctagtttagcaatggagggaaacagaaacagcctgtagagagcatcgacaaggcgcataatggagagttggtatctcaaccccaagctccctttgctgtacctgggctgctctgtgaacaagaatccacgcccccctgcctgctggggaccacataatgatccctttgggggaagttgctgattgcagggcaagctagcttggtaaggaaaacctctgcaccagcggcctattcctgcctcttggtccatagcctcatacactcatgttgatggatagtatagatttgctgcccacaccagatatctgtaaggcatcactgtcctgattctgaacctctgtttcaggaagcattctcccctgtgtaaacaactcaaggtggaagtatttcagagggcatagggtcatgaatccttacccaaaggaagcctgttttagcagtggatgcaggagttgatgaacagacaagcaagttctgcttctgtcctgtttcctcctgacagctccattcttttgaagcctgacccttcctaagctctgcatcataaccactctgagaattgccccattgggtgggcatgtgaagcccagctctgttccatccaggtgcctcgggcctgaggagtctgaggatctgacttgggtcttggaagggttccaaccccaagtcagtcaggaagctgcccatttttttgcaaggcattttaatgccctttcccagacctctctagtccctcctgccttctgttctctgtagctgtgagccctttgtgagaatatgactcttaattttgaatcttatgtaagaggcttgagatgtgctggagagggcaggaagaggaaagtatcaggccttgagagagggaatgtagctttgcttctatgatctggagtcaccttcacttgctagctgagtcctaacacaacttccaagtccatgattctcttggggcattggatgggctcagtgtgggtctcttaggctgttcttgtgacttcatcatttcctggttcaaagttgtactgtcaaggggcagcatttctggtatttctataataaatttttctgtgatctcaaa

SEQ ID NO: 1323 - DNA, 5381 bp, Homo sapiens
tttagtaaaagtggttgttatttcatgttctcagttttaaggaatgaatgagtttgacacatttacaaaggtaaaacatcaaaataaaaatagacattccagggaccttctctgtggctctgggttttccatgttggcccggggtcccctctgttggcccacagacctaggagttggctctgccctcatccatgagagtgccagcctctgggaatggacagccagcaccttgagcagggttctctgaacccaggacagcaaatgtttggggaattccaagctttctgctgtaaggagggacctcagggagccaaggtcagcctgcagcctttctgtgctcctttgcctcgcctgacaggtatgaggatgaaatcaacaagaggactggcagcgagaatgactttgtcgtcctgaagaaggtgagggaaaggggagtcctgagggtggctgtggacccaggaggctgaggggagtgaggaatccctatgggatgctctgtgacaatggcagggtggcctctacggccggcttgctgtgtatgatgcctgaatgcggggcccttacattggaactgacactgataatgactcttcaggaagccttgagttcgtatctctctggggtcctgaaagtgaaatgaagtgaaatgacagcttttgagtgtcagttacctgtagccttgggacctaaggaaggacctggggtgttggttgtgactgactgggatgtggaggttggtgtcacatctccttctggccaggaaagccaggacttgtgggtcccttattcgagtgcggtgatgaattttttaagtaaggaaataaacctagagtggctctgccactcgcctgagccagccagtgagctggtggcaggcaatgcctgggcaataaagtcaaactgtttctgcctgctattcaggatgtggatgctgcttatgtgagcaaagtggacctggagtccagggtggacactctgactggggaggtcaatttcttgaaatatttatttttgacggtgagttaagcctttataagaacctcctttcttttctcacatctcacaaggagtatgggctgtaagaggggaggcctgaaacccaacactacccactagggactcatctccccaggtaccccaactctgtgggcctggagtcagccatcctctccaccccaatcctcagaatccccaggtcggggtaatgaagatggaaggctgggagaatcctgagttaggtggaggcgaatgtgtccctggttcatggcttccaatctgtctgggaaatcacccagacatataaggggcaaaaccaaccagaaatcttcattaattctggggagttgatggagctgttaggaaactctgtgggaggtgacagtgtgagtctcaaagggagtggaacctgaccttagtgatgggggatcaaacactccaccacccggccctcttttgcctgtgtctaacttgggggtacgtgctctgggccagatgctgtgttagaagtttatgttatgggtatctccattctacagatgggaaaactgaggcactgaggggttaaattacttgcttcattacctagctagtcaatggtacagccaagactcaaaagtgagtccaagtgactccttaactagagtccattctactgcctcggagtactcatgtggtttcaaggaagaggcatgcctgccaaggagcccagctcactatggtggccaagtcagagcaaggcagagtggcagctgcaggagaagtgtgatggggagatggtatctgaacgctccaggtttaggctccttccttctccctggaggcagttaagactctccctattatctctcattgcacacaacaattccaagagcttttcccaagactacctggcccaggcttctggcttcccccgagagccttgagggagcagcagaggaaaactgaggcccccagaggagaatggaaggagtcagcctgtgcgccatgcctcgcaggagctgtctcaggtgcagactcacatcagcgacaccaacgtcatcctgttcatggacaataaccgttccctggacctggacagcatcatcgatgcagtgcggacccagtatgaactgattgcacagaggagcaaggacgaggccgaagccctgtaccagaccaaggtgggcgtggcccccagatctggtgcccagaaaaacagattcttcccagaattgtctttctcttattgcattgtctttctcttatttctgaagtaaaatgtgtttgttatacaaattctagaaattacatgtaaagattacccatctctcactaccgctattaatatgttaatatctcttctaccagttctttgtcgctattaggctagtggaaaagtgattgcggttctcgccattaaaagtaatgacgagaactgcaattacttttgcaaaaacccaataatgtttattgagaactcatatgtgttaggcactgcacaaagtgctttacttatttattattatttcattcagtccttacaacaaccaatgaggtaagaatttcgttatcaccattttataatagatagtagtgtgtgagattacttaatttccctaatgccttgtagctagtaaatggcagagccagagcttaattaaaattgggtttgtgtctacaaacccattcccctcaccactagaatgatttttattcttttttcataatggtatctattaaaatatattttttttacttttttttttttttgagatggaaactcactctatctcccaggctggagtgcagtggcctgatatcagttcactacaaactccgcctcctgggtccaagtgattctcctgcctcagcctcctgagtagctgggattacaggcacgcgccactacaccaagctaatttttgtatttttagtagtggcagggttttgccatgttggccaggctatactttctcttttacttaacacatatggatacttttctgtgacactaaataacctgccgcatttttaacagcctggtattatattgttagactacaccctcccttattagatcaactcctttgtggctaagttgttgggcacatctttggttacttcttttccataaactgacctggatctttttggatggtgaagcctctggttgaaagggtgtggctgacagtccagtcactaaattctgaacaactagcattgatgactggctttgaggatgatctgtgccaactccaatcctggctgacctctgtcccacggtcctgcacagtgttctggggtggaatggatttcgacattagactaggaagcagatggccaacagtgaaaaatagcagagtgcagattcccttgagtcgatgcttctcctacccacttcagagccctgtcctgggggtggagttctgactaatggggcaatacagagacagaaacagagatggaggggaaatgagactgaacgtggagccaatggagggcctctgaggacatgaggtcctgcttgactgctagggagatcatcctggaaaagggtgggaagctatatggtgggtggaaagagtgagggggtctcagtgtgggtaaggaccaacgtgaaggcttagatgtgtgaaaaggtggtagaaagggcatcacaaagcaggtttgtctggctgggatgagagtctgcccagagactggtgggaatgcgggaggcttgggatagtgtgagtgtgtgcatgtatacatgtgtttgcagcctgggtgagggaggtttggtatagctgtgagtatgcatgtaggggtgaccacagtgcaaggtgggtgggaatctcccaggggagagcagcccagacctactccctcctggaggggcttgtggtgggcagcacatgctgactatgatgctgcctttggccccagtaccaggagctccagatcacggcagggagacatggagatgacctgaagaacagcaagatggagattgcagagctcaaccgcaccgtccagaggctgcaggcagagatcagcaacgtgaagaagcaggtgggacgggtgcttagggagggctgaccaagccctgcacctcctacaatgccctgccagatcgagctctggaaacttaaccattaaatggtctccaactgtctctggagcagattgaacagatgcagtcactcatttcggatgctgaggagagaggcgagcaggccctccaggatgcgtggcagaagctgcaggacctggaggaggccctgcagcagtccaaggaggagctggcccggctgctgcgtgactaccaggccatgctgggggtcaagctgtccctggatgtggagatcgccacctaccgccagctgctggagggcgaggagagcaggtgggtctggcagctgtgtttctggggctaaggcttgagatgcacccatgaagctgtgggactggctatttggagaaaagataagccccacctttttgggaagattggtagcccagggtgagcagaaacattccaattagaggcagaggctgtgtgaatggacaagcctcttcacacagggagaagtcattgttatcattcctccacctccaagtagaatgtccttataccccaatccaagcctctgcagctgggtattcacccccaatgctaaaaggcttcatgaaaaccctgaaatttctctctgccccactggcttcctgacctctgctcatgcacacacatttccctaaggcttggggacacctctgatccagatgtctgtgggccacagccttctctcctcaggccctgtgggtctggctgaccgtgtgctttggttttacaggatgtcaggagagctgcagagccatgtgagcatctgtaagtagcagagcccaggggcagagagaggctggtggtgctgggtggagggagggccaggaggtggccagcagagaacggaaagtctggcattttagcttccagtcctgtgcaatagacaccaaagtaagcaagtgtaatggcaaagcctggaagaattcatttgaaataaatggttatgatttcaggtctgcttatcttaattgttatgatgcctttttattaaatgatgcctaggaggaatcagcagcggctagaactctttagggtacatattcaataaacaatgtaagtgtgttgctgagaggaaccctggcatccctttgtagtatgaagaatacttttcaagtaggaacactttcaattttcaatgtatggggtttgcaagtcgatgccacgggtgatcgaggatggaggaggctgcaggtgcaggggcgggtgcaggtgggggccttgccctgtccctctgaccccgtgtgcactgtcccctacccacagccgtgcagaacagccaggtgagcgtcaacggcggcgc

SEQ ID NO: 1324 - DNA, 913 bp, Homo sapiens
ctgcggccccggaacctgcctgccggcaagacacacccacactgagctccatggagagccaagaggcccagtgtgacctcagacccaaaggacaaaagaggacaagtctaagggatgctggaaaatcccagcaaggagctaagaaggcgaagctgcaggacacggccagagtgttcacactacgaaggagggcccgggtgtcctaacgccgggttcacacgtgtgttcacagagctacggccacacacacgccttccaaggtggcaagctacaacacctctgaactggcactttcacatttttacaaatgcagctgctgcttctcaaaaaaacaaacaaacaaacaaacaaaaaaccctccaattcagtttttataaatattaagcatgaatattaaaaggtgcttctacttttggttgtaaaaacacctgaatgactctaagactgatatgtattttcaagtctaagctgtcttacagaagatcttttataaatgtttccttataaatatctcaccattacaacaaattgttttaactgtttttctattagctctagctgcatatttgatgtaaatgacaattactgaaaaaatgtcagaaaaaacattttcagtactaacattaaagtgccatatgtaaaaaagaaaaatgtgatttgtataactaaataacacacaaacatcaagaggctatttatacaaataatttatttccactagggaaagtgcattactggtgaaggtattatcaatttattctacttgcttataatgttacagtgaatgttctggcttactctgcctcactttccattccccaaaatgatgtgtatgttgctaattttccaataaactcatatgaaccataaggaaacataaaatgcaaataaacataaatctatgttatccttt

SEQ ID NO: 1325 - DNA, 1100 bp, Homo sapiens
gagacactggctttacacaaccccactgccaaggccgtgtctttccacaccaagtcggccttccacactcctggctacccctggaaagccggctcacctttccttccaccagagtttccacataaaatctcatctacaaaggggcttggggccatttccccttacatgcaccccacaatcccagagtacccgcctcacttttacacagagcacgggctggccaccatctactcgccttacctgctggctgggagctcgcctgagtgtgacgcacccctgctgtcagtctacggaacccaagacccgagacacttcctgcctcacccggggccgatccctaagcacctggctccatctccagccacatacgatcactacaggtttttccagcaatatccctctaacctgccgattccttacggattttacaggccagagtctgcattttcctcctatggtctcagactcccacctgtcactggcctcacccgagatcagagctctcacctgcttgaagaagccaccctggtctatccagcctcgagtccttccaggttaaacccttcggaccccaacagaaaacacgtcgagttcgaaagtccaattcctgaggctaaagactcctccaaggctgggcagagagacacggaagggtccaaaatgagcccccgcgcagggagtgcagccacgggctccccagggaggccgagccccaccgacttcatgcagacgagccagacctgcgaaggcctgtacgacctctccaacaaggcagcctccagcgcactgggaagactctacccgccagagcaaagcctcacagccttcaggcctgttaagaaaagcacagaatgcctacctgcccaggctgctgagaccacagcagagtctccagtaaggtaagaaaatgtcattttcaaaacctccaagggaatgtttctggttgggttccatgagccaggcttatacttgctcacactgcttcacgcagttgcttttctaagcaagctcctactaagctttttcttggcttcttctagcctcaatgttgtgaacggagaccctcctgctccgaccggaagcgcctctctcgtctcgga

SEQ ID NO: 1326 - DNA, 1054 bp, Homo sapiens
agggggctatggttgcggatcctgctgacaatgaggacaattatataacatatactgacagcaaagaatattatgaactactttatgctaataattagaggtagtaaggagccaggagcacaccatctctcctctcccttctttgaggcaccttgggtttggggtgtggaggaatacatagtcttcaccagagagggttgtaggaaaatgcagtattttcgagaaagaactacatttcaattaaagcctggaagtggagagtattcttagtaactcagaggtggagaacattctgattaaaagataaagagtttgtaaagagagagtttgtaaactggaatgagacttccacagggcacagttggaaagggtcaggagatatgtcactatggccatcagtgaggacttaatgagggtaagagactaggaggccacaggaggatgaagtatgacctgctttcagtgttacgtgaaaatggttcaagggactgagccttgaactggagtggagctcttcctgctcatcaaaggagcgggagtgcagagacctaattctgaaagctacctagggtttctgaaagccagaaggaagatggtatccttgtgactagatgtgcagtatcctaatacttctgtttgaaagaaacacagtaatcaccaattttaagggcttatttagaactgagtgacttgggagttgaagtagacatcaacctaaacaggaagagaaaacaaaagaagaaagagatttcacacccaatgaccatgcaggaacagacatgaaaaagaactaataagaagtctcagaaatggaaaatactgtctttgaaaaaaaagttcagtagatgagataaaccataaacaagacacatagagaaatagtgaattgaaggcagtgctgagaaattctccctgactacagctcaaagaaattaagagaaaatatgaaagcgctatactgtagattcggtattctaaccagtctttcccctgaaagaaactaaacatactaaataaaatatttgaattgtctttttaaaagcaaggctaagct

SEQ ID NO: 1327 - DNA, 378 bp, Homo sapiens
tggtagcaaaaaataatgtcacccaaattagggttttgaagacaatacaggagttagatagataaagaagagagggaagggcataacacaaaggaacaggaagtattaaaatgtgcgtgttatggacttgcatacaaattgagtgctttaattttgccaagcatctttcataacactataaggaattaacagtatgagatagcataagtaagggggcctgagaacttacataaacacccttggtacatggaaagtaaatataaaatggtgctgataattctaattacatagtttatagaaaagatacatgaccaagcttgaagcaagaatgattgataaggaattaggtaggttctgtataaggaaaggtgatttcag

SEQ ID NO: 1328 - DNA, 580 bp, Homo sapiens
atcagtgaaagtggagtgtttaaggaaatttccatgcagttgatagaattttaatcctataatttcaataggtagtagctgtgtctcaggcattctaggcagtgcacagcaagagaaaagattgagataaagataaaaactggaaagaagtaggcaatcagtcatatttctgcaaagcaatgttagaaaattgcatgtgttagcttgtatacacaacttagcttacaatgttagcttgtagctaactgaatacagatgtgagagttaaaatatactctcctaacagtagaataatgattgttagagtggcagggatgatcttatagaaataaacattggacaaccagcaaaaacagtgaaagccagccatatggctatctggaggaagagcattccagctactcaaatccaaagtggtatcatggtgtgatgtctttttttttatttttgttttagagacagggtctcactatattccccaggctggtttcaaactcctgagctcctgtgattctcctgcctcagcctcctgagtatagtcacatgccaccatgcccagctaagttatatataaacataa

SEQ ID NO: 1329 - DNA, 1049 bp, Homo sapiens
cctaatctgctatatactcacaaaactatttacttcttttgaaaaaaatgtattattagatttaaatatatgtatttatatttcccttcactttttaaagttttcactttatttttatactatgttttaagcttccctaatatcccactgctgaatcccaccgacatggaatccacggcatggtgaatccctgacttacccattcctactagaagtagagccagaatctaatccagacctcctgccagccactcccagaccccttctttcccccaaagaaaatgaagaacatattttttgtgcaaagagatacaatcaggaaatttttttaaaatcagcttttattttaactgaatagcttacttagtcctggggctgtaaagtcaactgaatgatggagtcatttttttcaaaatgcgacatcttcttacccacttctcttattactctcatcattatgaaaatcacatttgtgaaaggaaatgaatttatatcaggttttctttggcatcacccaaaggaccttagtaaagaaaattaatactaattttattttctattgtgagcaccttaatacggaactgtaagaataattactatttttaatgccaaatgaagcatgtaagtattactagcttcttttttgtattaacttctatacttatctcaggagtttttatagtgatatagacattttgtgaaatagatcatgagtgaaacatagacctggtatagcttgactggggcctactttacagatttgtccttaagtactgaatataaatgtttctgcttcttattttccttagcatttttaaagaaagtcctggaagccaaaaatctccatgatgaaatatttataattattaatcactgttatatgaccttattatgtatgaaaactatattcaacatcctaaatatgaaatgtgattagttctgattttaaagatttgtgataaaacaagacaccattgatgaaatacatagaaaaaggaagacaaaatagcttgggacacattaataacttacacaaaaaattttaaaaa

SEQ ID NO: 1330 - DNA, 2952 bp, Homo sapiens
acaggctggctctgggagtcagcttctggctgatgaacagtggatgtggctcttgcggcacagagcggggtcgcagaatgctgtacgtggcgtgcatttgactcagccctcccccagctcacagtttccctcttgtttctgctcagtttttatggcacaggcctcatcgcgggccacggcttcaccagccctgaacgcacccccggggtcttcatcctcttcgatgaggaccgcttcgggttcgtctggctggagctgaaatccttcagcctgtacagccgggtccaggccaccttccggaacgcagatgcgccgtccccacaggccttcgatgagatgctcaagaacattcagtccctcacctcctgaccggccacatccttgccgccacatcccgggtggctctggggctctgaactctgacctgtgaatagaagcagcatgcactttggaaatccggccttttgaccagaacgcacacctcgtcggggggcccagtccagccaccccccagcactttatgtagagagtgtgacatagacctgcatatttgtcagtgccatgatggaagaagctgagcatgtcttaccaaaaacagagagaacgagcctgaatacagcagatgtaggggacagccgtgggaccgcgtgagaattgaagcggtggggttcccgcaccctgggctggctggtggttttctcgggaagcaggaccctcctgactggtgctcttcctgtgagcggatagagtgatagactgggtcgtgtgtgagacgcatgtgctccaccccactccttttgggggaagccaggcaacagtggcctctgggagggggtcaggaagaggcgaacagctcaggcagcgcaggtgtgatgggcacagtacgcagagcaagctcgggaagttggtaggatctcaggcttggggccgggactctggagtgaatccccatttctctaccggcttgcttggagtttggacagaagcatttcacctctgatctcagcttccccacctgtggagtgggtttagtgacctgagtcactagggaatgtcacctgaatgcacagcccagcccatgcacctgccccagcccctccagctttggagccaaggccatcgttccagccacttgactgtcctcgacggcctgttccagacagggcgtttgttttgtccatgccttcctccctgcacgcacacggcgtcaaaaccaagctgccggccactgtctccagaacgcaaggctccaggcccgtgtgtctgaagcagtgagtggtccacacaggtgccaggagtgcccatatgagatgacgaggaaacccctttgcaggtgaggggacagctttctagaaaagccacacctgcatctggggacacactttggaaagtgggaccctccagcctggagaccccatggactgatgcctccactgctgtgtgccccatgttgtgttaacacctgcgtgtggggaccccatctgaggtcttggctgaggttggcatctcctgaagaacagagagcacggtgtccagagctggcccttcccccagcccacagccagctccgtgcccgagtgggcgtccccagcgagccttccctctctgccgcttgtccttgtgtctgggctgctccaagtccttgtgctgggcaccctggacacgtcctgctggtgagggacctcgggaaggtgacagtctgtgtgccttggtgtggagaccaacctgaggatgtcctgggaaatgttttcctgatgaatttctccttgactggcctttaaagaacataagaattcccattgcccagcctcagtgcatttggcaaatgcttactttgcttcccagagtcagagaattggcaaaggttcctaaatggtaatctggccggcctgggagaaagactcacgagaaaagccagtggagaaagcgcccttccagggcggcagcagcgggagccacgcagaccccgaggcgcacctgctggctcttgtgtgtggccccagtttctagcggcttttgcagcattagcctacaagctttgtcactccctgccctctgtggtggtcactgtttttctctcttgccaaatgaggcagtctctgagtgacggtgactgtggccttgaagcctggaggactgttgggcatgtagactggcaccttgaagattcaccattgtttaaataaaatcaagcaaatgcttttttaccaagagcccgagcctcgctctaagggacgcagtcctagaggcgtgccctttggggcttgaagagcacactgtgggacgcacgtgcttctgattaaaggaatctcagatctcaattacgcttccagtgtttgggtatagaaatagcttccacccatcatgtctcagccatgggctgttggtcagttcatgtggctcctggttctggtgtgtatgttgggggcgggggtctctccatggtggtgacctgcagtgatgccaggcagggccagagccacacagccaggaaagggaggcctttttggccgcacagccagtcccttcagtcgtgactacaggtcttgttttttccgctccgatgtgtccttagccagttcttggctccggttctgtagggacaggcactgaatctgcgcgcctcaaaacagcagcttcccttccgggggagggcatccaccctctcaggggatcctgcaggtggcccatttcctgcaggtgagaactcggaagggctgatgtcgtcatcagaggcctaagggcagctgagagttggataaaaccgtttccaaggaggaggctgagtaacccagttcaggacagccaagcgcattaggcttgattggggaaggtggcaggtggagttgggaggttgggactctccatcttttgcaccacggatgcctttctgtcgctgtctcactctggggcaggatcaagtctgctctctggagtggggctgcctgcagt

SEQ ID NO: 1331 - DNA, 7755 bp, Homo sapiens
ctctgacgtggggtcaaatccggcagctcccctttctcttcccagcgccaagtccatcctcccccaccaagagggccctgcaggtgcctgtgcactgacaaagaaggacacactgtgtcctctcagcggcacagccggcagcctcttcacagcctcctgtcatatggatattcatgacctgtgttcttttggaaggagtttcggacgtggctgagggaggaatgggggcgcacgctggaggacatcttccacgagcacatgcaggagctcatcctgatgaagttcatctacaccagtcagtacgagtgagtgcggctcctgctcggtgctggggtagccctctcctggtgtgtgctggggaccagccctgtcccggtgggtgctggggcatagtcctttgtctcagtgggtgctggggttcagccctctctcctgctgggggctgggagtacagcccctctctctctgggtgcttggagcatagttcgctctttctgtgggtacttggaacacagcccctctctctgtgggtgctgggagtgcaggcctccctgtagctgctgtggcacagccccagaccccatccttcacccgggtgtctgtttttatctgatttcctgtcacccctgccaacactggcactctagagctcagccccgctcagcccagtgcggggatcccctccatggtgacttgggctcctttctcctgggtaatggagcaaactggcacttccttttccctcccacctaaagctctgccctggcgctgatgccccccttaaccccagaagtcctgttggaagcgtgcgtgctggtgggtggtgggggtgagggctcccctgggcgcattgctgcccacaggcctggtggacacctggccctggttgagctgagctgcccgccctaccccgccctgcaaagctcatccctggcaccttgggcgttctcagtcctgcctgccccacgaggtctcctgtactgacccgtccgctccccacagcaactgcctgacctaccgccgcatctacctgccgcccagccgccccgacgacctcatcaagcctggcctcttcaaaggtacctatggcagccacggcctggagattgtgatgctcagcttccacggccggcgtgccaggggcaccaagatcacggtgagtggcggctgacctggttggtggggctctgggggcacctggcccaagtgggctgtggagtcagggaacttgggcagacactgatccccggcacccttgctcctcagagtgggcttgcacctgcagccccgggagcttgggaaagcagattctcgggccccagccagccccactgaaccagaattgcatttccacgagaccctcagggagtctgtgtgcttccaaggtggccttcccacagcaccgctcagccccggccaccctggcagccctgtggggtttaggaagtctggacagcagaccccacacagaggctcagatttaactggggacagcctgggaaaggggcccctccagcagctgcatggagacccttgtgcttgcagacagctcccaccctgtctgagcttcagcagctcctctccttggagtggcctgagggtgggctgtgtggtgagcccagcagtgaacaggggctcattgtcccatgccagggctcctggcacatgctgcccgcctgccctgaatggttattggggatcctggcagacagcgcctgaaggggcgaagcctattccccgagcctccagggatcagggccacatctggcataatggggcattccctggaccccagagttttggctcctggactcctcacggagttttggggctgacgcatcttcccagggctcggctcccgagctctgcctttcaggcagacagatgtgggctgcccccttgggctgctgcccagctctgggatgttctttgaacttctctgggcgcagttgagcaggtatgagccaccgtcctcaggggcactcataggtgttgctggccctgccactttctaagggattctgagacttcttcttctgtaagggacgttgctaagtcagtaggagggctggtgccagctcgctcagccagaggtggatctgggctggagcccacacagtggtactgctgctgctgctggcctgagccctgctgactgccacctgctccacagggcgaccccaacatccccgctgggcagcagacagtggagatcgacctgaggcatcggatccagctgcccgacctcgagaaccagcgcaacttcaatgagctctcccgcatcgtcctggaggtgcgcgagagggtgcgccaggagcagcaggaaggcgggcacgaggcgggcgagggtcgtggccggcagggcccccgggagtcccagccaagccctgcccagcccagggcagaggcgcccagcaagggcccagatgggacacctggtgaggatggtggcgagcctggggatgccgtagctgcggccgagcagcctgcccagtgtgggcaggggcagccgttcgtgctgcccgtgggcgtgagctccaggaatgaggactacccccgaacctgcaggatgtggtaaggatgcggcgggtactggggcctgaaggtgggacagcatgggcttcagcgagggccccagccccacacctagcacaggcggagagggcctgtgacctcacagagggcggcagccggtgctttgggacaggagtgcggcctctgaccccttgggccatgttccccagcacctgagcaagcggccgcgcagctgggtcccgtcttggaggctcctgtccttccaccccttctggggtacctcagagctgcaggggcatgaggcttccagatgcctcacatccctgcaatagtgccgctcccccaggggcttctaaagctacttgtttgcagtcaatcaagtgaaatatcatgtaaactgtccagcagctttgaaagtagagaatgaacaaggccccttccccacccaccctgtggaaagcccgtctggtttggtgtcctcctggacagcgtcttgccggtcacctttggccatctcccggtgcgtggttcagatgtgggtcctgctttcctgccccctccctcctctgtgcctgcctgcctctgctgtgccgggccagtgccttggtggccagtggagtggacaccagctgcgactgcgtgggaggggctggcattgccgctgccactgcagggcttgggcggctgacatgggacgaggcttgcacagctgccagctcctgtctcgctgactttttttatacagttttgtctgggccaccgccttcagtgccacgggccccttgccgttcaggctgctcctcatagatgaacaaggccctgccccgtgtccttaccctttagagctgtttaaattcaaatgaactgaaactgaatatgaaaaatccaggccctcagccgcccaggccatgtttcaagtgctccatggccacatgtggctggtggacagtgcagctctagaacattccatcaccacagagggttctgctggacagtggccttgggggctgttttgagggtccgcctgtcagtctcctggcatcaaagtcattctgccattgtcaagttacagttattttccttttacctccaagccactatgtgcgtatgctgctatgtgtctgtatttcccgctaaacttcctgtcacggagggaagggtgccacaggcccagctcctggagggggtttggatgtctgggtggggggaagggtgccacaggcccagctcccggagggggtttggatgtctgggtggggggaagggtgccacagttccagctcccggagggggtttggatgtctgggcggggctttcttcatgttccatgtatgataacggtgactggggggtttacagagagaggcatacaaatagtgttggagtgttgttttcgctaatataaatgtttgaatagctaaaaaaggaaaaagctctgttacccttcaaacatctcagaactcctaatacctcacagtgggctcagagccagtttgcgagtcacagcacgtgctgcagccactgaccaggaagacctgtccagcctccgtccccagctaacctgcaggacagtccctgacgtgctgaatatgggggctcccgggcccttccctgtctagtttatggatctgcagggcctggccacggcacctgtacagggaatgcctgttgctttttttctgaccacagtgccgatggctgcacctgcctctgggccctggaacttctccccgagcttgagaagccctctgaggccaggccctggtccacggggctgttctttcccccggcctttggagcctcagtgggtgattccaggccagccccttacttctcgtcatctgttggaagaatttagctgcttgcaagacagacataagtgtcttcctgtctgatgttgacctcaaagccataaatgggtgtttgcgacttctgagttaatgtcagctgcaggctgcctgtattagagctaattgtatggggacataactcccagacattaagattttttttcacattgggcctcctttatgaaatgtgtgttttggaacagagctctctgggcctgcagagacctcgttttagttcagtgtttcagcattgtgcagtcagtgggtgaatccctcacgggtgctgcgagtcagcgcccatcccccgagcagccccgagctctggcctctgcgtccatcatcaggtgggctcggcctgcgcccttagctaccccttcagagacaggctcagcccacacccccagctgcccctgcagagacaggctggctctgggagtcagcttctggctgatgaacagtggatgtggctcttgcggcacagagcggggtcgcagaatgctgtacgtggcgtgcatttgactcagccctcccccagctcacagtttccctcttgtttctgctcagtttttatggcacaggcctcatcgcgggccacggcttcaccagccctgaacgcacccccggggtcttcatcctcttcgatgaggaccgcttcgggttcgtctggctggagctgaaatccttcagcctgtacagccgggtccaggccaccttccggaacgcagatgcgccgtccccacaggccttcgatgagatgctcaagaacattcagtccctcacctcctgaccggccacatccttgccgccacatcccgggtggctctggggctctgaactctgacctgtgaatagaagcagcatgcactttggaaatccggccttttgaccagaacgcacacctcgtcggggggcccagtccagccaccccccagcactttatgtagagagtgtgacatagacctgcatatttgtcagtgccatgatggaagaagctgagcatgtcttaccaaaaacagagagaacgagcctgaatacagcagatgtaggggacagccgtgggaccgcgtgagaattgaagcggtggggttcccgcaccctgggctggctggtggttttctcgggaagcaggaccctcctgactggtgctcttcctgtgagcggatagagtgatagactgggtcgtgtgtgagacgcatgtgctccaccccactccttttgggggaagccaggcaacagtggcctctgggagggggtcaggaagaggcgaacagctcaggcagcgcaggtgtgatgggcacagtacgcagagcaagctcgggaagttggtaggatctcaggcttggggccgggactctggagtgaatccccatttctctaccggcttgcttggagtttggacagaagcatttcacctctgatctcagcttccccacctgtggagtgggtttagtgacctgagtcactagggaatgtcacctgaatgcacagcccagcccatgcacctgccccagcccctccagctttggagccaaggccatcgttccagccacttgactgtcctcgacggcctgttccagacagggcgtttgttttgtccatgccttcctccctgcacgcacacggcgtcaaaaccaagctgccggccactgtctccagaacgcaaggctccaggcccgtgtgtctgaagcagtgagtggtccacacaggtgccaggagtgcccatatgagatgacgaggaaacccctttgcaggtgaggggacagctttctagaaaagccacacctgcatctggggacacactttggaaagtgggaccctccagcctggagaccccatggactgatgcctccactgctgtgtgccccatgttgtgttaacacctgcgtgtggggaccccatctgaggtcttggctgaggttggcatctcctgaagaacagagagcacggtgtccagagctggcccttcccccagcccacagccagctccgtgcccgagtgggcgtccccagcgagccttccctctctgccgcttgtccttgtgtctgggctgctccaagtccttgtgctgggcaccctggacacgtcctgctggtgagggacctcgggaaggtgacagtctgtgtgccttggtgtggagaccaacctgaggatgtcctgggaaatgttttcctgatgaatttctccttgactggcctttaaagaacataagaattcccattgcccagcctcagtgcatttggcaaatgcttactttgcttcccagagtcagagaattggcaaaggttcctaaatggtaatctggccggcctgggagaaagactcacgagaaaagccagtggagaaagcgcccttccagggcggcagcagcgggagccacgcagaccccgaggcgcacctgctggctcttgtgtgtggccccagtttctagcggcttttgcagcattagcctacaagctttgtcactccctgccctctgtggtggtcactgtttttctctcttgccaaatgaggcagtctctgagtgacggtgactgtggccttgaagcctggaggactgttgggcatgtagactggcaccttgaagattcaccattgtttaaataaaatcaagcaaatgcttttttaccaagagcccgagcctcgctctaagggacgcagtcctagaggcgtgccctttggggcttgaagagcacactgtgggacgcacgtgcttctgattaaaggaatctcagatctcaattacgcttccagtgtttgggtatagaaatagcttccacccatcatgtctcagccatgggctgttggtcagttcatgtggctcctggttctggtgtgtatgttgggggcgggggtctctccatggtggtgacctgcagtgatgccaggcagggccagagccacacagccaggaaagggaggcctttttggccgcacagccagtcccttcagtcgtgactacaggtcttgttttttccgctccgatgtgtccttagccagttcttggctccggttctgtagggacaggcactgaatctgcgcgcctcaaaacagcagcttcccttccgggggagggcatccaccctctcaggggatcctgcaggtggcccatttcctgcaggtgagaactcggaagggctgatgtcgtcatcagaggcctaagggcagctgagagttggataaaaccgtttccaaggaggaggctgagtaacccagttcaggacagccaagcgcattaggcttgattggggaaggtggcaggtggagttgggaggttgggactctccatcttttgcaccacggatgcctttctgtcgctgtctcactctggggcaggatcaagtctgctctctggagtggggctgcctgcagt

SEQ ID NO: 1332 - DNA, 552 bp, Homo sapiens
aaaatccaggccctcagccgcccaggccatgtttcaagtgctccatggccacatgtggctggtggacagtgcagctctagaacattccatcaccacagagggttctgctggacagtggccttgggggctgttttgagggtccgcctgtcagtctcctggcatcaaagtcattctgccattgtcaagttacagttattttccttttacctccaagccactatgtgcgtatgctgctatgtgtctgtatttcccgctaaacttcctgtcacggagggaagggtgccacaggcccagctcctggagggggtttggatgtctgggtggggggaagggtgccacaggcccagctcccggagggggtttggatgtctgggtggggggaagggtgccacagttccagctcccggagggggtttggatgtctgggcggggctttcttcatgttccatgtatgataacggtgactggggggtttacagagagaggcatacaaatagtgttggagtgttgttttcgctaatataaatgtttgaatagctaaaaaaggaaaaa

SEQ ID NO: 1333 - DNA, 1592 bp, Homo sapiens
aaacgacttctgcaggctgagattcaaggcaggtggtattggggtccctcagcccacctgggccgtgacctcaagtgtccactgctgagtgtgagtggctttgcaggcctggtggtgggagagcctcaggctccctccttcttcgttcctgaccatgccctgggccccttcagtctgcctgcggctctgtggcatccctgccctgacactgggcacctgtgcccctagcaagcccacctggcacacgaggagggaggggtgggtggccatgtccttcctctagccacatgccctgctggccgctccattctgagctttgtgcagaaccgggtctgagctggagatttttctctgagaacctgcagttgtgctgcagccgcacgcaagggcccttcagccgctggctctggcttccctgactcctcagggcgtgttcacccccaggctttctcacctgcacacggttaggccattttcagtgctcgtgggcagtcacggacagcagcagaaactcctcagcccctttgttacttcagaacgcctgcccacatgcatcttctgagctcgtgttgtcctcatggccgtggggtcttgggtgcgaacaggagatgctgagctgtggtccaccgtccaaggtgctgcagaaagcagctaggctcttttaggatgtttctattctggttgctgccttcgtggtgtaacttttaagaacacttacgggaatgtgctcatagaaccatcacctgtcctgagaataaaactcctggaatcatgatcaagtccagtgttaacgtggcccaacctgtctgtacttctggggagagaccaggaacatcactggactcctcatccccgtaattatttagagaagatgcaagcagcagatagtctccatgcggctggtactttttttgttgttttttgagacagggtcttgctctgtcacctgggctggagtgcagagcggcgatcatggctccctgaggcctcaacctactaggctcaagctgtctgcccgccttagcctcccaagtagctgggaccacaggcacccaccaccaccatgcttggctaacttgtttttgtagagatggagttttgccatgttgctcaggttggtctcgaactcccgatctcaggtgatccacccgcctcggcctcccaaagtgctgggattacaggcgtgagcccctgcgccccagccttggggcctgtctttgaatgggaatgagactgtgcaaaccgtggactaccctgtgtcacccacagctcagtggcctgcctgccggccctcaggggctgctgaccgggagaccagccagagcacgagggggtcagggctgtgtgggttttggcctgattctgcatttggttgtttctgggggccatgtagcctgcctgcattaggaaagcgctgtgccatctgatcatgagcacctctgcaccccctggtaaggtgaccttgcagcaggagctgtgccctgcctgggtaggcacccactaggtaggaccggagcaatcctggcagccgccacctgcacccgtgcacttgtttctcctcacagtttcaagtaaatccgtttttgaaggct

SEQ ID NO: 1334 - DNA, 1592 bp, Homo sapiens; identical to SEQ ID NO: 1333

SEQ ID NO: 1335 - DNA, 11189 bp, Homo sapiens
ggcctgggttctgaggaaaacgcaatggtggccatggacttgggctctccctcgctccctaagaagagcctgcctgtccctggggccctggagcaggtggccagtcggctgagcagcaaagtggctgcagaggttcctcatggcagcaaacaggagctgcaggacctcaagggtgagtggcccaggtggcatggcaggggatgctggccaggctggttacactcacaggagcactctcgtgccttggggttaatgtggggcccaaggttgcccgcagttttccctctggcaccttgaggcaccaaggttggcactcagctgtcttctctcttgaacttctactgtcctgggcatgcgtggccctgagctgcaccctcacggggcgagggacagcatccagaagcagtgggtgtggtggtccagagctcatactcagacccagctcatttgctgaatctggcctttgctagctgtgcagtctctcgcatgacaccatttcttcgtctgttgatcctaaggttgttattgactagtgacgggccctggggtggactccagggaggtgagaggagcaaaatgaatttggcccttgctcttgagggccattcaagttggggaacggggagacagagaagcagataggcaaggataaaggctctgtggaagagggtgcaggagactgcaaggaccagtgtttcgggcaggagttgagccacagagggtggttagaacttagttcagtgaggcatgtggctgtcaggtcagcgtttgtgtgaacctgttgccagggcaccccgtaggcctgaaaggttgtgaaaggtgtcccactggctggatgacagaagggctctatctcctgctgtgtgcccttgggcacaacttttccctctctgagtctcagtttctaacccttattggcaaagcagccaagctattctctgcgttgttagggtcattgtgaggtttggggggcctgacggaggcaaaacacttccatggagcctgggtgagtgggactctcaggggaggagaagcgggagagctgggccgtgggcctcacagcctgctctcccggcctctgtgttgcccttcagcccagagcctgaccacctgcgaggtctgcggtgcctgctttgagacccgaaagggcctgtccagccacgcgcgctcccacctgcggcagctgggagtggcagagtcggaaagcagcggcgcacccatcgacctcctctacgagcttgtgaagcagaagggtctgcctgacgcccaccttgggctgcccccaggcctggctaagaagtccagctcactgaaggaggtggtcgccggggccccccggcccggcttgctcagcctggccaagcccttggatgcccctgctgtcaacaaagccatcaagtcgcctcccggcttctcggccaagggcctgggccacccgcccagctctccactcctcaaaaagacaccactggccctggcgggctcccctacccctaagaatcctgaggacaagagcccccagctgtccctgagcccccggccggcctccccaaaggcacagtggcctcagtctgaggatgaggggcccttgaacctcagtgagtgtgggtcccaagagccgagggaggttctggcgctgggagggtcgggacctcaggttgggctgtagcccagggacagggcccagggtgggtgggggcggtggggactacagctcccatgtcctgggccagccaggccagagtattggtcaagcctctgcatctccttttgggccgccttggatgtggatcgtgcctcccactttactttgctgatcttcccctgaaagcctcactgcggctgatgagcctgccagggtcatgctcgccactgaggggcagctcttggctttctctgggcctgtgggtaggggcggtgaaggtaaccagggttcctgtggcctagctttctcagtggtagttggaagcatcttggatagacaggggatcacctgatgggaggtgcccacgattggtcctgtcatcaagtcttcctggctgtccaccacgcagaggcagctctctgcgcctgccggtgaagccccacctcctgggctgcctgtgggcacggcaggcagggtttgggaagaaaccctccaggtgcagtgagcaggtttaacaaggacgtcccttacaacatcaggctttcccatatctttgtggacattagagtctgggggtgaccccagggtctcaccccctgcccaatggagccccccatttggcaccttatgttcccttgaagttgcttccactgagtctgccgtgcttccaggggcagggccttgagcaggtgtgcccttggctgcgtgagcccagcagccaccatcgcccccaaatagctcccatagcagggatcctaggggagagggtctgggagtatctgattacctagaatttggtcactgcctgtctacccaaagtccttaagctctctacactcccctcgatgccaaagggctaggcaggaaacaggatgtcctgcttcccaaacttcaaaagaaatctgcggcctgagtcttggaccccccaactgcctgagcagccaaaaatcacaccagaccctcctacctcaggcccccaaggccggccaaggtggcggccgtgaaccccccctgtgttttgtctccgcagctttagatagtgacgggggcagagagctggactgccagctgtgcggtgcctggtttgagacccgcaagggcctgtctagccacgcccgtgcccacctgcgccacctgggcgtcagcgatccggacgccaagggatcccccatagacgtgctccacgggctcatcaggagggacggcgtccagatccgcctcccacccaggcgcggcgccctggcccacccggggcggccgcctcccacctccgcggccctctccttgcttccccccccaccgccggccaagaaggccaagctgaaggccgcgggtatggccagcccctgggggaagcaggacctctcggccgccgcagccgccggcattttctgggcctctgatgtggagccgtctcctctcaacctctgtaggttctcgcttcagctgccccctcctcactgcgggccctggagcccctcccggggggggggtcacagccccctccctgctggggcagggagtagacaggggcccttggcagtgggccggttctgcccagagatcttgttggcagtgggctgctaggccctctctcttggcctttgacctccatgacccttcctgagaatgaaggccaaggtggggagatcctgccttttagtgtgcagagcacccacatctgcccctgtctggatggcacatagcacctaggctgcctccctgcctcaccctgtccttgttgggacccacagagcaatggaatcttggttccatcctcctccgccaggactgagggcccatgtgctctctggagcctcccctcactcctgccgggtatctggcccccagccccgctcctccactcccttacctgcacctgccctcaccaccctaacctgtgggcgtgctgctgccgcccacgcccagccgaccaggacactcctgcaggtgaccatgctggcagttccacgatgctaactgcccctttctcctcctgctgcagcctcaggcccagagccagcacgagacatccgctgcgagttctgtggtgagttcttcgagaaccgcaagggcctctcgagccacgcgcgctcccatctgcggcaaatgggcgtgaccgagtggtacgtcaatggctcgcccatcgacacgctgcgggagatcctgaagagacggacccagtctcggcctggtggacctcccaacccaccagggccaagcccaaaagccctggccaagatgatgggcggcgcaggtcctggcagctcactggaagcccgcagcccctcggaccttcacatctcacccttggccaagaagttgccaccaccaccgggcagccccctgggccactcaccaactgcctctcctcctcctacggcccgaaagatgttcccaggcctggctgcaccctccttgcccaagaagctgaagcctgaacaaatacgggtggagatcaagcgggagatgctgccgggggcccttcatggggaactgcacccatctgagggtccctggggggcaccacgggaagacatgacacccctgaacctgtgtaagtgtgaccctgcagtagggcagggagaacagttggaggggtctcctccctgcctccccttgggggtatccagagtgcctagggttgaattggaagggaggacacgcaggtagagaggacacagggttagctgtgtattcctgctatgcagacccctgcaactgagctgctgctcaattgtcctttattcatttgagaagcaggattgtgtcattcagtgacagcagaaagattccatctcttgtgccatttcaatcgattggtagtggctgccagccagactcctagggagaaagactgcggggatccattagtgatgtctgctacagcaggagcgtagggactggcagtgaacgtctgaactgtgtctttctgacatttttggtaattaagtgcttgacattgggagtcaagtgtgagttaagatctctgttcctccacagtctagctttatgtgaccttgggcaagtttcctcatttggaagatggagatcagcatagtcccaactctgtctggttttcttgaggattaagtgggataaagcacttagcacagcacctggttacagaaaactctgtatgccatcattgtaatgtcacttgctcgcttgcctgtcacaccagcactgtgttcattctgctcaggttgattggatgcccactgtgtgctgagcaggtgagggcagcccaggcttgtgccttagcgctcacgtgtgttgtgtaccagctctgtgccccatgctgagagctgttcccattttagaccgtcccaaagtaacactgggaggtaggggttttcatctccattttgcagcggaggaaacaggctcagagagggaaagtgacttgcccaggatcatacagggaggtatcttgaagccagctagaatttgaagtgacagaacaagcagaagagccagatgttaaaagggcctctggaagcccagatgagggagcaggttgttgcggtctggtgggtggtgtggacaggggtagctaggcagctggcactgatacgggggctttgagcttggaggcttcctgcccgcagccgccgcctccttctcctcctcctcctcctcctcctcctcctcctcctcctcctcctcctcctcctcctccctcctccctcctcctcctccctcctcctccctcctcctccctcctcctcctcctcctcctccttccccctaccctggatcccctgcagcgtcccgggcagagccggtgcgcgacatccgctgtgagttctgcggcgagttcttcgagaaccgcaagggcctgtcgagtcacgcgcgctcacacctgcggcagatgggtgtgaccgagtggtccgtcaatggttcgcccatcgacacactgcgagagatcctcaagaagaagtccaagccgtgcctcatcaagaaggagccaccggctggagacctggcccctgccctggctgaggacgggcctcccaccgtggcccctgggcccgtgcagtccccactgccgctgtcgcccctggctggccggccaggcaaaccaggtgcagggccggcccaggttcctcgtgagctcagcctgacgcccatcactggggccaagccctcagccactggctacctgggctcagtggcagccaagcggcccctgcaggaggaccgcctcctcccagcagaggtcaaggccaagacctacatccagactgaactgcccttcaaggcaaagacccttcatgagaagacctcccactcctgtaagcagcgggcggcagggtcctgggagggcgaccgccagggcctgccaggccaggcaatgccacaagcgtgcacactgaccccaagtggggcccccatggctgggtctgtgtgggaggcgggattggcacctggcctgggcagggccatctgggtgcacctgccccctttgggctgtgactcagcagcaccccctccgccccgcagccaccgaggcctgctgcgagctgtgtggcctttactttgaaaaccgcaaggccctggccagccacgcacgggcacacctgcggcagttcggcgtgaccgagtggtgcgtcaatggctcgcccatcgagacactgagcgagtggatcaaacaccggccccagaaggtgggcgcctaccgcagctacatccagggcggccgccccttcaccaagaagttccgcagtgccggccatggccgtgacagtgacaagcggccgtccctggggctggcacccgggggcctggccgtggtcggccgcagtgccggaggggagccagggcccgaggctggccgggcagccgacggtggtgagcggcctctggcagccagcccgccaggcaccgtgaaggctgaggagcaccagcggcagaacatcaacagtgagtgcttggtggaggagggtcgggagcgcagcgggcacctgtcaggcccacccagccactccccaggcgctctgctgtggcccttaagtcctttctccagttgcttacccattcacccatccatcccccatcccacccatccaggtagcatcagtcctcagctcttgtgtattccaagtctctgcagcatccacccctcccactcatctcccgtccccctctccaccttagaatttgaacgccgacaagcccgccctccagatgcctccgcagcccggggaggcgaggacaccaatgacctacagcagaagctggaggaggtgcggcaacccccaccccgagtccggccagtcccctccctggtgccccggcccccccagacatcacttgtcaagttcgtgggcaacatctacaccctcaaatgcaggtaggctgcccctgggggagggagggagaccacctgagtggaccttggtcacccggagccttggaacaggatagggtttggtggaagctgggaggtgtcgcctcagtggctgcccttgggtgtggtggggctcaggctaaaggctgacaccctgagctttgtagcctgcgagacctgggttcaaatcccaactctgccacttaccagcttagtgacctcagggaaggacttacctgctccttacctcaatttcctcactcataaaagcgggttgataacaaacctaccttacagatttgttacgaggagtaagtgaatttaatatttataaagcactcagaactgcctggcacatggtaagtaagcactcaactagtgtctggctcaagaaaaaagtagatcttagttaattcttaccaaagtccacaagtacattgaagagcagcgaactgggactctgagacgtgaggtgacttgcctgaggccatacaggccaagtcagaagtcagagtcaaagccacgtcttgagccatggagcttgggctccaggcctctgtgctgtgaggcctttttaggtgccaggaagacaggaggaggtggggggcttggtgcgttgggtaggatttgcttctctgtgccctctactgtctcagattctatgtatctgccagatggcaggggtacctggaagccagtagcccttacctggcaccagtgacttctgagcacagaggcaggggtctctgtgagaccctgccatgaccccatggtgagtggaggtggctgtccatgggaaacgcctgacttctgggtccctcttcccccgcctcctgggctggctctgtccacactgagtagcagcaggtgtgcccagggatgctggcaaggctatgcttccgcctctcctcacagcactggccactccctctctctgttcccccatgcaggttctgtgaggtggaattccagggccccctctccatccaggaagagtgggtgcggcacttacagcggcacatcctggagatgaacttctccaaagcggaccccccacctgaggagtcccaggccccgcaggcacagacagcggcggcagaggctccctaacacaaaagcattccagatcccctctcgtgccacctctgtctcctcttcttcctcctctgtgtccttgtccctcttcctctttctttccgtttccaaaggagcaagccaaaacctcaaaccggcgccccttgggggccgggcacactacagccagggcgccgggagccagctagctgcccttcccccagcccgaggactctggggccacagggtgtcttccttcagcccatgcccacctggtccagcaggggcagcagccaggtctctgatggcagccggtctggtcacaggggaggacagcactcccccgtctagcagccaggcagggcgatgtctgccatccgtggccatttgcaaagaccccaaagacccctgttctggttccctctctcccccatgaatatcctctcacacacatgtacatgcgaacacacacaacacgcacctcgtgagacccgggacctgccccggacccccagttcctgggttgaacgaccacatcatgccacggtgcttgctcaggggaagccacgctccctctgtggggcctgctggggcctgggagccccccactgagcccacaatgccacggaaatccttgttggctgcccccgagaggggccttcccagctgggaagagctcagagctgacagctgcctcctgccatgtcaaggccccccaaagagcctcaggggctctggggccctggagggtggggttggggggtgggactctcctcccccactcctgctccctctcccttttcactgttgctttctatgtatagctccctagacctttcacttttttaaaaacgcgttttgtgtagagaataaggaacgtggatctttttattttgcaatcctgggccagctagaagccaggagctgattgaccttttaacttttttcagtggccacattttggttatcgatgtacctagaagtatgtaaattagattaaatttctcttctggaaacaccctggggcaggcggccagcgtgtgtttttctgtcaagtggacaggctggcattggctggcagccggggctgggatcggggcctcctctgtccagagcgccatggaggccctgggttttccagttggccgccaagccgaccagacgcagctggggatgagcccaagttcccagctgttggctctttaggccatggctgggagggggtctctggctggctggcaaagcggctccagtgagcagatgaaccagggttctgggcagcctgtctgggaagggagccaggatcaagaagcagttgaggctagaggagcttatcaaaggcaggagctaccagcgagggtgtcagggacccgttgggagcatttgggtgggggccagtggggttgtagagagctggaactcacctgcttttaatacatgtgacttctagtgagacacatgcacccctgacccaaggaacatgcggggaaaagaggagccactggctcctttgcgatgttatttattttctcgctctgcaaatgtttattgaacatttctgagattttaagagattttgttggctgctccttcttgtttattgcatgtggtttttcagctcatcgtttttactaaacggtcaagtgctggagagtgggaacgacctcatggcgtgtggacagaaggggccacctctacccccagccctgctttctgggccctcccaccataccccttcctgggaaggagggattaacaggctgcaataacgcccacaagggtggtcttggcccacacgtctgctcctgtggggtcaggacgcacatctcgcctggtggcagaaggccgcaaccacttctctccatcctgtgctgtgggtgggtggatgtatccaggacttaggaagcagggagagcatcttgtgagctgactcaaaggtgtttcttcctctttcaacttttcataagtcagtttttatttttttattttattttttgagacagggtctcattttgttgcccaagctggagtgcagtgtagggacctcggctcgctgcagtctctgcctcctgggttcaagtgattctcctgcctcagccatccaggtagctgggatcacaggcatgcaccaccacccctggcttatatctgtaatttttgtagagacgggggtttcaccatgttgcccgggctggtcttgaactcctgagctcaagtgatcagcctcccaaagtgctgggattacaggcgtgagccactatgcccggcccgtaagtcagtttttgaaatataaaagtggtataggctagatgtgacaaaaaacagtcaaatgatacaagagcttataaagtcatatggcaagttcctccccaccaatcatgcagtgaagtgagggtcatgtgtgtccttggaagagtcacctccagttcttgcagggggatgttttcctaaaactttctgagcattgctcttctctgctcaagccacttcaatacacctcaggcagcaaagtctcagcttttgagccgtggtctctgagggtgttggatgtgaacgaaatcaaatcggtacaatgatgactgtggcaagtgcgatgaaggaacgaacctgcagggcgcagaagacgtgtcctggggccctgccttggtttggaagacaggcaggcatccctgaggctgatggggagatgaaccccgaagccagagtgcttatccgtcagatctctgcttcatgtttggagtttgctcacttaacacatcagaagtggctttgttccgtatggcagcaagttctgcagaagcctcatttgggtggggggagttttattaaaacagtttatcatggagaattccaactatacaaaagtagagcaaacagtaaaatggactctcatctatccatcaccaacccatgaccaatgtcttcagctgtcagagatttatcttatagctccttgcttcctcctcctctctctacctgtctgaattgtgtgaagcacatcctggccataagatcagttaacttcttagtatttcagtatgtttctctcaacgttgtaaatgccactattacacctaaagaaatcaacaatatcaaaaagaaacagcataccttaaa

SEQ ID NO: 1336 - DNA, 9953 bp, Homo sapiens
gcttgtgaagcagaagggtctgcctgacgcccaccttgggctgcccccaggcctggctaagaagtccagctcactgaaggaggtggtcgccggggccccccggcccggcttgctcagcctggccaagcccttggatgcccctgctgtcaacaaagccatcaagtcgcctcccggcttctcggccaagggcctgggccacccgcccagctctccactcctcaaaaagacaccactggccctggcgggctcccctacccctaagaatcctgaggacaagagcccccagctgtccctgagcccccggccggcctccccaaaggcacagtggcctcagtctgaggatgaggggcccttgaacctcagtgagtgtgggtcccaagagccgagggaggttctggcgctgggagggtcgggacctcaggttgggctgtagcccagggacagggcccagggtgggtgggggcggtggggactacagctcccatgtcctgggccagccaggccagagtattggtcaagcctctgcatctccttttgggccgccttggatgtggatcgtgcctcccactttactttgctgatcttcccctgaaagcctcactgcggctgatgagcctgccagggtcatgctcgccactgaggggcagctcttggctttctctgggcctgtgggtaggggcggtgaaggtaaccagggttcctgtggcctagctttctcagtggtagttggaagcatcttggatagacaggggatcacctgatgggaggtgcccacgattggtcctgtcatcaagtcttcctggctgtccaccacgcagaggcagctctctgcgcctgccggtgaagccccacctcctgggctgcctgtgggcacggcaggcagggtttgggaagaaaccctccaggtgcagtgagcaggtttaacaaggacgtcccttacaacatcaggctttcccatatctttgtggacattagagtctgggggtgaccccagggtctcaccccctgcccaatggagccccccatttggcaccttatgttcccttgaagttgcttccactgagtctgccgtgcttccaggggcagggccttgagcaggtgtgcccttggctgcgtgagcccagcagccaccatcgcccccaaatagctcccatagcagggatcctaggggagagggtctgggagtatctgattacctagaatttggtcactgcctgtctacccaaagtccttaagctctctacactcccctcgatgccaaagggctaggcaggaaacaggatgtcctgcttcccaaacttcaaaagaaatctgcggcctgagtcttggaccccccaactgcctgagcagccaaaaatcacaccagaccctcctacctcaggcccccaaggccggccaaggtggcggccgtgaaccccccctgtgttttgtctccgcagctttagatagtgacgggggcagagagctggactgccagctgtgcggtgcctggtttgagacccgcaagggcctgtctagccacgcccgtgcccacctgcgccacctgggcgtcagcgatccggacgccaagggatcccccatagacgtgctccacgggctcatcaggagggacggcgtccagatccgcctcccacccaggcgcggcgccctggcccacccggggcggccgcctcccacctccgcggccctctccttgcttccccccccaccgccggccaagaaggccaagctgaaggccgcgggtatggccagcccctgggggaagcaggacctctcggccgccgcagccgccggcattttctgggcctctgatgtggagccgtctcctctcaacctctgtaggttctcgcttcagctgccccctcctcactgcgggccctggagcccctcccggggggggggtcacagccccctccctgctggggcagggagtagacaggggcccttggcagtgggccggttctgcccagagatcttgttggcagtgggctgctaggccctctctcttggcctttgacctccatgacccttcctgagaatgaaggccaaggtggggagatcctgccttttagtgtgcagagcacccacatctgcccctgtctggatggcacatagcacctaggctgcctccctgcctcaccctgtccttgttgggacccacagagcaatggaatcttggttccatcctcctccgccaggactgagggcccatgtgctctctggagcctcccctcactcctgccgggtatctggcccccagccccgctcctccactcccttacctgcacctgccctcaccaccctaacctgtgggcgtgctgctgccgcccacgcccagccgaccaggacactcctgcaggtgaccatgctggcagttccacgatgctaactgcccctttctcctcctgctgcagcctcaggcccagagccagcacgagacatccgctgcgagttctgtggtgagttcttcgagaaccgcaagggcctctcgagccacgcgcgctcccatctgcggcaaatgggcgtgaccgagtggtacgtcaatggctcgcccatcgacacgctgcgggagatcctgaagagacggacccagtctcggcctggtggacctcccaacccaccagggccaagcccaaaagccctggccaagatgatgggcggcgcaggtcctggcagctcactggaagcccgcagcccctcggaccttcacatctcacccttggccaagaagttgccaccaccaccgggcagccccctgggccactcaccaactgcctctcctcctcctacggcccgaaagatgttcccaggcctggctgcaccctccttgcccaagaagctgaagcctgaacaaatacgggtggagatcaagcgggagatgctgccgggggcccttcatggggaactgcacccatctgagggtccctggggggcaccacgggaagacatgacacccctgaacctgtgtaagtgtgaccctgcagtagggcagggagaacagttggaggggtctcctccctgcctccccttgggggtatccagagtgcctagggttgaattggaagggaggacacgcaggtagagaggacacagggttagctgtgtattcctgctatgcagacccctgcaactgagctgctgctcaattgtcctttattcatttgagaagcaggattgtgtcattcagtgacagcagaaagattccatctcttgtgccatttcaatcgattggtagtggctgccagccagactcctagggagaaagactgcggggatccattagtgatgtctgctacagcaggagcgtagggactggcagtgaacgtctgaactgtgtctttctgacatttttggtaattaagtgcttgacattgggagtcaagtgtgagttaagatctctgttcctccacagtctagctttatgtgaccttgggcaagtttcctcatttggaagatggagatcagcatagtcccaactctgtctggttttcttgaggattaagtgggataaagcacttagcacagcacctggttacagaaaactctgtatgccatcattgtaatgtcacttgctcgcttgcctgtcacaccagcactgtgttcattctgctcaggttgattggatgcccactgtgtgctgagcaggtgagggcagcccaggcttgtgccttagcgctcacgtgtgttgtgtaccagctctgtgccccatgctgagagctgttcccattttagaccgtcccaaagtaacactgggaggtaggggttttcatctccattttgcagcggaggaaacaggctcagagagggaaagtgacttgcccaggatcatacagggaggtatcttgaagccagctagaatttgaagtgacagaacaagcagaagagccagatgttaaaagggcctctggaagcccagatgagggagcaggttgttgcggtctggtgggtggtgtggacaggggtagctaggcagctggcactgatacgggggctttgagcttggaggcttcctgcccgcagccgccgcctccttctcctcctcctcctcctcctcctcctcctcctcctcctcctcctcctcctcctcctccctcctccctcctcctcctccctcctcctccctcctcctccctcctcctcctcctcctcctccttccccctaccctggatcccctgcagcgtcccgggcagagccggtgcgcgacatccgctgtgagttctgcggcgagttcttcgagaaccgcaagggcctgtcgagtcacgcgcgctcacacctgcggcagatgggtgtgaccgagtggtccgtcaatggttcgcccatcgacacactgcgagagatcctcaagaagaagtccaagccgtgcctcatcaagaaggagccaccggctggagacctggcccctgccctggctgaggacgggcctcccaccgtggcccctgggcccgtgcagtccccactgccgctgtcgcccctggctggccggccaggcaaaccaggtgcagggccggcccaggttcctcgtgagctcagcctgacgcccatcactggggccaagccctcagccactggctacctgggctcagtggcagccaagcggcccctgcaggaggaccgcctcctcccagcagaggtcaaggccaagacctacatccagactgaactgcccttcaaggcaaagacccttcatgagaagacctcccactcctgtaagcagcgggcggcagggtcctgggagggcgaccgccagggcctgccaggccaggcaatgccacaagcgtgcacactgaccccaagtggggcccccatggctgggtctgtgtgggaggcgggattggcacctggcctgggcagggccatctgggtgcacctgccccctttgggctgtgactcagcagcaccccctccgccccgcagccaccgaggcctgctgcgagctgtgtggcctttactttgaaaaccgcaaggccctggccagccacgcacgggcacacctgcggcagttcggcgtgaccgagtggtgcgtcaatggctcgcccatcgagacactgagcgagtggatcaaacaccggccccagaaggtgggcgcctaccgcagctacatccagggcggccgccccttcaccaagaagttccgcagtgccggccatggccgtgacagtgacaagcggccgtccctggggctggcacccgggggcctggccgtggtcggccgcagtgccggaggggagccagggcccgaggctggccgggcagccgacggtggtgagcggcctctggcagccagcccgccaggcaccgtgaaggctgaggagcaccagcggcagaacatcaacagtgagtgcttggtggaggagggtcgggagcgcagcgggcacctgtcaggcccacccagccactccccaggcgctctgctgtggcccttaagtcctttctccagttgcttacccattcacccatccatcccccatcccacccatccaggtagcatcagtcctcagctcttgtgtattccaagtctctgcagcatccacccctcccactcatctcccgtccccctctccaccttagaatttgaacgccgacaagcccgccctccagatgcctccgcagcccggggaggcgaggacaccaatgacctacagcagaagctggaggaggtgcggcaacccccaccccgagtccggccagtcccctccctggtgccccggcccccccagacatcacttgtcaagttcgtgggcaacatctacaccctcaaatgcaggtaggctgcccctgggggagggagggagaccacctgagtggaccttggtcacccggagccttggaacaggatagggtttggtggaagctgggaggtgtcgcctcagtggctgcccttgggtgtggtggggctcaggctaaaggctgacaccctgagctttgtagcctgcgagacctgggttcaaatcccaactctgccacttaccagcttagtgacctcagggaaggacttacctgctccttacctcaatttcctcactcataaaagcgggttgataacaaacctaccttacagatttgttacgaggagtaagtgaatttaatatttataaagcactcagaactgcctggcacatggtaagtaagcactcaactagtgtctggctcaagaaaaaagtagatcttagttaattcttaccaaagtccacaagtacattgaagagcagcgaactgggactctgagacgtgaggtgacttgcctgaggccatacaggccaagtcagaagtcagagtcaaagccacgtcttgagccatggagcttgggctccaggcctctgtgctgtgaggcctttttaggtgccaggaagacaggaggaggtggggggcttggtgcgttgggtaggatttgcttctctgtgccctctactgtctcagattctatgtatctgccagatggcaggggtacctggaagccagtagcccttacctggcaccagtgacttctgagcacagaggcaggggtctctgtgagaccctgccatgaccccatggtgagtggaggtggctgtccatgggaaacgcctgacttctgggtccctcttcccccgcctcctgggctggctctgtccacactgagtagcagcaggtgtgcccagggatgctggcaaggctatgcttccgcctctcctcacagcactggccactccctctctctgttcccccatgcaggttctgtgaggtggaattccagggccccctctccatccaggaagagtgggtgcggcacttacagcggcacatcctggagatgaacttctccaaagcggaccccccacctgaggagtcccaggccccgcaggcacagacagcggcggcagaggctccctaacacaaaagcattccagatcccctctcgtgccacctctgtctcctcttcttcctcctctgtgtccttgtccctcttcctctttctttccgtttccaaaggagcaagccaaaacctcaaaccggcgccccttgggggccgggcacactacagccagggcgccgggagccagctagctgcccttcccccagcccgaggactctggggccacagggtgtcttccttcagcccatgcccacctggtccagcaggggcagcagccaggtctctgatggcagccggtctggtcacaggggaggacagcactcccccgtctagcagccaggcagggcgatgtctgccatccgtggccatttgcaaagaccccaaagacccctgttctggttccctctctcccccatgaatatcctctcacacacatgtacatgcgaacacacacaacacgcacctcgtgagacccgggacctgccccggacccccagttcctgggttgaacgaccacatcatgccacggtgcttgctcaggggaagccacgctccctctgtggggcctgctggggcctgggagccccccactgagcccacaatgccacggaaatccttgttggctgcccccgagaggggccttcccagctgggaagagctcagagctgacagctgcctcctgccatgtcaaggccccccaaagagcctcaggggctctggggccctggagggtggggttggggggtgggactctcctcccccactcctgctccctctcccttttcactgttgctttctatgtatagctccctagacctttcacttttttaaaaacgcgttttgtgtagagaataaggaacgtggatctttttattttgcaatcctgggccagctagaagccaggagctgattgaccttttaacttttttcagtggccacattttggttatcgatgtacctagaagtatgtaaattagattaaatttctcttctggaaacaccctggggcaggcggccagcgtgtgtttttctgtcaagtggacaggctggcattggctggcagccggggctgggatcggggcctcctctgtccagagcgccatggaggccctgggttttccagttggccgccaagccgaccagacgcagctggggatgagcccaagttcccagctgttggctctttaggccatggctgggagggggtctctggctggctggcaaagcggctccagtgagcagatgaaccagggttctgggcagcctgtctgggaagggagccaggatcaagaagcagttgaggctagaggagcttatcaaaggcaggagctaccagcgagggtgtcagggacccgttgggagcatttgggtgggggccagtggggttgtagagagctggaactcacctgcttttaatacatgtgacttctagtgagacacatgcacccctgacccaaggaacatgcggggaaaagaggagccactggctcctttgcgatgttatttattttctcgctctgcaaatgtttattgaacatttctgagattttaagagattttgttggctgctccttcttgtttattgcatgtggtttttcagctcatcgtttttactaaacggtcaagtgctggagagtgggaacgacctcatggcgtgtggacagaaggggccacctctacccccagccctgctttctgggccctcccaccataccccttcctgggaaggagggattaacaggctgcaataacgcccacaagggtggtcttggcccacacgtctgctcctgtggggtcaggacgcacatctcgcctggtggcagaaggccgcaaccacttctctccatcctgtgctgtgggtgggtggatgtatccaggacttaggaagcagggagagcatcttgtgagctgactcaaaggtgtttcttcctctttcaacttttcataagtcagtttttatttttttattttattttttgagacagggtctcattttgttgcccaagctggagtgcagtgtagggacctcggctcgctgcagtctctgcctcctgggttcaagtgattctcctgcctcagccatccaggtagctgggatcacaggcatgcaccaccacccctggcttatatctgtaatttttgtagagacgggggtttcaccatgttgcccgggctggtcttgaactcctgagctcaagtgatcagcctcccaaagtgctgggattacaggcgtgagccactatgcccggcccgtaagtcagtttttgaaatataaaagtggtataggctagatgtgacaaaaaacagtcaaatgatacaagagcttataaagtcatatggcaagttcctccccaccaatcatgcagtgaagtgagggtcatgtgtgtccttggaagagtcacctccagttcttgcagggggatgttttcctaaaactttctgagcattgctcttctctgctcaagccacttcaatacacctcaggcagcaaagtctcagcttttgagccgtggtctctgagggtgttggatgtgaacgaaatcaaatcggtacaatgatgactgtggcaagtgcgatgaaggaacgaacctgcagggcgcagaagacgtgtcctggggccctgccttggtttggaagacaggcaggcatccctgaggctgatggggagatgaaccccgaagccagagtgcttatccgtcagatctctgcttcatgtttggagtttgctcacttaacacatcagaagtggctttgttccgtatggcagcaagttctgcagaagcctcatttgggtggggggagttttattaaaacagtttatcatggagaattccaactatacaaaagtagagcaaacagtaaaatggactctcatctatccatcaccaacccatgaccaatgtcttcagctgtcagagatttatcttatagctccttgcttcctcctcctctctctacctgtctgaattgtgtgaagcacatcctggccataagatcagttaacttcttagtatttcagtatgtttctctcaacgttgtaaatgccactattacacctaaagaaatcaacaatatcaaaaagaaacagcataccttaaa

SEQ ID NO: 1337 - DNA, 361 bp, Homo sapiens
cttatccttcttttcaatcaaacccataaataccacagactccaatagccatggattgctgtgcctctcgaggctgcagtgtccccaccgggcctgccaccaccatctgctcctccgacaaatcctgccgctgtggagtctgcctgcccagcacctgcccacacacagtttggttactggagcccacctgctgtgacaactgtcccccaccctgccacattcctcagccctgcgtgcccacctgcttcctgctcaactcctgccagccaactccaggcctggagaccctcaacctcaccaccttcactcagccctgctgtgagccctgcctcccaagaggctgctaatggatggctacttt

SEQ ID NO: 1338 - DNA, 361 bp, Homo sapiens; identical to SEQ ID NO: 1337

SEQ ID NO: 1339 - DNA, 519 bp, Homo sapiens
gccttatccttcttttcaatcaaacccataaataccacagactctaatagccatggattgctgtgcctctcgaggctgcagtgtccccaccgggcctgccaccaccatctgctcctctgacaaatcctgccgctgtggagtctgcctgcccagcacctgcccacacacagtttggttactggagcccacctgctgtgacaactgtcccccaccctgccacattcctcagccctgcgtgcccacctgcttcctgctcaactcctgccagccaactccaggcctggagaccctcaacctcaccaccttcactcagccctgctgtgagccctgcctcccaagaggctgctaatggatggctactttgctcagtgcctgagattgaaaaagtcaacatagaagctttagcattcacctatctcagtacctacaactaatgtactctgctttagaaattggaacaaggatggtactaccacaatcaccccctgcaaaaaaaaagagaccaagaaactttcaatg

SEQ ID NO: 1340 - DNA, 879 bp, Homo sapiens
acgggccccggcgtgtccggtcgcactcggtagcccgcatggctgcctagcggtcagcaccgcatgtctgcgagcctaattcgcgcttagagggcatacaatggggtgcaggctaacgcggggagccggccaggcctccgcgcggcgtccatcttggatactggcagtgggtcacgtggtgctgcgtgcgcacggaggccagggcggcccggtcactgagtgcgcaggcgccgtgggcctcgccctgccccgcggcgggaacgcggccgtgagggtgtggggtgtaggtccgccaggcctgcaacggctgccgagggtcgtgggatgcgctcgccgcgtccctgctcaggcggagggagcccgcccgccgccagggtctcgagtccgggtccaggcaggcgtggaggtggcgggaacggcgcacccgccgggtgggcgttgttttaaggccgcagggcttgggaggcttgtgttgagttaaaggtcggcccgtagatccccggaagcgcctttggttgccagcaggtgtcggcgagggtcttcagtggccaccctcctggtggtgatgtttccgtttctttccaacaggagtatgacaacttttcaacttgagtgcacacactgtccccggaatcccgcgttccagggaggaagcgcctttgacagcgcgcgccggttcgtggggcccgacggcgtgggcctgtggttgcggactggcggagatggcgttcgcttcgattgtaggccattccttttaggagctgagaaaggatccgtttttacagcattctcgacctgtgattcttggtgggggaaactagttatgtggataaaaatacagttagcaaaataaaaatgccaattttacatttccttaaa

SEQ ID NO: 1341 - DNA, 877 bp, Homo sapiens
  SITE (324): n equals a,t,g, or c
acgggccccggcgttctctggtcgcactcggtagcccgcatggctgcctagcggtcacgacccgactgtctgcgagcctaattcgcgcttagagggcacacaatggggtgaggctaacgcggggagccggccaggctcgcggcgtccatcttggatactggcagtgggtcacgtggtgctgcgtgcgcacggaggccagggcggcccggtcactgagtgcgcaaggcgccgtgtcctcgccctgccccgcggcgggaacgcggccgtgagggtgtggggtgtaggtccgccaggcctgcaacggctgccgagggtcgtgggatngctcgccgcgtccctgctcaggcggagggagcccggcccgccgccagggtctcgagtccgggtccaggcaggcgtggaggtggcgggaacggcgcaccgccgggtgggcgttgttttaaggccgcagggcttgggaggcttgtgttgagttacaggtcggcccgtagatccccggaagcgcctttggttgccagcaggtgtcggcgagggtcttcagtggccaccctcctggtggtgatgtttccgtttctttccaacaggagtatgacaacttttcaacttgagtgcacacactgtccccggaatcccgcgttccagggaggaagcgcctttgacagcgcgcgccggttcgtggggcccgacggcgtgggcctgtggttgcggacctggcggagatgcgcgttcgcttcgattgtaggccattccttttaggagctgagaaaggatccgtttttacagcattctcgacctgtgattcttggtgggggaaactagttatgtggataaaaatacagttagcaaaataaaaatgccaattttacatttccttaaa

SEQ ID NO: 1342 - DNA, 437 bp, Homo sapiens
  SITE (437): n equals a,t,g, or c
ggagggctctagaccctcactcaggcctggctgacccctgccgaggcaccccgaccgggtggcacagaggtgtgcagctctctcctggtttagtgggggaccatgggtggctgcctgctgaactctgcggggcccacagaagagcctctggactcatgactctctctcggaagcctctctgcctcagtcccaggggacctctccttaagaccttctgggcctcacagatcccagctaaacctcagcttggacacctagattcttggtgacctcctccgccattgccatcctgctgtgggacttctctgagagactgcggtgccctcaggagatgccaagggcagggaggccccgatctccctgaaccctccaaccaggggaatcaggaccatgaccctgatcttccgccccttcctctctccctctccctccacctn

SEQ ID NO: 1343 - DNA, 11298 bp, Homo sapiens
gctgtccccttttctgggactattcaaggaggtctccaggacggacttcagatcactgtcaatgggaccgttctcagctccagtggaaccaggtgtgtgtgtatatggatggaaacgtttcactccagcctcgtcccttagtaaaccactgtgcctgtgagcctgggttagttcaaacagcaacatccaagctcacgtgcctggctcaggggaggcccaatgcgtccctaacccatgccacagggcagcactccacaggcacaacctgcacccaggggtgccattaacctggactccaggatgaatggggccctgggagctgacggtctaaggagggcgtgggatggtcagagttggatgattatgttctgggttgaaccttgcacactgtgactaagagttgcaaaaatcaaacttcctccatttcccgtaactgctctcatccactctgaagctctccttctgctgatgtgaaaatattgaaaattgccatcaaaagtaatttggtctcttttggtttcaaggccttttctagaaactactaagtcaattcaacatactaacattgtatcagggctgtttcccaccccctcctccctcccaaggtgggctgtctgggaacagagaagagctcacatggcttctcagtggctgggagggctctagaccctcactcaggcctggctgacccctgccgaggcaccccgaccgggtggcacagaggtgtgcagctctctcctggtttagtgggggaccatgggtggctgcctgctgaactctgcggggcccacagaagagcctctggactcatgactctctctcggaagcctctctgcctcagtcccaggggacctctccttaagaccttctgggcctcacagatcccagctaaacctcagcttggacacctagattcttggtgacctcctccgccattgccatcctgctgtgggacttctctgagagactgcggtgccctcaggagatgccaagggcagggaggccccgatctccctgaaccctccaaccaggggaatcaggaccatgaccctgatcttccgccccttcctctctccctctccctccacctcccccaccccccagcaccaggagggcttcccactcccatcctgtcatatagagacagatcctacctcagagggccctctcctcttgggagctttctgtctctcccttccttggggcaggaatttcgaaaggactacagggatgaagctgaaggactccaaaggaaaaaatacatgcagatatatttcaaatgcaatcttctccatttattcatttaattaattaatttttttcttttgagacagggactttctttcacccagcctggagttcagtggtatgatcatagctcactgcagcctcaaattcctgggcttgagtgatcctcccatctcagcctccggagcagctgggactacaggagtgcactatgatgcccagctaattattattattattattttgagatggagtctcgctctgccaccaggctggagtgctgtggcgctatctgggctcactacaacctccgcctcctgggttcaagtgattctcctgcctcagcctcctgagtagctgggactacaggctcatgccaccatgcctggctcattttttgtatttttagtcgagacggggttttaccatgttggccaggatggtctcgaactccagacctcgtgatccacatgcctcagcctcccaaagtgctgggattacaggcgtgagccatcatgcccagccaatttttttttttttaactagagatgagctctcactatgttgcccaggctggtctcaaactcctgggctcaagtggtccacccgccttggcctctgcgcccagccccaatttcacatgctctttacatttgttctcttctttcccatttaatcaggcatgtgctggcctccaacaagtgtccactggcacagaaggctctctcttctaggtgtgcttaacaacttccatcttcggtatcaattggtaatcactttccaagacctatgtttcttgtttgctaataccagcacttttccttaaccgttttctatttgcttttagcaaatcatgctgtaaaggcaaaatccaataattaaaacaaaaacacattagatcccaattagaaaaacaaaaacgatgccaacaaagcagtctctgccatacaggttgtgtgcaagatccagacaaatgcaaagcacaggcgccgaggccctcctgtgcctgtcactggcaataatccatgccacagaagactatttgctttccctgggcctaggtttgctgtgaactttcagactggcttcagtggaaatgacattgccttccacttcaaccctcggtttgaagatggagggtacgtggtgtgcaacacgaggcagaacggaagctgggggcccgaggagaggaagacacacatgcctttccagaaggggatgccctttgacctctgcttcctggtgcagagctcagatttcaaggtgagcaagaatcccctccccacctctcacccctgggacccccagccctatcaggtgaatggcctttaagtaatcacctaaattgacattcagccagagtgacaccactatacagataacacgctcatttccttgtgaggtgttacccatggctgcctagtctccttatgcaccttcatctgaatctacaggtgcacctgctgcttcttttactctgaaaataagaactagaggagtcatcacgttgctatttggtgttgtgtgtctttgaattccaagctcattccattcctctgctatagccattcctcctctccaggtcactggtaacatttatttttcagcgacatcgttccagcctttatccagggtctattaagggtatagttttgtaagcacattgcaaattacccttgcaagcagagtaggtctctgggcttgagaagcctgtgggtaagtcagtccaagtatgcttatctgagataaggatgtccccattcgttcagtatgcaacctgaggtcacctctcctctgctccccatgagcattttatgcatatataaataataccgctgcagccataaaaaggaatgagatcatgtcctttgcaggaacatggatggagctggaagcctttatccttaaactaacgcaggagcagaaaaccaaacaccacatgttcttacttataagtaggagctgaacgatgagaacacatggacaaaatggggggaaacaacacacccttgggcctggtcggagagggagagcatcaggaagattagctaatggatgctgggcttgataccaaggtgatgggttgatctctgcagcaaaccaccatggcacccgtttacctagttaacaaatctgcacatcctgtacttgcaccctggaacttaaaatcaaagttgaaggggatggaaatggcagatcacgcctataatctcagcactttgggaggctgaggagggcggatcgcttcaggtcaggagtccaagaccagcctggccaacatggtgaaaccccatctctactaaaaatacaaaaattagctgggtatggtggtgggctcctgtaatcccagctactcgggaggctgaggcacgagaatcacttgacccactgcactccagcctgggcgacagactgacattccatctcaaaaaacaaaaaaaaacagttgaaggaaaaataaataattaataaatgaaaccccaggtgagctaagactagaaagacaaacctactgcaggaaacaaccagaagaacgaaaagtccaactggagcctggtagagactcgggttgatgcactttgggtcacacacacgttcctgtaactggccccacactgaagaccagactcaggtcttcattttctagaaagagggtccaggagctcaggggtggtccccatcccagcctgggatgcctcccccagaacatgtgctctcctctggcaggtgatggtgaacgggatcctcttcgtgcagtacttccaccgcgtgcccttccaccgtgtggacaccatctccgtcaatggctctgtgcagctgtcctacatcagcttccaggtcagactgtccacctggcaccggtcccaggggctgggatgcagggcccagcgtagctgtgtctaagccctgctgggtgggcccaagccaatctcctacccaggtcactctggggacaacctctgcttccctgtcccagtacctgcccgccccttctcctctgtcactctgcccctccttctgtgttactgtctctgtccggaacacctgccttggtctcccagactcctcagctgcccctttctcttcatccctcagtttccatcctggtaaggagggcatattgttctagaaagagcccaggctcaagaaccaaactgaatccagttcaaattcccagctctgccattcatcatctgtgggatcttagacaagcaacttcacctctctcagccttggtttcttcatctgtagaatggtcattgcctgccccccatgggtggttgtgtggttcagtgaggagacagatatcagaggtcacacagtggcccccctgggcccacaccagggtctgtttgacctctgtgttttaacaactttgaatgtgttgccaacatctaaaaggtcaggagagtcaggtatggtggtggaggtctgcagtcctggctactcaagaggctgaggtgggagaattgcttgagcccaggaattagagttctgtctgggcaaaacagcaagaccctgtctccaaaaaactttgtttaaataataaaataaaataaataaaactaaataaggtcaggagataccaataccatgtgaaaaatgggaagattagggtatgctgggcccacattcccacagggcaccagcagctgggtgggagctgctgttacccttttggcattcgaggctgctccctgagatcagcgaagcacacagtaggccctcagcaaatctgggcttctcgccctttggtcctcatctctcattccctccttccctgactctctcccctgcgggtggtaggggagggaagagctggagggagaccgcacccctgcactgctcaccagagcctggctctttcccatcccatcttggcagggccctaacccccttgcctcatcgccctgcctgcctggtctctccctcttgcccctgcctctgcctttcggcttctccttggctctattaatgcttctcctcactgcccggtgccttttgttttaacagaacccccgcacagtccctgttcagcctgccttctccacggtgccgttctcccagcctgtctgtttcccacccaggcccagggggcgcagacaaaaagtgagttcaacacagaggccctgggtggccgagcagacagtaggaaggaccgagggtctgagaggctggccccagccagcaggccactcagggcctacaggccgcatcttgcccacccaagagttccctgtctctgtccgctgggcacccagagctggggacctgggggtcaccctggattcttcactccctcttctttacgtctctccaaggcacgaacgtgtctccctcctgaagccaccgatgtggtccaggcctctgggattcctcaccatgacgacaggggtccagttccccaccccctacacccaaccactgccacagtgaccttcttataagcaaatgtgatcacaccctctccctgcttaaaaatcttcacagcccccagcccttcaaataaagcccaaattctccagcagggtatatgaattcctccccagtctgccccaatccacgtccctgcctcacccccaacccacgaagctcacgcagcctctgcagctcactcaaggccctcttgggccaccatgcttttgcatatgctgtccctggtcccggaagcaccctctgccagcctgcctcgagcacatgcctaattgcccttccatgctctgcctaagtgccgctcctctgggagtcctccccgcctggaatattgttggacgctcccctggtgtccccacagagtctgtatgtatctgtgccatgccagttcacagcaccccattgtaactgtatttgcgtgtctgtccccgttactccacccccatgtccctatgcccatgaggccccagagggccaggactgtggcttgttcatttgcactgtgcctggcactcagtagggactcagtgaatgaatgtggaatgtggttcacacagccagggagaatgggataccagccagggcaagaacagtctactgggtggggcaggatccaggacaaggaggtgagcagcccttcctccggccactcaagtagtggggactgggaggaggggcgctttgtctacgcagtcttcttatggctcatcaccgtacagacagggcacctgcctcctgccacgctgacttcaggactggtcgagccccagggaacatttgcagggcagcccaactttggccctggccctggcgctggccctggctctggggaggatagaaagtgtgctggatacagtcagacagaactggctgccactttggatttgatcccttccaccttggcaagcttgggcaagttgcttaatctttctgagcctcgttgcctcactagggacacaggagctgaggctgcttcccttgttggaaagcactgaagcccaggaatcgacccacaataggccttcaacaaataccacttctcaccttatgggtgaaatatggcactggaagtaatgctcttcgctgtgggagctacagaaagcaatgaggtctctatcaaacccagtctcctctctctcgagaggaaccagtggggataccctaccccccaaccccaaagccctgtacacctgggggtaaaaatctgggtgccacgggctcaggaaggcttgcttgggagcaagagggaggtgggtgtgtccggggaggcatttctgagcacaagagcctccctggagttttgccaccatctcctcccattctgtggtgcccgcgataaccaccattctgactctcctcacccctccagcctcccggcgtgtggcctgccaacccggctcccattgtaagtctcttgctttctttttggatcgtcctcattttggcttttctgggctcatggaggaggcagggccaggcattgggcctctcccattgggagtggggagggcacagaccagacccttgaccatctgcccggcctggtgaggttgggggttggatgtgggggttggatgaaacaacctgagttgccaccccgtgggcagccacggaagaccatgccccacattcacttctgtcacctgcaaagggaggctaggctgagagacgtttccccgagaggaaagatgggccagagccaccagcgtccccatctgtcttctccagggttctaacctttgcccctcgctcatccccttgagagaagagacacctgggcccaccctctgtggggtctgtggggccattgggcttgttacgccccctggagggtgcctgccgtgtggcgccctctggtgggagctggtggttttcacacgtgagagcctgggtgagacctggtttctttcttccagacccagacagtcatccacacagtgcagagcgcccctggacagatgttctctgtaagtctacaagttctggtcagttcacagctgcacagtgtcctccttcaccaaaaactaaactccctagagccctagagtcgggaagaaagcggtttagcaaggaggatggggacactaggggctgagtgcttggctcaggtgacatgtggctaaagctgtccttgggacagcagagattctggaagaagcagggtttatccagtggtggaagagacaagtcccctagagaccgggagggaaactggtccatctgtcaccaagtggggagtacagtggccccagcacccggatgtgaggttcctggccctgcatcctgggtccccaggatgtcactattgatcacaggcttaagctcttctcctgatggtgcaaatgaggcaggggggcttagaattagtggggctgcctgcggaggggttgaggggcaggtgaccgtggtgtggtctgggaacacggcaggaagttccaggaaggctaacatgaaaagggaggtagacgggcgagtccaagggccaaaggctcacgaggtcagcctcacagtggagtcctctctagaacgcgtgggtgcgcctgggtgagtgctcgcgcacccatgtgctctcccattgaatttcctggtttcttttcaacagactcccgccatcccacctatgatgtacccccaccccgcctatgtaagtggtttctcagggagggcagaggttctgtttgtggtgggcaggctgggggtgaagggccgctgtggggggatccactggccttgaaaaattaaaagcagtcatttgttaagctgaagggcttcaaagcatcccagcgaattagaaggctgtggagaggagctttcaaccttaaaactgtcgtgtcaatatgagcacattgcatgtccctcccttttcaccccacgaaacgagtctttttgtgtttggccaaagttcctttcatgacactaatctaagcccattaatttgaggagcactggaaagttttcctttggcttttatggaaccaagtaaagatatcatgggcttcttctcagctgacagcccaaattcatgggaactggtacaatcttccccttccgcgtggtggctgacctgtcccccttcttccgacagccgatgcctttcatcaccaccattctgggagggctgtacccatccaagtccatcctcctgtcaggcactgtcctgcccagtgctcagaggtaagccaagggctccagtgacctctgggaagagagagcccttcaaggtcagtccagccattcccctggcttcaggaaggctactgatgatggggaggaaatgggactcagaattcggtggataaaggttcaggtgggctgcccaccccaggttccacatcaacctgtgctctgggaaccacatcgccttccacctgaacccccgttttgatgagaatgctgtggtccgcaacacccagatcgacaactcctgggggtctgaggagcgaagtctgccccgaaaaatgcccttcgtccgtggccagagcttctcagtaaggcaccgcagtctggagcttggagaggctcccatgggtgcacagggggagggggtaaaggaggtttgaggtaccttgaacagtatgggggctgattcctctgggatgaaggcccaaaagaagagaaggtggccaacaaattattattattattactgtcccgcatgaaggaagtgctgggatctgctttttcagatgaggaaacaaactcacaagtgcaggttacttgcttgtggtcacacagtcagtaagtgtcaaatcagacccaagaaggaggtgttattcatttcttcatttactcaacaaccattttcttgtcgcctgctttgcgcaggaagcaccccacatgctgggggcacagtcatgaagcacacagacagggtcctgcctccagggagtttataatttaggtggggaaagaacaaggaaagtaaagcatggacagattgtcacagataacgacagtgccacgcacaaagcaaaacagagcgatgagatagagcgagcctgggaggggcagctagggccaacgtgcagaggcacgggtgtggcctgtccaggaacagcaggcaggcgtgctccaccctgactacatattcaaatcacccagagagcttacaaaggaaatatcagtgctgggaccccagcccaggccaatgaggcagtcagctgggcattcgtattttaaaaatatgccttaagtgattatactctgcagtcagagttgaaaatgactgatgtagggctttgcagccatggaaaggagcttggattttaacacagtgaaaagcctcaggagtgtttcaagccagggagcaacatactttgatttgtagacagctgtgtgacctcggacaagtgacttaattattctgtgcttcagtttcctcatctacaaaatggagctaataatcatgaatttcctagagttgtaagaatggaatgagacagtatctgtagtatgcttaggacagtgcctggcaggtggcatgtgtgataggagtgttagctattgcaaagggaaggaggttttaacatttgtaccctgactgcttcgtggagaaggcattggggtggaaaagacaagttaggagactgatgctgcaggagcccaggcccagagcactcctgtgtgctgggcctgagggatacagacggcacaggccagtgctcctgtccctgatggggtgggaacagtattctagaccagggaacagtacaggggaaagagcacgcacagcctgtttagtgaagagccgtcgttcagtggggatagagtgcaggtgaggggcttattaacaactgaggagggagggagggtgggagggagggagagaggaggctgcagtgagggtggaggacttcccaagtgtagtgcaaacggcatgatctctgcacaggtgtggatcttgtgtgaagctcactgcctcaaggtggccgtggatggtcagcacctgtttgaatactaccatcgcctgaggaacctgcccaccatcaacagactggaagtggggggcgacatccagctgacccatgtgcagacataggcggcttcctggccctggggccgggggctggggtgtggggcagtctgggtcctctcatcatccccacttcccaggcccagcctttccaaccctgcctgggatctgggctttaatgcagaggccatgtccttgtctggtcctgcttctggctacagccaccctggaacggagaaggcagctgacggggattgccttcctcagccgcagcagcacctggggctccagctgctggaatcctaccatcccaggaggcaggcacagccagggagaggggaggagtgggcagtgaagatgaagccccatgctcagtcccctcccatcccccacgcagctccaccccagtcccaagccaccagctgtctgctcctggtgggaggtggcctcctcagcccctcctctctgacctttaacctcactctcaccttgcaccgtgcaccaacccttcacccctcctggaaagcaggcctgatggcttcccactggcctccaccacctgaccagagtgttctcttcagaggactggctcctttcccagtgtccttaaaataaagaaatgaaaatgcttgttggcacattca

SEQ ID NO: 1344 - DNA, 555 bp, Homo sapiens
tgtgggttgaccatggcttctttaattcatttggagacattttggagtctgtggaatcgggcgggggtgctgctgagaggagtgggatgggaaagcatggactccctttgggcagggggtcctgacctcacacctcctcccagagggtctcttgcaaatcccacgagggtgttggagaaagcaggctggggctctagccttttgggcaggagtctcggacacaggaagggtggtaatgggggacaccaggaaacagccccatgcctccgagatgggagaggggctggggcagagcctgtgagggccacagcagggtcagagctgcctcctcagacctggcgtcccagtgggaggaggtggcttggggaggggggtcaggagaagctgatccgaagcaccgtctgggtgtgtgttccattgtgggtctccccggcattaggggttagggcttgcgtgggaaaagtggctcagtgttcatgtgtggggttctgccagccactgggccactgcccaacagcccagctccgcgtccacgtgatgccaacacatcctgct

SEQ ID NO: 1345 - DNA, 428 bp, Homo sapiens
gtcttattcatatgtagtcaacacccatgaccaaattctctcaaaggccccatctgcaggaacatccaattggagaataagaactctgaacatggcttttggccaatatgaacactcagaccagggagcctgcatcatattttttatgtttttattgtgcaatttgttttataaaatgttttctctgatcccagtttataaattttcccagtatacagtctgtgttttatatttcatgcatagtgaactacataactaagggcaatgcatgtacatagaattgctgtattgcctggctgttatataactgtagttgtgatatcataattgaaccctctgacactgttagtcaattctttttttttttggagacagagtcttgccctgttacccaggctggagtgcaatggcatgatctcggctcactg

SEQ ID NO: 1346 - DNA, 428 bp, Homo sapiens; identical to SEQ ID NO: 1345

SEQ ID NO: 1347 - DNA, 386 bp, Homo sapiens
ctcaagctcccgacctcaggagatccacccgcctcggtctcccaaagtgctggaattacaggcatgagccacggtgcctggctgcctccagggttttaaaacaaattaatgctattagatggcttcacatattgcaggttttatgctacaggctctaaacttcctttgtgtaataagatatgtcagccttccctgatgttgatgatggcatgctccttttcctgtctccctcatttcactgtcctgttagaaatagcttagactggctggccacagtggctaacacctctaatgccagcactttgggaggccaaggtgggtagatcacttgaggtccagagtttgagaccagtcaggtaatctcagcactttgggaggctgagact

SEQ ID NO: 1348 - DNA, 698 bp, Homo sapiens
tgctgggattacaggcctgaaccaccgcatcctgtcgttagtcaattcttactccttataatgctgtgtatttacttgaactcatacatcagaaggtagtgatcttaaatgtatttcagttcttatagtgtgtgctggtggtaagtagaagttgtggcttttttcttaagagggaattgtttagaggtctgctggctgtataaatgtacttattatttcgttgctagtcttatcatgggttacaatattttattaattaatttttatgattttacataaggcttttcagtaagtggtatgcctgggaaacatggtgagacccccgtttctgcaaaaaatacaaaaattagctgggaatgatggcacatgcctgcagtatcaactactgtggagtctgcagtgggaggatggcttgagcctgggaggtcaagactatagtgagctgtaatcatgctactgcactccagcatggttgacagagcaagatgctgtctaaaaaagaatacttattgtaaagtttgggtacaggaataatgaagtcattgatagtttatgaacaggctatggagttgatgcccaaaagaaataaacagtttgtaaatgaataacttattttgagttgtgacaagacaatgttgaaagtgatgcatgaagcggcaggcagaccatccacatcagttttacagaaaaaaagttaa

SEQ ID NO: 1349 - DNA, 386 bp, Homo sapiens; identical to SEQ ID NO: 1347

SEQ ID NO: 1350 - DNA, 698 bp, Homo sapiens; identical to SEQ ID NO: 1348

SEQ ID NO: 1351 - DNA, 2574 bp, Homo sapiens
gagatcccctgctttgtgctggaggagcaggaggcgtgtgtggcgtggtactggtggggcgggtacgtggccaccccctcatgtccctttccagacagagagggagcccaggctccaagcctggtgagggagagctatctgtctgtctgtcttccagggaatgatgtcccatcctgcatgtcctctcctgagggcccgggatgcagaccctccttgggtgtcccccacaacccagcgggatgggggatgggactggcagagcattgatctccatggagacgaccctgggggcttctggaagggggattcccagtcaccaatttccaccaactgccaccacccaggtgtaggatgtacggcacagtgcccctcgctcgcctgcagcccaggaccttctacaatgcctcctggagctcccgggccacctccccaactcccagctcccggagcccagcccctcccaagcctcgacagaagcagcaccttcggaaggggccaccacatcagaaagggtccaagcgccccagcaaagccaacaccacagccctccaggaccctatggtctctcccaggcttgatgtggcccccacaggcctccagggcccacagggtggcctaaaacctcagggtgagctcagaacctaaccttgggggttcctgacatgagggggtgtccctgcttctgtttaggggtggccatgtgttgcctcttttcctgcaccagtttcctcctgggatttcccaacctctcccatgaaatcacactgcagcacaggattttcataatccacgaatttgaccacatcaggccccactgtgcacccaccaccactcctctttatctcagccaatgatgtcccaacacccagaggccctcaagccttggccctgcagaccctacccccagtcaaaactctagtttcacaaacttcacttggttcctcaaaagcgccaggctctctcctaccgtgaggcctttgcacatgctgttcctcctctccttgtcttctctcccaccctcagtttagcagcctatgcctcctggaagcctttcttgactaccgtcagtactctgggtgtcccccatagcagtactaccgtgtttggcggcttgggggtagggaggcactgccacaagggcggcacactgagggcacaaagactcagaaggcatgaaatggagggaatctgtgtgtgtgactgagcacacgtgctggtgtttctcccggatggcgcaggcattggtggggcctccctggtggattgggctcccatcaacaccacatccacccctcaggtgcccgctgggtctgccgcagcttccgccgccacctggaccagtgtgagcaccagattgggccccgggaaatcgagttccagctgctcaacagcgcccaagagcccctcttccactgcaactgcacgcgccggtgaggcccctttgaaccctcgcggggtgggctgcctgctgccaggcatgggaaggggcccctggctggcaaggccctgccccggcctgagcctgcctctgttctcagtctggcacgcttcctgaggctccacagcccacccgaggttaccaacatgctttgggagctgctgggcacaacctgcttcaagctggcccctccactggactgtgtggaaggcaaaaagtaagtgatgtcagagccaggagggatggggggttttctcaaagggtgggttgcctatacccactttgaatgcttgggccaaggggtaggggaagggatccggagacctctgagctcctatccatagcctcatccctctaccccctgctgccccaggtccagctctgcagttggcctctatgggtcgcatcttggctttgtcatttgattcccacatgaccttggcaactggttcacctttccaagtttccatgtctttgtctgtaaaatggtcgtaggaaccaaggaaacggcaggatgcacataggtcatgccccgcctggcacacagcaaaatgtgtacttaactcactcctaatccacaatctcatttggtcttgaacttctggactcgagcgatcctcccacctcggcctcctaaagtgctgggattacaggcgtgagccactgtgctctgctttcatctggattccgattctcaaagccagctccttcttaactttcccatttcatagatgaggctgaggcttctggctcaggtttccacagccagctagtggcagaacccaggcctccaggtaccagcccggtttattataccctttctccgtgaaacccacccctctctgccttgctggtgactgtggccccagccccctctctctctgggcctcagcccactgtctgcagagtaaggtgggatccttgtcagccctgatcatctgccccactcttctctccttacagctgttccagagaccctagggccatcagggtgtcagcccggcacttgcggaggcttcagcagaggcgacaccagctccaggataaaggcacagatgagaggcagccatggccttcagagcccctgagaggccccatgtcattctacaaccagtgcctgcagctaacccaggcag

SEQ ID NO: 1352 - DNA, 312 bp, Homo sapiens
gcagtcatgtagctgggaggatgagccggagctcaccgcagcctacggtgctctctgtgctcatgagactgcctggggctccttcatccacacccccggacccgagctgcagagagcactggccactcttcagagtcagtgggaggcatgccgagcgcttgaggagagtccagcaggggccaggaagaagcgagcagcagggcagagtggagtccctggtggagggcaccagcgagagaagagaggatggaccatgcctggcacactgtggtgtggagttggagattctgctgggaactcctcggagctggg

SEQ ID NO: 1353 - DNA, 432 bp, Homo sapiens
atctcagcctcccctccgtaggttagactgaagcatggcagaggctgttgtggacaatcaagaggatgaatggggggatctcaaggcccaaatgctggaccacatctcctgctgttctgggtaaccttgagctatgtatgacacaactcttctatgcctggatgtggtgttcaggaagctcattctgatgccctgggctttggccttgccagggaacttcacatacagatgagaatggggaaagggtaacttattgcagcagccccaggcagtaccaggaggaggtacatgtatgtccgtgttgcaaaaataatacatgcctcaaaaacctgcctaggggagccctagtgcctgggtgctgtggcctgaggtagcaggtgggaagttagggatgtcacagaaatgtctgtgtctgaatccaggattggggtg

SEQ ID NO: 1354 - DNA, 402 bp, Homo sapiens
ggaatctatgcttaaattatatgaaaaaatgtatttagcaggatagttcagaaaggagggagaaggcctggttcagctaaacttttagcagccttaggagtagggctaacttcctgaaacaggaagataaaaatatctcggcttcacatttagggcctctagagaaaggcactgaagtggcattccagattggtatatttaaaaacatgattcattttccccattattccttgtctggtcattcttgcctttttctaggactctcctaatgtttgtcataaatgaatgaaatgattctgtcattcttacttgccctgtaagtaactttttagatacttgctagaagaataagctcaggaccttgcattccaaatgaaatttctgaatttttgtttctccttt

SEQ ID NO: 1355 - DNA, 402 bp, Homo sapiens
ggaatctatgcttaaattatatgaaaaaatgtatttagcaggatagttcagaaaggagggagaaggcctggttcagctaaacttttagcagccttaggagtagggctaacttcctgaaacaggaagataaaaatatctcagcttcacatttagggcctctagagagaggcactgaagtggcattccagattggtatatttaaaaacatgattcattttccccattattccttgtctggtcattcttgcctttttctaggactctcctaatgtttgtcataaatgaatgaaatgattctgtcattcttacttgccctgtaagtaactttttagatacttgctagaagaataagctcaggaccttgcattccaaatgaaatttctgaatttttgtttctccttt

SEQ ID NO: 1356 - DNA, 607 bp, Homo sapiens
tttaatgtgtgatttaacaaatgttgtaataagcatcttgaaaatgtatttatgttctttattacctttttcacaaatcaaccctatgtaatatgtttttgtactaatatattgtaacatttctgtttgggagattttggtcacgattttgtagctttctggcctttgagataagtaggaaaaatataattatcaaatatgactgggtaaatatttgttaatgcaaacgaggcaaaacatggcatgtcttccaaaagtaattatttctgatgatattcatagatctttgaatcctatcatagtagtcattccatcatgaaatcacatgattgtcagttgaaggtagccatcctaggagcagtattatgcaggagaactttacctaaaagagtttttataatattttaaacctctagttgaaatgcaaaacctgtttaaaaaaataatttatctttgggaggccaaggcgggcggatcacaaggtcagatcgagaccatcctggctaacatggtgaaactctgtctctactaaaaacacaaaaaattagccaggcgtggtggtgggcacctgtagtcccagctacttgggaggctgaggcaggagaat

SEQ ID NO: 1357 - DNA, 518 bp, Homo sapiens
tttaatgtgtgatttaacaaatgttgtaataagcatcttgaaaatgtatttatgttctttattacctttttcacaaatcaaccctatgtaatatgtttttgtactaatatattgtaacatttctgtttgggagattttggtcacgattttgtagctttctggcctttgagataagtaggaaaaatataattatcaaatatgactgggtaaatatttgttaatgcaaacgaggcaaaacatggcatgtcttccaaaagtaattatttctgatgatattcatagatctttgaatcctatcatagtagtcattccatcatgaaatcacatgattgtcagttgaaggtagccatcctaggagcagtattatgcaggagaactttacctaaaagagtttttataatattttaaacctctagttgaaatgcaaaacctgtttaaaaaaataatttatctttgggaggccaaggcgggcggatcacaaggtcagatcgagaccatcctggctaacatggtgaaac

SEQ ID NO: 1358 - DNA, 1313 bp, Homo sapiens
cagaggagatagacatccaagcaaatatgccaacaaaatcccaagtggggtctagtaagggccaaaaaaaaaaaaaaaaaaaaaaaaaaaaaaagagctggtgtagccagatgggcagggactcaccttgcttcagggacaaatttgcagtggtgatgaattcctttcattcttagctttcctcctattacttccctgatttattttacttacaaatgacacgtctaaatggcagagacctgaagttctcttgatggggtgctgagatgttcagaagggaggtatcctgtttaaccaacagatcatttatagataaagagaggctctaacttagcatacagttcatctatttccttcccccaagaaagaagggatatttacatctcctctattccttcttccagggcaagaatcttctgttccatatgcaacatcttctggcagccttgtcctttttctgtccttgacgactacaataacaaacagctgttgccgaggcattgctgttgacgtgttacctttgaaacctccctcctgttatggaataagcctcttccagatcatggatcattatcatctagtctgacaagcagccttgttgccacggagacccaaagggatcaggcgtggcatttgcctgcatcatcaccccctccaggggaactataaggactcttctgtgcgtcatgcgtggctgtcctgggactggctgccaccagacttttcctgcgggtaaaacctaaacaaatgatcagctgcagataatatcaagacctctgtttgatatgttaatagtgacagccagatttccacaattaacaacgaggtgggaagaaaacactgtagtcaccagacttgggaggagagggtttgtattcacataaacacaacctcacgtcactgcttgccaccacaaagggctctgttcactgttttgttctcaaagatcatccttgcgctcatcctctgatcttgaatttctacataactttctcagtttatatgccctgtggcaagtgcagcaagcactgtttcctgtttctaaacttgtagaaaatcatccatacatcttacagttgtcagttttaaccagataacagtggcactttgttgctgcttttttatctttagcttaggttaacaggaccctggaagtaaagttgttgatttattcaatagagtattctcaattaatttggctagatttctacatgattcaaaatctaaaaaagtagaaatgcatgcttacatgtctaaggcctgaaaaattggtagtgacatcccaaaataaatgaaggttttaaaacaataaa

SEQ ID NO: 1359 - DNA, 1312 bp, Homo sapiens
cagaggagatagacatccaagcaaatatgccaacaaaatcccaagtggggtctagtaagggccaaaaaaaaaaaaaaaaaaaaaaaaaaaaaagagctggtgtagccagatgggcagggactcaccttgcttcagggacaaatttgcagtggtgatgaattcctttcattcttagctttcctcctattacttccctgatttattttacttacaaatgacacgtctaaatggcagagacctgaagttctcttgatggggtgctgagatgttcagaagggaggtatcctgtttaaccaacagatcatttatagataaagagaggctctaacttagcatacagttcatctatttccttcccccaagaaagaagggatatttacatctcctctattccttcttccagggcaagaatcttctgttccatatgcaacatcttctggcagccttgtcctttttctgtccttgacgactacaataacaaacagctgttgccgaggcattgctgttgacgtgttacctttgaaacctccctcctgttatggaataagcctcttccagatcatggctcattatcatctagtctgacaagcagccttgttgccacggagacccaaagggatcaggcgtggcatttgcctgcatcatcaccccctccaggggaactataaggactcttctgtgcgtcatgcgtggctgtcctgggactggctgccaccagacttttcctgcgggtaaaacctaaacaaatgatcagctgcagataatatcaagacctctgtttgatatgttaatagtgacagccagatttccacaattaacaacgaggtgggaagaaaacactgtagtcaccagacttgggaggagagggtttgtattcacataaacacaacctcacgtcactgcttgccaccacaaagggctctgttcactgttttgttctcaaagatcatccttgcgctcatcctctgatcttgaatttctacataactttctcagtttatatgccctgtggcaagtgcagcaagcactgtttcctgtttctaaacttgtagaaaatcatccatacatcttacagttgtcagttttaaccagataacagtggcactttgttgctgcttttttatctttagcttaggttaacaggaccctggaagtaaagttgttgatttattcaatagagtattctcaattaatttggctagatttctacatgattcaaaatctaaaaaagtagaaatgcatgcttacatgtctaaggcctgaaaaattggtagtgacatcccaaaataaatgaaggttttaaaacaataaa

SEQ ID NO: 1360 - DNA, 713 bp, Homo sapiens
gtgaattacagtatgctacaatggatttgtttggaccatttatcttttcttttgaattgacttaactgtacatttgtaggagataagcaggaaatcagaagcactctaggggattggcactggtctaaatgacagccctaaggaggagcttagataccagattcatcctccatccaggcagaagctccccagggataaaactgcaaggttaaatgtgaaactcaaaatttgaagcaaaagcctctcctcttctgcacttcttttcttcctaagttgagcagtaatactagaaacagagtcaattgaacctgaatagctcctctggggtaccaggcatcattctaaggaactcgtttcgtcctcacagaggcacagatggggtatgtaacttgccaaagctcacactgcttggagtagagtcaggattctaatctggcttgtctggcttcagagcccacgttctaaaccattaggctcattctgcctctcttggagaagacacaagaagtcccagtcttggctagcctggctagttccagagacctccatagctaaacaaggtgtagaaatagaatgtcccgtcacttagctatacttctatccttcccaccttctacacaactaccattaccattgccaccagcaactggtaaatattgatggagcttcttttctttgccaggcaccatagatacaaaaactaaaaaaaaaaa

SEQ ID NO: 1361 - DNA, 922 bp, Homo sapiens
cctcagccttttgagtgttggtcgctgatcgtggttatggaggaggtgtcttcaaaagcatcaaggaaaaaatatcaaatattttgatatttgatatcaaatatcaaaatttgccatggtgcccagcatggttcaagatcataagtgtcaagcacatcaggtaaggaagataataataattcaagggcaaatgaattgccccatggacagtgaattacagtatgctacaatggatttgtttggaccatttatcttttcttttgaattgacttaactgtacatttgtaggagataagcaggaaatcagaagcactcctagggattggcactggtctaaatgacagccctaaggaggagcttagataccagattcatcctccatccaggcagaagctccccagggataaaactgcaaggttaaatgtgaaactcaaaatttgaagcaaaagcctctcctcttctgcacttcttttcttcctaagttgagcagtaatactagaaacagagtcaattgaacctgaatagctcctctggggtaccaggcatcattctaaggaactcgtttcatcctcacagaggcacagatggggtatgtaacttgccaaagctcacactgcttggagtagagtcaggattctaatctggcttgtctggctccagagcccacgttctaaaccattaggctcattctgcctctcttggagaagacacaagaagtcccagtcttggctagcctggctagttccagagacctccatagctaaacaaggtgtagaaatagaatgtcccgtcacttagctatacttctatccttcccaccttctacacaactaccattaccattgccaccagcaactggtaaatattgatggagcttcttttctttgccaggcaccatagatacaaaaactaaaaaaaaaaa

SEQ ID NO: 1362 - DNA, 96 bp, Homo sapiens
caccatgcctggctaatttttgtatttttagtagagatggggtttcaccatgttgatcaggctggtctcaaactcctgacctcaagtgatccaccc

SEQ ID NO: 1363 - DNA, 1733 bp, Homo sapiens
tttttttttgacatacaatgtgcaagtatgagacattttattttctaattgaaactgtattaagacatttacttggaatcacattattcccttaattttttcacagagaatattccatttactgtttagtttgtggtcttgtggacatgttctaagtaatatatttgttagcatggtagtttcagttgggcaaaacttactgccaataagacttgaatttaatttgtcacgtatttccaatggcaaccaatgatcaggtgcttcaatattacaaatttcaattcttccattctttatgtctatgaatactttaatttccaagtgtgactgttcatataacacatgaaaggaagtatttatactaaactttggagttttgccatatatccactcccaagtttgcagttctttggctttgctatttattccaggaaacagtgtctcatccgttgggtttattaggtgaatgtgattatcaatttgatgataagcagcatactctgtagcaacagcattcattagtacttcacaggtcagagtgggatccttttccaaaagatttttcactaaggaaggtatgctagcagtggcattgctcctgatcccttggtaagggctctttagcaaagaagacaagaacgtcccatcagtactacataataaagtgcaatggtgataggcagtagtccggccgatcttagaagctgttcctgagattttaaactgtccatcaagtaaaaggtcaaatcttttggtagcctgcacatccagctggggttggacagcattcagagctctcacaattaatttcagattttccattctatcatacttttttttggttgtaaagaaagtcaaattgatattacccatatcatggtagactgttcctcctccacttcttctccgagccagttttataccttcttctctcattagattcaggttacattcctgccaaggattttgatgcctaccaattacaacagagggagaattctgccaaaagaatagaattggtttgccttctagattcatatggtcatggatccagtcttccacagccagattttgatagacatcattggaaattgactgtaaaatgagcccattttttactgtttttttaaagccagctgctgggacctggcagttacaaagtaactggaagcaattcttcattgaaaatgggatcagcatgcttttaaaaatggaagacaaacaaattaattcatcgagaaaaggaacattaaattctattttctaactatcaattatcggttatttaatccaaacttaaagtatccagtgcagttgcttttggcttttagctttacaattagtctttagcaatgctataaccaagtattcaaaagaaataaatgaagacaaatttcaaataatttcagttgaaataatttcacagttttcaaacaataagtctgctgcaaatacattatgtaatatatcttttttttttctcttacagacaggatttcaccatgttgcccaggctggtctcaaactcctgggctcaagcagtcctcccaccttggcctcccaaagtgctgggattacaggcatgagccactgcactcagccacattacctatatcttaaagccaaattatgttgaattcacaagtaacaaatgttcatcgagaaaaatgagaaaatacagacaagcaagaagaaaaaaataaaagcattgatagtcctaatcacaattaaca

SEQ ID NO: 1364 - DNA, 2781 bp, Homo sapiens
ggtttgttacctcgaggtgagaaacccaatcctttgaggcaaaagaacgccaaggtgaaccaactcctcaaggtttcgctgccgaagcttgccaacgtgcagctcctggataccgacgggggttttgtgcactcggacggtgccatctcctgccacgacatgtttgattttctgcatctgacaggagggggctatgcaaagatctgcaaacccctgcatgaactgatcatgcagttgttggaggaaacacctgaggagaaacaaaccaccattgcctgactggctcttatcagtgttaatagcatctcagcttcctcagatcagttctatcactggcactacagaatccttctctttcttaaggcactttgcattgtagaatgttcctggatgttcatatctagtgtttgaaggggaggagggatttaaactggtcctgtacatagaaggtttgtttgacagaggagaaaaattagccaaggaagattgttgtttaaattcatttgaaaccagaaggggactttttagttgtatgtgtaacacattcattgaattattatcactgttttcttgggacaacatcaagcctaaatactgaacaatatgaagattcttttcttggcctttctgtggattatgtcatatataataattatcagaatcattctacttggctttaaaacatgttttctccaatttttttaaggttcataatttagccttttgtttttatgttgcttagattcttatgtatactgaatattttattaacatgtagcatcaggttgaacatgcttgtcattgatatatggaagatgctatagttaaaagtgaatttgttttgcttttttaatcttttccaagcttagcagtgaaaaacaggttttgccccagtaaagggattttttggagggtattattttttatgctgctgaaaatcatgtttataatagacccgtgcatgcagcctttcctccttattccccttcatgcccccctttccccttcattccccccgccaccccggttttttttttttttttttttttttggttcttgttgacattacaagcttttaacacatttttgacctaggagccctgttgctggaagtatagtctccagccagttactctcatgatagtactgctataaaactcattcttgtgtggtgttctgtgctatagattctgtgtattgctgttcatattcggagttctggttttgtttttcccttaaaacctgttaacagttttttttgggggtggggggattcagaactcttgtttcccattccatagcacctgacattatttcaagttttataatatcttaaggtgtatattttattttttttattggcttagttgttttttgttttgttttgtttgagatggagtttcactgttgcccaggctggggtgcaatggtgtgatcttggctcactgcagcctccacctcccgagttcaaatgattctcctgcctcagcttcctgagtagctgggattacaggtgcatgccaccatgcccggctaatttttatatttttattagagacgggatttcgccatgttaaccaggctggtctcgaactcctgacctcaggtgatctgcccgccttggcctcccaaagtgctgggattacaggcatgagccaccgtgcctggccttattggcttagtttttaaattatcctccaaaaattttgggcctttttctgtggggaaacaagtgaagctgctcttcagcatagacactacctttatcccatcattttagtaaaaactaggtttgtttcacttctgaggtgtcttattaatgtacttcatctgagaatttgttgatcttaatgttcgagctatataagaactgccattaaaaaaaatgggataatagatgattttatcagtatacctgtggaatatgtacaaactggatctatagatattttgaactggaccaggtgggtattgaagtaacccatcaaaatatgctctgcagtgattccgcttaatgtttaaattcagtaacgtacttgaaaggcaaatttcagtgcttttgtatgttggaggagggcttactgatgcgtgctaagaccgatttctgattgagggatgaaccttgggctcatttttttcttgtgaagtctctttctagaaaattttttggttttgttctttttaaaaaatacatacttttttgaatgtatcatgtcttcattaacaacagaaaatccacatggtgtttactaaacttgtttacgacattaaaaatttcctttttatttttagtagcccaggttgagtttttcacaagagatttttttcttagctgaggtatagttgtatagcaagaagaattaagccagatttttgtgtgtggaaagacagttttctatccacgtctttttctgtttgtcagaaggtgggagtatggtccaaataaatccattaggttactcctgcagcatgcgcttttagcttctctcttgactgaggatcaaatatccctttgtgagctggccctcagctcctttgctcatgtgtacaaacctcagatgttactacattttatatctaccagagctattcaagcaatagtatttgaaccactagccttttaaataaaattctgccccattactgatgtgcagatattgagttcactttcattttttgccagatttctttgcactactttaggtaaaaatagttaatctatttttctttgacatcctagtttgcgtcagtgacagaacttactgcttagtctttgtactt

SEQ ID NO: 1365 - DNA, 346 bp, Homo sapiens
ctcctaagtggtagctcttcagcaagggggctttaagatgggaattaaatttgcatgagtgttccattaaaaggcacttcccttccaaatcagaacaaccagggcagaatggcagagtacagggagctcttaactagacattcagagacacaaatccaaatcccagctctgtcacccactagctccatgacccaggaagcccctcaagctttccgagacttggattactgagggttgcctcatgaggtcataaagatcaggcaggattaccttggaggccttttagaaaagcatgttgaacacagcaaagcacttttctaacttcccatgagctgctgattccagc

SEQ ID NO: 1366 - DNA, 346 bp, Homo sapiens; identical to SEQ ID NO: 1365

SEQ ID NO: 1367 - DNA, 16281 bp, Homo sapiens
gtcaatatttagggaagctttgtcatatttactaaatttcataatttcagaaaactgtttaaaacaaagagcaattgatggataaatcaggaatagattctcttgaccatgtgacatctgatgctgtggaacttgcaaatcgaaggtgagtggattcaatcatgtttattgtatctgaattatgagaaactattgtatataatgagtgacagtaaagataattttcaggaattgggaaagaaggaaaactagatttcactgaccttccaagtttatctagttacatagattgatataatagcattgcaaatactttaaattcaaaatgtgaatatattatgggacacattcgtcgagaaaaaatgtattctttgggtcatattagcatctcttccagactacatcctccggttcggtaggctgtgtttgttttactcagacactcttagcagtgaaccgaaccatacagccttttggagctcatacattgtcttgaaagatacagtttttttgtaagctgagcatagtggtgcatgccattagtcctagctagctacttgggaggctgaggcaggagcatccctggagtttccaggagtttgaggttgcagtgagctgtgattgcaccactgcactccagtctgggtgacagcaagacgatgtctacaaaactctttaataagagctgtagcattatgggctatttaaataggatgatcagtagaaaggctagctggttctgagcccatcctttaaaaaatttttaattctgggcatgttttctgagttggtcttggaagaaatgtacatttaggactgggtattaatggtaataagcagtaagaaaagaagatgaaattaatttttttcccatttttctagtgataactcttctgatagcagcttatttaaaactcagtgtatcccttactcacctaaaggggagaaaagaaaccccattcgaaaatttgttcgtacacctgaaagtgttcacgcaagtgattcatcaagtgactcatcttttgaaccaataccattgactataaaagctatttttgaaagattcaagaacaggaaaaagagatataaaaaaaagaaaaagaggaggtaccagccaacaggaagaccacggggaagaccagaaggaaggagaaatcctatatactcactaatagataagaagaaacaatttagaagcagaggatctggcttcccatttttagaatcagagaatgaaaaaaacgcaccttggagaaaaattttaacgtttgaggtgagtcagcattttacatacatggctacacataactcaagatgcccaaaatgatttgttggccaatttagaattgtctcagatatactgggaacagactgtctgcaattttgatactcttctatactgacttacccctaaagtccaccctatccttcaactgaatcttgacttgtatctcttaatataactacactttgccatatttaaaagatagtgctccaaggctctttgtataaaatcctttgatcttatcccatctcaggtctttaaacacaaccctaaaactcagtggggataataaaagctcacataacttgaaattacttttgcagtaacctaaactaaaaccacacatgccttatgttcagtggatatattcttaaggcctagatgtttctaagccaattatctgaaaaatacgctaatacttaggagtagacttttttaaatatttgagagttgtatgttgaatgaattcagaattaatttatgatcccttgccagaacctgaaattttatttgggaggattaatacatgttaatctcttcagttaatctcttaagtttaaggtgattatagtaaacattagaaatcttattcctgtttttacattttaaaatgcctttagtaagtcccagacatgacaagatatgtacttcacttttccatgttaccagcttaggtaaattcataattgtaatgtgaattttaataatcagcatttgataagtccacaagtggggagtagttaagatagcaaattcagagtctttgctaagggggggcattgccctttttgaacataggcacctgctgggtcttaaaaataaaatctcgacatacttatggtgtttttaatatatagcaagctgttgcaagaggattttttaactatattgaaaaactgaagtatgaacaccacctgaaagaatcattgaagcaaatgaatgttggtgaagatttagaaaatgaagattttgacagtcgtagatacaaatttttggatgatgatggatccatttctcctattgaggagtcaacgtaagtggaatcatatgaaatactttggtaataggttataaattaaatttctatgttaattgcttcatattttgcctttaatatagttatacttaaataatgaacaaagatacagagtatgacaattgggattattacagttgagccaagcttggcacaccgttcatctagaattctccagaacacaaaattctcaaattttgtgtttcctttgactagtattgcagtttcagttatatttcagagtggaatatacaactaattaggtcatcgaagattctgtcatctcgatgataaattttaatattacagagcagaggatgaggatgcaacacatcttgaagataacgaatgtgatatcaaattggcagtaagtgacttatttttttcctattccattttgggaaggcaggagttggttgatacagaaggaattatatttagtttttctcttacacttcatttaacttttgaaaagctctataagtttactgcaggaaatgcaagaaggaaaataattttttagagacttgataaagaacatggggttttcagtactatttttaataagtagcattctgatacatattattgctagttaggatgtcaaatgaaaaaataagcaatgttaatttggatttttaacatctacatgtagtctctaggttatctgaagtaatccagggcattcagctatatgtaattactaaactatttgagttattgcttaatccatgattttttgtttgttttatgcagggggatagtttcatagtaagttctgaattccctgtaagactgagtgtatacttagaagaagaggatattactgaagaagctgctttgtctaaaaagagagctacaaaagccaaaaatactggacagagaggcctgaaaatgtgacaggatcatgaatgtcaaaggtgaagcatatagaaaaaacgacttcatagaaatgaataaagataaatgtggatatatgtaccagtctggtggtgaagaaattctgaaacccagaactttataacaagaaaaaaaatttttaaccctgtgaagaagtttgtgaaagaaacttgtgaagtagtaataattagaaaaaaaaccattaaaacaccagagaaaatacatagaaaaatttgagaaattgtcatttgatttctgaataagagcttacaggtgtcctgtgagtattgaaacaatgaaatgtagtgattttaattttgaaaagaaaatcttaaagtaacttgacacccaaccatcttgaagaggggatttgaaatgctgtaattttatcccagctttgttcagccatgacaagtgacctgtcagatgcttagtattgtaataacctcatttccctttccaaatttagagtatctttaatactattttttttagacagagtctcgatctgtcacccaggctgtagtgcaatggccgcagtcttggcttactgcaacctccatctcccgggttcaagcgattctgcctcagcctccttagtagctgggattacaggcgttagccagcacacccagctagtttttgtttttttagtagagacaggctttcaccatggtctcgaactcctgacctcaggcgatccgcctgccttggcctcccaaaatgctgggattataggtgtgagccatggcacctggcctaatactacttttaactaccattttcactttttattagttcaagaaaaggcatacacatttattcaacatgtatacctggggagaaccagtcattaccccgatgttcattattttgatcaccacgatagagctgactactctgctatgtagtgcattttgggactgcacttatgtatgtttttgtttaacgtggacaaagacttacagataggtgcaaaaaataaatcctcttttgcaacccagaactcattgttcagtatgagttttgatacatataagaagggatattatgatacctgagacagttgattgatgggagtattgatagccataaaggttggttccaggccaggtgcaatgggtcaagcctgcaatccccacaccaaggtgggagtattgcttgaaaccaggagttcaagaccagcctaggcagaaagtaagaaacacatctccacaaaaatttaaaaattagctgggtactggggcatgtgcctgtagttggagttactcagaaaggggggaggctgaggcagagttggaggctgcactgagctttgatggcaccactgtactccagcctgagtaacaaagacagaccctgtctcttaagaaaaaaaggttgattccaggcctgtagaatagataaacagcatgggatatgagggaaatcctcagcagtattaattttgcattccaatttcatgttgatgatatacacaatggctttttgttttaaaggcttttatcttgagaacatggtgtctggagttaaaggtatgtctcaatttgagttttcacatcatatttgtttatgtgtaggaaacagtatgttgtcagagcaagtttcattttattcagggacatttctaccatgcttttaattcccatttatactgatttctgaaaagaagaatcctagattcacacattttatagtgatgtgtcagattcattttagttgcaagcattagagggtcctgaatttgttagtttgtagcaataatcagaactttggatttcctacttgaagcctacagcattattttgaattaatgcacaatctaaaatgaggcagaggattttatggtttaatgcaaaatatagtataataaaagatgattacacaggtcataagaattcataaatttgaatgatgtagagtttgattaaaagttatataatgccaaagtcgtaacttacaggcacattatattcctgtattttataatggatgacaattaattttgagccaagaattaaaatttgctgaaatcttcgaattgggaaaacaacatcctctgttgcatactgaagttcataacaacagttagactttaaacttaaatcttaagtttaaatctttttcctttggttcatgtaaaggagctacttgatgttactttttatttatcattcctctggctcctaagcacaacgtgattgtgaaattattgtttttgtgattaacgtagtaggaagtttctgcagttggcaatattgtaagagcatattgcagtttctgctcataatttctttcctatggagtgttagactttgttatttatgtgtataaatactagctggacacagtggtgcctgtggtccccagctactctggaggctaaggcaggagaaacacttgagcccagcggtttgaggctacagtgagatgtgatcctgccacatctcactgtagcctcgaacccctgggctcaagtgattcagcaagaatcacacgatttttaaaagacatggcagatcctgtgtctttaaaaaaaaatcaaaaccttgtaaatagtggttgaggtctatcccgatggggcttttcctgtagcctgcacatcgttggaaacgcctcatagagtaactctgtggttttactttactcacaggactattgttagatctgtgggaaggaattacaagacagttgctaaaagtttgaaaaagacggttgctaaacgttatgaaaaaccagataatctacttttttaccttaggtattggcatactccacacatctgtaccattcttgagtgatcgcttaggtaagttttaattggtgacagtataatcttttgggaaataatgattacagttcagatgatgaatttaactgttcaactgctgaatgataacgggcatgaactaaaacttaattctgacagagctggatatggctgtataataaactggatcttaaatttatacttgggttttagttttaataactggaaatgtatcctttctaaatctttaattggtactttctataggaatgaatgtgatttgaactcattcatgttgagaggtaagtaaaatatttaacttataataatcaaggactcaaaagatgaaaaatagaaattacaccatcccagtatttcaggtataacacagaattagtaagatactggcaaaaatattacaatgtatatatttgtatagagaaggaaaatgaagagactgcatgtctatacctaccaaacgaaactacctgtgttctttgcatcattattcaactggcagttacacatatttcatcctaaagtcacgtaaacctgtgtggatatgttgaatcaatagggatatgaattacataaaaagaattttgtgtaactggcagtttgagcaacaatgagcttgacgtttgttgtctgatctgttaagttacatgtatatattccatctttaagttttatagagagactgggcaaagattaggcaaagactagagttgtagcttaaaatgtagttaatgtagcttccttattacagtgacaattaggaaaaaagctcaaattattgtacttgttaaaggaatttgagaggtttgtgaaagcatttctcagcaatattgcaaatttgggaatacgagttgtacagttcagtcataattgcactgcatggtatctgcactcagcagtttacacctgctagggtgttcaaaggtcagtgctatagaaattcagtatctggcatcgttggttttcttggctttgtgcttgttaaacctggtatttctactgatacagtatttgtgtaggtttctcagagtgttcagtttgatatactctaaaatagtaagcaatgcttttttttccagggtgtcaaattgagaaccaggtagatccccaccacctacagtaaaaaggtaagattctctgtttctattgattctgcttgtttccctctatcagtagcactgccagcataacaagaacttcgtacaaatacactactaagctttaaagacttttacaatgcctcattctagagaatgggcactgttgatcatggtgtccaaaaatagttaatgtggctaaattgagacaggttatgcttccatcacagtatgcatattgcagtggtgacaatgagacctgtaacattttgctatgtttatgagtaaaaatgtaggagaaaaatgttgacttttcaatattagaaataacatttaataaggaattttcagctcttataggaccactttttttatgtgctgtatattgactgaaacattgtaatgtggtatacattactgtgtcttggatcaggtgtcaaaatgtaactgtactttgtacaattcaacttctaggaccctaaagtaaattggttgaagaaattagatcccaaagattcttggtaagttaattcattacttaaaaggccatgcaggttattttgttgaatactagcttttctccaaatgttattttaggttatttatttatctagcaatgctatgcaacatctatcaccacttaggagtaaaaaaaaggactaggcttacgttattatgtgtttaaacttcattattaacgatgttatgatgatgggcgaaatgttcaactgctctgaaggggctgaatgaaaatggcctttctgaacatccatttacattaaatattgcattgtatttcagaagattataaaagctcaaaggtaaaagttaccagaaacatgatcatagagcaaattcggatatgaatgggcatgggatcattgatttttaaaaatacctattagtttaaatagctattttaagcatagaattttcaataccttacttggggtgccgggtttcaggatactttggaacctaagcaacctcattcttgaaagatagatttatgtacttaatagtaaatataaatttgaaatacacatttttccacaggtgaattttgaagtcttcatcagtatatccatattaaaacgagatgacagaagccaaagtaattatggcaagtaatggtttttatcttaactataagttatttgctcaagggtgtaatggtcattaccaaggcttttagaatgcagtttctcatttgctgtggacatgaccataaaaaaatttcccagtaggttttctatctgctactttgctagcaatcagcttattgggaacagttgattaactgtaatagaaatgcaatacaaataaaatgtgaaccacatgtgatttttctttaaaatcagtgagatttgaaaattctcctagatctcttgaatcatgcaaatttgctttgcctttatattgtaacccttgtgggttgctaataaccaagcagtttgtagtagagttaactcaggctcgttctagggactcattcatgttcactcactgtacactcatctctggaaatgtaaaatttacttttatactattgttatgtagggctgacaggacaactggatcagtttcattaaaaaggtatgtatgcattagaaaagacatttgtatgggtcatttcaaagagggcttatgaggctgtgaaacccagagctcttaacgctgtgaccaaagatggaagttctctataggaagccatagcactcctaatgtttggtgctatgttttcctgaggagatataaaacgtaataatccaggattgttgccatgtgagagttttaaaggttaatcaaaatttctcttcttcagggcaaacttgaagataaatcttttgactccagctctttagaggatctaaagtgaccttgatggacagtggaagaaatcacaacatggaattcctcgaataacaatttattgactttaaataattttgtctaatgctacatatacacaattaaaaaacctttacactatttctagaaagtcagcatgtatttttggctcgaagtttctctagtgttttctgtggaaggaataaaaatttgagtttcagttgtgtacttcatgcttgaaaaattaagtccttctccctcagttatactcaccttatggaattcttttgcccttgctctgttttgggcataagcttcttgttttgttttttcttccttttgttgtttcacttcagctagttgattgtataacctgtaaagaatttatatagaattagagacaaacactgcaaaaagtgaatcactaaaaaaaaaaaaaaaattaaccctaccttagacccctttggtgccttagagcctgtgtagtctttctgtcttcaggaaaagatgctctgactttattcacgccctttagacgactcacagatgaacctgaggaaagaaaagtgaaatcaagttgtaaacacaaggctttaaacatttcagggagttggttgaagattttaaaaattcaacatacttatagatggtttctctttaactgttttgatttgagaattttcagagacatgaattttattccttatttctttctgcctctggtgggatctctccataaatgattttttcctctttataaatgcttcttgtaagctccctggtacaggtgtaagcctgcgaggggtttctgctgggggaaaagaaatttatgacagaaataggcaaagtatctactttccattagaagtgtggaggccgtccaaggcttacctgtagatgctgtccttggtttttctatggaaagttctgatacagctggataatctgaggcttctgttgctgatacaagaggcagaaactcactcacctaatggcaagaaagttgcatgttttactctttttaaacgctttaagcgggtcttgctctgctgtcagattagagtgcagcggcatgatcacacctcactgcagcctcaatcttagctgggtctacagagacccgccaccatgcctgatttttgtattttttgtagggattgggttttgccttgttgcccaggctggtcttgaactgggcttaggctccactgccctcacacctctaggcctctgtttagatagctttattcttattgcctccctactcccctagtaaaattaccagttgttctgaagtcatttttcaatatctgggaataagtttaggtaaaacttccaacttggcactataacactaggtgtataagattagttctgccagtcttggagacaggcataaattggagtggggattaaaagaaaatgcacaatggttgacagaatagtgaaggtttaagacaaattgagagctggtgggggtgtcggcttagttaaatgcatagcataattccctccaatgagtaccttctgataagttgtaagagacaaatcaactggtttgcttgtaatagaataaaatagaaggaaagcttaaatttacctgaaagaagcattttgcttcattctcgctcttctcttctagggttaaatttgcaaaatccatttcagcaatactggtatcagtggtgcttattaaagtaagttctggttcttccattataccatggccagtttctgtttcctgtgaaccacaattaaaaggaaaaccatgtcaaaatagccttaaaagacttaaactaatcgttttgtatataatgcacattttttgcaagtgtatataaatgtgaaaatggaggaagaaaagcaatgattggcaaagaccaacagatcagatttccttaggcttccataactccagcattcagttgtagaaatactggagcctactttggggaggggatgaaatagtgtgacaatggactgaaaggtatctaccacaatgattacaaacctaaatgcttgtagtgttgggcaaaaaatataaatgcaggttggctgtgccgaattgtatcctttaaagggagcaggggtcgactgggctgctaccaaatgtgggccactgactgctaacagataatgtttcaaaagtatctaaacacaacaagaacaaaagcagccacataaaacgtggtttagttgtaattcttattttcaatctgttatgtttatttgtggaaggataaactgcacatactgctagatgaaaaccagtcaccagttgactggtgttgaaagcaagcagattataagttgcttaatatgaggagcaggtttccaatacttattccaataatggatgaattcattgcactggaatgaggctcaacactgaaagtgctgaagcacaggcagaaccaccatttttcagggaagttggagaaaggatatctgaattgggagaaaaaggatcttttgtaaaatactctcagaagacagttttcaaatttttaagtttctgcattatgctggatatttctagtgatcacaagctggatagcaatattaacaagcagttttgcttgtattttgtttcaggtttttcctgccaggcattgtggtgtgtccaaactacttcggaagttgaggcaggaggatcccttgatcctaggagtttgagttcagcctgggtagcatagtgggaacttcatctctaattttagaagaaaaaagttttttcccaaaaaggaatttaaatgttatttatacaacactgatttcacttacccagactggtatagagctctgtaatgaaaatgatccagaacttgcaaaaagctctgattctcctagttgagatagttttttggtgatttttggaatgtctgtttcagctgaattctcaaaatatttttcattttgagtagttaaggaatatggtgcctgaattgaagttcccatctccactgttcttacacataatcgagagtcagtttcctctacctgtggatttatgtctaaaaccctacaggtttcatttttattatcttcaatgagtccttgactttgtaacattgtaacaacccctctttttgatagttcttcaaagcccatactttcctttctgctttctagttggtgttttgttgagcactcactagagttagaaccacatggagtgctatgctgtacatttaactgatcaaatacattagcttcatcagatgaactgtagactgaacttaagtttcctatagaaagctggaaatgaacaatttttttcttgttttgtaatatttcagtatgttcttcagagggatagttctgatttttcatgccttgggaagaatctcttgcttcaatgctaaaaatacttggtagatcagcatgctggctctcctcctgtgaagaatattctggctgaagctgttcaaaacattgttcagatcctgcattaagaaattcaaaaatcagttaatcatcgttacatgttgtaaaagttggatactgacagtctctaatagtttatcatccaattgcaagtaacctacaattttaggcataaaagttgatgtgtataaacatgaatacaaagataaggatggtcacagtgatttctcaaactacagctcacaccaagtattttttctttttctattaatatttaataaggacaatatggctataaactgaggatgttttcctctataagaactgaatatgactttaataacagaaaagagaataaagcatccatgtgtatctcaattatccatgtgtgtatatataattgtacatccttgtgtatctcatgtatgtttgtgtgtatatataatcattgtaccaaaggctcaagaatacttgttttctatgttgcccaggctggtcttgaactcctgggctccagggatcctcctgccgcagcttcccaaagtgctaggattacaggcgtgagccactatacttggcctaagaagaatacttaaactggctgggcatggtggctcacacctgtaatcccagcactttgggaggccaagacgagtggatcatctgaggtcgggagttctagaccagcctgaccaacatagtgaaaccctgtctatactaaaaatagaaaattagctgggtgtggtggcacatgcctgtaatcccagctacttgggaggctgagtgaggcaggagaatcacttgaacccagcaggcggaggttgcagtgagccaagattgcaccactgcactccagcctgggcaacaagagtgaaactcagtcttcaaaaacaaaataaaaacaaaaacaaaaacaaaaaaaacaaacaaaaaaataaatacttaaactgttaactatcacataatgattgaggtagggaaattgaggaacaagaggcaacacttttccttttatttcataatgttcagtattgtttaaaaaaatgcatgtattacttctgtaatttaaatattttttaacacccaggataggggtgagagcaggggtgaagacaaaccaagaggtgctaggcttaatttctaaggaaatggatgtaaaaaatcatggaaaaattaactttttctaacttagtcatacatacccccaataatattttctgtagcaaaactgtgagctccaacatgagccaagttagtgtcaggttgttgattcggacttgtgttaagagaagaatgcatgctggtcctcctcagtgctgtgaaataaactgtacttttggataatccagtagcacagtggctttcagatgaagaatctgatctctggcaggaaacaaaagggaaaggctgaaatactgattaggtattaacaattgaaacaataatcattgtgttcctttggtattactcttccttaattatcacttcactatgacagcaatgatttgctttttcaaatccagttcttttcaatcaatatgaaagagactttaaaatgtcaggccatcaggaagtggaagcaaaaagactcaggtttaaatctcagctcctttgactgtgtaggaggatactttaaattttgcaaaattgtatttactttactgtttaaatatgttccacaactaaaagttgttattaagccttttatggcatcatactccctaggtggagacaggtggatgggacaaacaaaattctaatgtagctgttttcctttttttttttttgagatggggtctcactatgttgtccaggctggagtgcagtggcacgatctcggctcactgcaacctctgcctcccaggttcaagcggttctcagcctcccgagtagctgggactacaggcatgccatcacacccaactaatttttgtgttttttagtagagatgggatttcaccatgttggccaggctgatctcaaactcctggcctcaagcaatccacctgcctcagactcccaaagtgctgggattacaggcatgagccaccgcacccggcccaatgcagctgttttcaaagttggttccacattagaatcacttggggagcttaaaaaataataataataattagtactatctgagcactcccagaaactctgctttaattggtctagggtgtagtctggacaataggatttatttttattttttatttaagttttccatgtgattctttttgtttgtttgtttgtttctttttttaaagacagggtctggctctgtcacccagactggagtgtagtggcacgatctcagctcactgcagcctccacctcctgggctcaagtggtcctcccacctcagcctcccgagtagctgggactacaggtgcgcaccacgacacctggctaatttttgtattttcagtagagacagggttttgccatgttggccaggctggtctcgaactcttggcctcaagtaatctgcccgccttgggctctcaaagtgctgggattacaggtgtgagccactgtgcccagacttccatgtgattctaggtaagggtttagaagaacttttgttccagtagaagaaatggcttaaaactatttttagatattcactgcaatgggacatctactttaatatacctggtaaaagtctctgttgtctggagaaatcccagaggatgatgatgataagtcaaaatctggatgtggttctaagggtttaaacagctgatgatgcaaattaggaaaaatgtgttccaattctggaaagtcaaggtcaactgttagaatttttgagggaaaaaaatcataaatttatttttaaggtaaacactagaaaaggagtattaagaacatattcataaacgcttattttcaggtaactccagtgtaacaaaaacttcagtttttcccccatgatcagcagatgctttaaagttaagtcctatcatgattatttcaaaggtccaaaatatggatcctctcagtgaccaaaactttttaagttttatttttagagaaatttaatttttttaaatttaaaaaatttttttttaaaatagagatggggtctcagtgttgcccaggctggtcttgaaatcctgggctcaagcaatcctcctgcctcagcctcccaaagtgctacgattacaggtatgaacaaacttttgacaaatacgaatttccatttccacagccttatgaggctaatgaggatcaacaggacatatgtaaccactgcttcagtataagcttaaaaaaggaaaaaggctcactgtattcagtgttactatgggccagacattgtgctttatgtgcactatctcatttaatctataatattcctcttttataaaagattaaaaagtaacttgcccatggttttacagctaggaaatggtcaggctatgactcaaatccagaactgtatgatttctgagctcctgctcttatttatcagtaataccgcctcagccgtaatagctaactctgcaatggcaaaggaagatttgctaattaatctcctataaatgtgcctcagtgagtctaattggttccagatcccctttctcactaaatgccctcaatatattctgtggtaaaacggtgttgtagcaggccataagaacatgaagctcaaacaatcactgcataaaatttaaaatgatgaaaggtgaaaatttaaaacttaatttacataaaagtattgctttaaaataattttaccttgcaaatctgttttttcaggtatcaaatttgcttcattaatgtacttgtctatcatttgctgaaagtgtgtgtgaccacatgtagtttcatccactgcaggcaacagagatttatgaacgtctgaagagttctgccgctgataaatatcttgtgttgaaggaactatggaacttataatatttgtttcctc

SEQ ID NO: 1368 - DNA, 16285 bp, Homo sapiens
gtcaatatttagggaagctttgtcatatttactaaatttcataatttcagaaaactgtttaaaacaaagagcaattgatggataaatcaggaatagattctcttgaccatgtgacatctgatgctgtggaacttgcaaatcgaaggtgagtggattcaatcatgtttattgtatctgaattatgagaaactattgtatataatgagtgacagtaaagataattttcaggaattgggaaagaaggaaaactagatttcactgaccttccaagtttatctagttacatagattgatataatagcattgcaaatactttaaattcaaaatgtgaatatattatgggacacattcgtcgagaaaaaatgtattctttgggtcatattagcatctcttccagactacatcctccggttcggtaggctgtgtttgttttactcagacactcttagcagtgaaccgaaccatacagccttttggagctcatacattgtcttgaaagatacagtttttttgtaagctgagcatagtggtgcatgccattagtcctagctagctacttgggaggctgaggcaggagcatccctggagtttccaggagtttgaggttgcagtgagctgtgattgcaccactgcactccagtctgggtgacagcaagacgatgtctacaaaactctttaataagagctgtagcattatgggctatttaaataggatgatcagtagaaaggctagctggttctgagcccatcctttaaaaaatttttaattctgggcatgttttctgagttggtcttggaagaaatgtacatttaggactgggtattaatggtaataagcagtaagaaaagaagatgaaattaatttttttcccatttttctagtgataactcttctgatagcagcttatttaaaactcagtgtatcccttactcacctaaaggggagaaaagaaaccccattcgaaaatttgttcgtacacctgaaagtgttcacgcaagtgattcatcaagtgactcatcttttgaaccaataccattgactataaaagctatttttgaaagattcaagaacaggaaaaagagatataaaaaaaagaaaaagaggaggtaccagccaacaggaagaccacggggaagaccagaaggaaggagaaatcctatatactcactaatagataagaagaaacaatttagaagcagaggatctggcttcccatttttagaatcagagaatgaaaaaaacgcaccttggagaaaaattttaacgtttgaggtgagtcagcattttacatacatggctacacataactcaagatgcccaaaatgatttgttggccaatttagaattgtctcagatatactgggaacagactgtctgcaattttgatactcttctatactgacttacccctaaagtccaccctatccttcaactgaatcttgacttgtatctcttaatataactacactttgccatatttaaaagatagtgctccaaggctctttgtataaaatcctttgatcttatcccatctcaggtctttaaacacaaccctaaaactcagtggggataataaaagctcacataacttgaaattacttttgcagtaacctaaactaaaaccacacatgccttatgttcagtggatatattcttaaggcctagatgtttctaagccaattatctgaaaaatacgctaatacttaggagtagacttttttaaatatttgagagttgtatgttgaatgaattcagaattaatttatgatcccttgccagaacctgaaattttatttgggaggattaatacatgttaatctcttcagttaatctcttaagtttaaggtgattatagtaaacattagaaatcttattcctgtttttacattttaaaatgcctttagtaagtcccagacatgacaagatatgtacttcacttttccatgttaccagcttaggtaaattcataattgtaatgtgaattttaataatcagcatttgataagtccacaagtggggagtagttaagatagcaaattcagagtctttgctaagggggggcattgccctttttgaacataggcacctgctgggtcttaaaaataaaatctcgacatacttatggtgtttttaatatatagcaagctgttgcaagaggattttttaactatattgaaaaactgaagtatgaacaccacctgaaagaatcattgaagcaaatgaatgttggtgaagatttagaaaatgaagattttgacagtcgtagatacaaatttttggatgatgatggatccatttctcctattgaggagtcaacgtaagtggaatcatatgaaatactttggtaataggttataaattaaatttctatgttaattgcttcatattttgcctttaatatagttatacttaaataatgaacaaagatacagagtatgacaattgggattattacagttgagccaagcttggcacaccgttcatctagaattctccagaacacaaaattctcaaattttgtgtttcctttgactagtattgcagtttcagttatatttcagagtggaatatacaactaattaggtcatcgaagattctgtcatctcgatgataaattttaatattacagagcagaggatgaggatgcaacacatcttgaagataacgaatgtgatatcaaattggcagtaagtgacttatttttttcctattccattttgggaaggcaggagttggttgatacagaaggaattatatttagtttttctcttacacttcatttaacttttgaaaagctctataagtttactgcaggaaatgcaagaaggaaaataattttttagagacttgataaagaacatggggttttcagtactatttttaataagtagcattctgatacatattattgctagttaggatgtcaaatgaaaaaataagcaatgttaatttggatttttaacatctacatgtagtctctaggttatctgaagtaatccagggcattcagctatatgtaattactaaactatttgagttattgcttaatccatgattttttgtttgttttatgcagggggatagtttcatagtaagttctgaattccctgtaagactgagtgtatacttagaagaagaggatattactgaagaagctgctttgtctaaaaagagagctacaaaagccaaaaatactggacagagaggcctgaaaatgtgacaggatcatgaatgtcaaaggtgaagcatatagaaaaaacgacttcatagaaatgaataaagataaatgtggatatatgtaccagtctggtggtgaagaaattctgaaacccagaactttataacaagaaaaaaaatttttaaccctgtgaagaagtttgtgaaagaaacttgtgaagtagtaataattagaaaaaaaaccattaaaacaccagagaaaatacatagaaaaatttgagaaattgtcatttgatttctgaataagagcttacaggtgtcctgtgagtattgaaacaatgaaatgtagtgattttaattttgaaaagaaaatcttaaagtaacttgacacccaaccatcttgaagaggggatttgaaatgctgtaattttatcccagctttgttcagccatgacaagtgacctgtcagatgcttagtattgtaataacctcatttccctttccaaatttagagtatctttaatactattttttttagacagagtctcgatctgtcacccaggctgtagtgcaatggccgcagtcttggcttactgcaacctccatctcccgggttcaagcgattctgcctcagcctccttagtagctgggattacaggcgttagccagcacacccagctagtttttgtttttttagtagagacaggctttcaccatggtctcgaactcctgacctcaggcgatccgcctgccttggcctcccaaaatgctgggattataggtgtgagccatggcacctggcctaatactacttttaactaccattttcactttttattagttcaagaaaaggcatacacatttattcaacatgtatacctggggagaaccagtcattaccccgatgttcattattttgatcaccacgatagagctgactactctgctatgtagtgcattttgggactgcacttatgtatgtttttgtttaacgtggacaaagacttacagataggtgcaaaaaataaatcctcttttgcaacccagaactcattgttcagtatgagttttgatacatataagaagggatattatgatacctgagacagttgattgatgggagtattgatagccataaaggttggttccaggccaggtgcaatgggtcaagcctgcaatccccacaccaaggtgggagtattgcttgaaaccaggagttcaagaccagcctaggcaagaaagtaagaaacacatctccacaaaaatttaaaaattagctgggtactggggcatgtgcctgtagttggagttactcagaaaggggggaggctgaggcagagttggaggctgcactgagctttgatggcaccactgtactccagcctgagtaacaaagacagaccctgtctcttaagaaaaaaaggttgattccaggcctgtagaatagataaacagcatgggatatgagggaaatcctcagcagtattaattttgcattccaatttcatgttgatgatatacacaatggctttttgttttaaaggcttttatcttgagaacatggtgtctggagttaaaggtatgtctcaatttgagttttcacatcatatttgtttatgtgtaggaaacagtatgttgtcagagcaagtttcattttattcagggacatttctaccatgcttttaattcccatttatactgatttctgaaaagaagaatcctagattcacacattttatagtgatgtgtcagattcattttagttgcaagcattagagggtcctgaatttgttagtttgtagcaataatcagaactttggatttcctacttgaagcctacagcattattttgaattaatgcacaatctaaaatgaggcagaggattttatggtttaatgcaaaatatagtataataaaagatgattacacaggtcataagaattcataaatttgaatgatgtagagtttgattaaaagttatataatgccaaagtcgtaacttacaggcacattatattcctgtattttataatggatgacaattaattttgagccaagaattaaaatttgctgaaatcttcgaattgggaaaacaacatcctctgttgcaatactgaagttcataacaacagttagactttaaacttaaatcttaagtttaaatctttttcctttggttcatgtaaaggagctacttgatgttactttttatttatcattcctctggctcctaagcacaacgtgattgtgaaattattgtttttgtgattaacgtagtaggaagtttctgcagttggcaatattgtaagagcatattgcagtttctgctcataatttctttcctatggagtgttagactttgttatttatgtgtataaatactagctggacacagtggtgcctgtggtccccagctactctggaggctaaggcaggagaaacacttgagcccagcggtttgaggctacagtgagatgtgatcctgccacatctcactgtagcctcgaacccctgggctcaagtgattcagcaagaatcacacgatttttaaaagacatggcagatcctgtgtctttaaaaaaaaatcaaaaccttgtaaatagtggttgaggtctatcccgatggggcttttcctgtagcctgcacatcgttggaaacgcctcatagagtaactctgtggttttactttactcacaggactattgttagatctgtgggaaggaattacaagacagttgctaaaagtttgaaaaagacggttgctaaacgttatgaaaaaccagataatctacttttttaccttaggtattggcatactccacacatctgtaccattcttgagtgatcgcttaggtaagttttaattggtgacagtataatcttttgggaaataatgattacagttcagatgatgaatttaactgttcaactgctgaatgataacgggcatgaactaaaacttaattctgacagagctggatatggctgtataataaactggatcttaaatttatacttgggttttagttttaataactggaaatgtatcctttctaaatctttaattggtactttctataggaatgaatgtgatttgaactcattcatgttgagaggtaagtaaaatatttaacttataataatcaaggactcaaaagatgaaaaatagaaattacaccatcccagtatttcaggtataacacagaattagtaagatactggcaaaaatattacaatgtatatatttgtatagagaaggaaaatgaagagactgcatgtctatacctaccaaacgaaactacctgtgttctttgcatcattattcaactggcagttacacatatttcatcctaaagtcacgtaaacctgtgtggatatgttgaatccatagggatatgaattacataaaaagaattttgtgtaactggcagtttgagcaacaatgagcttgacgtttgttgtctgatctgttaagttacatgtatatattccatctttaagttttatagagagactgggcaaagattaggcaaagactagagttgtagcttaaaatgtagttaatgtagcttccttattacagtgacaattaggaaaaaagctcaaattattgtacttgttaaaggaatttgagaggtttgtgaaagcatttctcagcaatattgcaaatttgggaatacgagttgtacagttcagtcataacttgcactgcatggtatctgcactcagcagtttacacctgctagggtgttcaaaggtcagtgctatagaaattcagtatctggcatcgttggttttcttggctttgtgcttgttaaacctggtatttctactgatacagtatttgtgtaggtttctcagagtgttcagtttgatatactctaaaatagtaagcaatgcttttttttccagggtgtcaaattgagaaccaggtagatccccaccacctacagtaaaaaggtaagattctctgtttctattgattctgcttgtttccctctatcagtagcactgccagcataacaagaacttcgtacaaatacactactaagctttaaagacttttacaatgcctcattctagagaatgggcactgttgatcatggtgtccaaaaatagttaatgtggctaaattgagacaggttatgcttccatcacagtatgcatattgcagtggtgacaatgagacctgtaacattttgctatgtttatgagtaaaaatgtaggagaaaaatgttgacttttcaatattagaaataacatttaataaggaattttcagctcttataggaccactttttttatgtgctgtatattgactgaaacattgtaatgtggtatacattactgtgtcttggatcaggtgtcaaaatgtaactgtactttgtacaattcaacttctaggaccctaaagtaaattggttgaagaaattagatcccaaagattcttggtaagttaattcattacttaaaaggccatgcaggttattttgttgaatactagcttttctccaaatgttattttaggttatttatttatctagcaatgctattgcaacatctatcaccacttaggagtaaaaaaaaggactaggcttacgttattatgtgtttaaacttcattattaacgatgttatgatgatgggcgaaatgttcaactgctctgaaggggctgaatgaaaatggcctttctgaacatccatttacattaaatattgcattgtatttcagaagattataaaagctcaaaggtaaaagttaccagaaacatgatcatagagcaaattcggatatgaatgggcatgggatcattgatttttaaaaatacctattagtttaaatagctattttaagcatagaattttcaataccttacttggggtgccgggtttcaggatactttggaacctaagcaacctcattcttgaaagatagatttatgtacttaatagtaaatataaatttgaaatacacatttttccacaggtgaattttgaagtcttcatcagtatatccatattaaaacgagatgacagaagccaaagtaattatggcaagtaatggtttttatcttaactataagttatttgctcaagggtgtaatggtcattaccaaggcttttagaatgcagtttctcatttgctgtggacatgaccataaaaaaatttcccagtaggttttctatctgctactttgctagcaatcagcttattgggaacagttgattaactgtaatagaaatgcaatacaaataaaatgtgaaccacatgtgatttttctttaaaatcagtgagatttgaaaattctcctagatctcttgaatcatgcaaatttgctttgcctttatattgtaacccttgtgggttgctaataaccaagcagtttgtagtagagttaactcaggctcgttctagggactcattcatgttcactcactgtacactcatctctggaaatgtaaaatttacttttatactattgttatgtagggctgacaggacaactggatcagtttcattaaaaaggtatgtatgcattagaaaagacatttgtatgggtcatttcaaagagggcttatgaggctgtgaaacccagagctcttaacgctgtgaccaaagatggaagttctctataggaagccatagcactcctaatgtttggtgctatgttttcctgaggagatataaaacgtaataatccaggattgttgccatgtgagagttttaaaggttaatcaaaatttctcttcttcagggcaaacttgaagataaatcttttgactccagctctttagaggatctaaagtgaccttgatggacagtggaagaaatcacaacatggaattcctcgaataacaatttattgactttaaataattttgtctaatgctacatatacacaattaaaaaacctttacactatttctagaaagtcagcatgtatttttggctcgaagtttctctagtgttttctgtggaaggaataaaaatttgagtttcagttgtgtacttcatgcttgaaaaattaagtccttctccctcagttatactcaccttatggaattcttttgcccttgctctgttttgggcataagcttcttgttttgttttttcttccttttgttgtttcacttcagctagttgattgtataacctgtaaagaatttatatagaattagagacaaacactgcaaaaagtgaatcactaaaaaaaaaaaaaaaattaaccctaccttagacccctttggtgccttagagcctgtgtagtctttctgtcttcaggaaaagatgctctgactttattcacgccctttagacgactcacagatgaacctgaggaaagaaaagtgaaatcaagttgtaaacacaaggctttaaacatttcagggagttggttgaagattttaaaaattcaacatacttatagatggtttctctttaactgttttgatttgagaattttcagagacatgaattttattccttatttctttctgcctctggtgggatctctccataaatgattttttcctctttataaatgcttcttgtaagctccctggtacaggtgtaagcctgcgaggggtttctgctgggggaaaagaaatttatgacagaaataggcaaagtatctactttccattagaagtgtggaggccgtccaaggcttacctgtagatgctgtccttggtttttctatggaaagttctgatacagctggataatctgaggcttctgttgctgatacaagagcagaaactcactcacctaatggcaagaaagttgcatgttttactctttttaaacgctttaagcgggtcttgctctgctgtcagattagagtgcagcggcatgatcacacctcactgcagcctcaatcttagctgggtctacagagacccgccaccatgcctgatttttgtattttttgtagggattgggttttgccttgttgcccaggctggtcttgaactgggcttaggctccactgccctcacacctctaggcctctgtttagatagctttattcttattgcctccctactcccctagtaaaattaccagttgttctgaagtcatttttcaatatctgggaataagtttaggtaaaacttccaacttggcactataacactaggtgtataagattagttctgccagtcttggagacaggcataaattggagtggggattaaaagaaaatgcacaatggttgacagaatagtgaaggtttaagacaaattgagagctggtgggggtgtcggcttagttaaatgcatagcataattccctccaatgagtaccttctgataagttgtaagagacaaatcaactggtttgcttgtaatagaataaaatagaaggaaagcttaaatttacctgaaagaagcattttgcttcattctcgctcttctcttctagggttaaatttgcaaaatccatttcagcaatactggtatcagtggtgcttattaaagtaagttctggttcttccattataccatggccagtttctgtttcctgtgaaccacaattaaaaggaaaaccatgtcaaaatagccttaaaagacttaaactaatcgttttgtatataatgcacattttttgcaagtgtatataaatgtgaaaatggaggaagaaaagcaatgattggcaaagaccaacagatcagatttccttaggcttccataactccagcattcagttgtagaaatactggagcctactttggggaggggatgaaatagtgtgacaatggactgaaaggtatctaccacaatgattacaaacctaaatgcttgtagtgttgggcaaaaaatataaatgcaggttggctgtgccgaattgtatcctttaaagggagcaggggtcgactgggctgctaccaaatgtgggccactgactgctaacagataatgtttcaaaagtatctaaacacaacaagaacaaaagcagccacataaaacgtggtttagttgtaattcttattttcaatctgttatgtttatttgtggaaggataaactgcacatactgctagatgaaaaccagtcaccagttgactggtgttgaaagcaagcagattataagttgcttaatatgaggagcaggtttccaatacttattccaataatggatgaattcattgcactggaatgaggctcaacactgaaagtgctgaagcacaggcagaaccaccatttttcagggaagttggagaaaggatatctgaattgggagaaaaaggatcttttgtaaaatactctcagaagacagttttcaaatttttaagtttctgcattatgctggatatttctagtgatcacaagctggatagcaatattaacaagcagttttgcttgtattttgtttcaggtttttcctgccaggcattgtggtgtgtccaaactacttcggaagttgaggcaggaggatcccttgatcctaggagtttgagttcagcctgggtagcatagtgggaacttcatctctaattttagaagaaaaaagttttttcccaaaaaggaatttaaatgttatttatacaacactgatttcacttacccagactggtatagagctctgtaatgaaaatgatccagaacttgcaaaaagctctgattctcctagttgagatagttttttggtgatttttggaatgtctgtttcagctgaattctcaaaatatttttcattttgagtagttaaggaatatggtgcctgaattgaagttcccatctccactgttcttacacataatcgagagtcagtttcctctacctgtggatttatgtctaaaaccctacaggtttcatttttattatcttcaatgagtccttgactttgtaacattgtaacaacccctctttttgatagttcttcaaagcccatactttcctttctgctttctagttggtgttttgttgagcactcactagagttagaaccacatggagtgctatgctgtacatttaactgatcaaatacattagcttcatcagatgaactgtagactgaacttaagtttcctatagaaagctggaaatgaacaatttttttcttgttttgtaatatttcagtatgttcttcagagggatagttctgatttttcatgccttgggaagaatctcttgcttcaatgctaaaaatacttggtagatcagcatgctggctctcctcctgtgaagaatattctggctgaagctgttcaaaacattgttcagatcctgcattaagaaattcaaaaatcagttaatcatcgttacatgttgtaaaagttggatactgacagtctctaatagtttatcatccaattgcaagtaacctacaattttaggcataaaagttgatgtgtataaacatgaatacaaagataaggatggtcacagtgatttctcaaactacagctcacaccaagtattttttctttttctattaatatttaataaggacaatatggctataaactgaggatgttttcctctataagaactgaatatgactttaataacagaaaagagaataaagcatccatgtgtatctcaattatccatgtgtgtatatataatttgtacatccttgtgtatctcatgtatgtttgtgtgtatatataatcatttgtaccaaaggctcaagaatacttgttttctatgttgcccaggctggtcttgaactcctgggctccagggatcctcctgccgcagcttcccaaagtgctaggattacaggcgtgagccactatacttggcctaagaagaatacttaaactggctgggcatggtggctcacacctgtaatcccagcactttgggaggccaagacgagtggatcatctgaggtcgggagttctagaccagcctgaccaacatagtgaaaccctgtctatactaaaaatagaaaattagctgggtgtggtggcacatgcctgtaatcccagctacttgggaggctgagtgaggcaggagaatcacttgaacccagcaggcggaggttgcagtgagccaagattgcaccactgcactccagcctgggcaacaagagtgaaactcagtcttcaaaaacaaaataaaaacaaaaacaaaaacaaaaaaaacaaacaaaaaaataatacttaaactgttaactatcacataatgattgaggtagggaaattgaggaacaagaggcaacacttttccttttatttcataatgttcagtattgtttaaaaaaatgcatgtattacttctgtaatttaaatattttttaacacccaggataggggtgagagcaggggtgaagacaaaccaagaggtgctaggcttaatttctaaggaaatggatgtaaaaaatcatggaaaaattaactttttctaacttagtcatacatacccccaataatattttctgtagcaaaactgtgagctccaacatgagccaagttagtgtcaggttgttgattcggacttgtgttaagagaagaatgcatgctggtcctcctcagtgctgtgaaataaactgtacttttggataatccagtagcacagtggctttcagatgaagaatctgatctctggcaggaaacaaaagggaaaggctgaaatactgattaggtattaacaattgaaacaataatcattgtgttcctttggtattactcttccttaattatcacttcactatgacagcaatgatttgctttttcaaatccagttcttttcaatcaatatgaaagagactttaaaatgtcaggccatcaggaagtggaagcaaaaagactcaggtttaaatctcagctcctttgactgtgtaggaggatactttaaattttgcaaaattgtatttactttactgtttaaatatgttccacaactaaaagttgttattaagccttttatggcatcatactccctaggtggagacaggtggatgggacaaacaaaattctaatgtagctgttttcctttttttttttttgagatggggtctcactatgttgtccaggctggagtgcagtggcacgatctcggctcactgcaacctctgcctcccaggttcaagcggttctcagcctcccgagtagctgggactacaggcatgccatcacacccaactaatttttgtgttttttagtagagatgggatttcaccatgttggccaggctgatctcaaactcctggcctcaagcaatccacctgcctcagactcccaaagtgctgggattacaggcatgagccaccgcacccggcccaatgcagctgttttcaaagttggttccacattagaatcacttggggagcttaaaaaataataataataattagtactatctgagcactcccagaaactctgctttaattggtctagggtgtagtctggacaataggatttatttttattttttatttaagttttccatgtgattctttttgtttgtttgtttgtttctttttttaaagacagggtctggctctgtcacccagactggagtgtagtggcacgatctcagctcactgcagcctccacctcctgggctcaagtggtcctcccacctcagcctcccgagtagctgggactacaggtgcgcaccacgacacctggctaatttttgtattttcagtagagacagggttttgccatgttggccaggctggtctcgaactcttggcctcaagtaatctgcccgccttgggctctcaaagtgctgggattacaggtgtgagccactgtgcccagacttccatgtgattctaggtaagggtttagaagaacttttgttccagtagaagaaatggcttaaaactatttttagatattcactgcaatgggacatctactttaatatacctggtaaaagtctctgttgtctggagaaatcccagaggatgatgatgataagtcaaaatctggatgtggttctaagggtttaaacagctgatgatgcaaattaggaaaaatgtgttccaattctggaaagtcaaggtcaactgttagaatttttgagggaaaaaaatcataaatttatttttaaggtaaacactagaaaaggagtattaagaacatattcataaacgcttattttcaggtaactccagtgtaacaaaaacttcagtttttcccccatgatcagcagatgctttaaagttaagtcctatcatgattatttcaaaggtccaaaatatggatcctctcagtgaccaaaactttttaagttttatttttagagaaatttaatttttttaaatttaaaaaatttttttttaaaatagagatggggtctcagtgttgcccaggctggtcttgaaatcctgggctcaagcaatcctcctgcctcagcctcccaaagtgctacgattacaggtatgaacaaacttttgacaaatacgaatttccatttccacagccttatgaggctaatgaggatcaacaggacatatgtaaccactgcttcagtataagcttaaaaaaggaaaaaggctcactgtattcagtgttactatgggccagacattgtgctttatgtgcactatctcatttaatctataatattcctcttttataaaagattaaaaagtaacttgcccatggttttacagctaggaaatggtcaggctatgactcaaatccagaactgtatgatttctgagctcctgctcttatttatcagtaataccgcctcagccgtaatagctaactctgcaatggcaaaggaagatttgctaattaatctcctataaatgtgcctcagtgagtctaattggttccagatcccctttctcactaaatgccctcaatatattctgtggtaaaacggtgttgtagcaggccataagaacatgaagctcaaacaatcactgcataaaatttaaaatgatgaaaggtgaaaatttaaaacttaatttacataaaagtattgctttaaaataattttaccttgcaaatctgttttttcaggtatcaaatttgcttcattaatgtacttgtctatcatttgctgaaagtgtgtgtgaccacatgtagtttcatccactgcaggcaacagagatttatgaacgtctgaagagttctgccgctgataaatatcttgtgttgaaggaactatggaacttataatatttgtttcctc

SEQ ID NO: 1369 - DNA, 16285 bp, Homo sapiens
gtcaatatttagggaagctttgtcatatttactaaatttcataatttcagaaaactgtttaaaacaaagagcaattgatggataaatcaggaatagattctcttgaccatgtgacatctgatgctgtggaacttgcaaatcgaaggtgagtggattcaatcatgtttattgtatctgaattatgagaaactattgtatataatgagtgacagtaaagataattttcaggaattgggaaagaaggaaaactagatttcactgaccttccaagtttatctagttacatagattgatataatagcattgcaaatactttaaattcaaaatgtgaatatattatgggacacattcgtcgagaaaaaatgtattctttgggtcatattagcatctcttccagactacatcctccggttcggtaggctgtgtttgttttactcagacactcttagcagtgaaccgaaccatacagccttttggagctcatacattgtcttgaaagatacagtttttttgtaagctgagcatagtggtgcatgccattagtcctagctagctacttgggaggctgaggcaggagcatccctggagtttccaggagtttgaggttgcagtgagctgtgattgcaccactgcactccagtctgggtgacagcaagacgatgtctacaaaactctttaataagagctgtagcattatgggctatttaaataggatgatcagtagaaaggctagctggttctgagcccatcctttaaaaaatttttaattctgggcatgttttctgagttggtcttggaagaaatgtacatttaggactgggtattaatggtaataagcagtaagaaaagaagatgaaattaatttttttcccatttttctagtgataactcttctgatagcagcttatttaaaactcagtgtatcccttactcacctaaaggggagaaaagaaaccccattcgaaaatttgttcgtacacctgaaagtgttcacgcaagtgattcatcaagtgactcatcttttgaaccaataccattgactataaaagctatttttgaaagattcaagaacaggaaaaagagatataaaaaaaagaaaaagaggaggtaccagccaacaggaagaccacggggaagaccagaaggaaggagaaatcctatatactcactaatagataagaagaaacaatttagaagcagaggatctggcttcccatttttagaatcagagaatgaaaaaaacgcaccttggagaaaaattttaacgtttgaggtgagtcagcattttacatacatggctacacataactcaagatgcccaaaatgatttgttggccaatttagaattgtctcagatatactgggaacagactgtctgcaattttgatactcttctatactgacttacccctaaagtccaccctatccttcaactgaatcttgacttgtatctcttaatataactacactttgccatatttaaaagatagtgctccaaggctctttgtataaaatcctttgatcttatcccatctcaggtctttaaacacaaccctaaaactcagtggggataataaaagctcacataacttgaaattacttttgcagtaacctaaactaaaaccacacatgccttatgttcagtggatatattcttaaggcctagatgtttctaagccaattatctgaaaaatacgctaatacttaggagtagacttttttaaatatttgagagttgtatgttgaatgaattcagaattaatttatgatcccttgccagaacctgaaattttatttgggaggattaatacatgttaatctcttcagttaatctcttaagtttaaggtgattatagtaaacattagaaatcttattcctgtttttacattttaaaatgcctttagtaagtcccagacatgacaagatatgtacttcacttttccatgttaccagcttaggtaaattcataattgtaatgtgaattttaataatcagcatttgataagtccacaagtggggagtagttaagatagcaaattcagagtctttgctaagggggggcattgccctttttgaacataggcacctgctgggtcttaaaaataaaatctcgacatacttatggtgtttttaatatatagcaagctgttgcaagaggattttttaactatattgaaaaactgaagtatgaacaccacctgaaagaatcattgaagcaaatgaatgttggtgaagatttagaaaatgaagattttgacagtcgtagatacaaatttttggatgatgatggatccatttctcctattgaggagtcaacgtaagtggaatcatatgaaatactttggtaataggttataaattaaatttctatgttaattgcttcatattttgcctttaatatagttatacttaaataatgaacaaagatacagagtatgacaattgggattattacagttgagccaagcttggcacaccgttcatctagaattctccagaacacaaaattctcaaattttgtgtttcctttgactagtattgcagtttcagttatatttcagagtggaatatacaactaattaggtcatcgaagattctgtcatctcgatgataaattttaatattacagagcagaggatgaggatgcaacacatcttgaagataacgaatgtgatatcaaattggcagtaagtgacttatttttttcctattccattttgggaaggcaggagttggttgatacagaaggaattatatttagtttttctcttacacttcatttaacttttgaaaagctctataagtttactgcaggaaatgcaagaaggaaaataattttttagagacttgataaagaacatggggttttcagtactatttttaataagtagcattctgatacatattattgctagttaggatgtcaaatgaaaaaataagcaatgttaatttggatttttaacatctacatgtagtctctaggttatctgaagtaatccagggcattcagctatatgtaattactaaactatttgagttattgcttaatccatgattttttgtttgttttatgcagggggatagtttcatagtaagttctgaattccctgtaagactgagtgtatacttagaagaagaggatattactgaagaagctgctttgtctaaaaagagagctacaaaagccaaaaatactggacagagaggcctgaaaatgtgacaggatcatgaatgtcaaaggtgaagcatatagaaaaaacgacttcatagaaatgaataaagataaatgtggatatatgtaccagtctggtggtgaagaaattctgaaacccagaactttataacaagaaaaaaaatttttaaccctgtgaagaagtttgtgaaagaaacttgtgaagtagtaataattagaaaaaaaaccattaaaacaccagagaaaatacatagaaaaatttgagaaattgtcatttgatttctgaataagagcttacaggtgtcctgtgagtattgaaacaatgaaatgtagtgattttaattttgaaaagaaaatcttaaagtaacttgacacccaaccatcttgaagaggggatttgaaatgctgtaattttatcccagctttgttcagccatgacaagtgacctgtcagatgcttagtattgtaataacctcatttccctttccaaatttagagtatctttaatactattttttttagacagagtctcgatctgtcacccaggctgtagtgcaatggccgcagtcttggcttactgcaacctccatctcccgggttcaagcgattctgcctcagcctccttagtagctgggattacaggcgttagccagcacacccagctagtttttgtttttttagtagagacaggctttcaccatggtctcgaactcctgacctcaggcgatccgcctgccttggcctcccaaaatgctgggattataggtgtgagccatggcacctggcctaatactacttttaactaccattttcactttttattagttcaagaaaaggcatacacatttattcaacatgtatacctggggagaaccagtcattaccccgatgttcattattttgatcaccacgatagagctgactactctgctatgtagtgcattttgggactgcacttatgtatgtttttgtttaacgtggacaaagacttacagataggtgcaaaaaataaatcctcttttgcaacccagaactcattgttcagtatgagttttgatacatataagaagggatattatgatacctgagacagttgattgatgggagtattgatagccataaaggttggttccaggccaggtgcaatgggtcaagcctgcaatccccacaccaaggtgggagtattgcttgaaaccaggagttcaagaccagcctaggcaagaaagtaagaaacacatctccacaaaaatttaaaaattagctgggtactggggcatgtgcctgtagttggagttactcagaaaggggggaggctgaggcagagttggaggctgcactgagctttgatggcaccactgtactccagcctgagtaacaaagacagaccctgtctcttaagaaaaaaaggttgattccaggcctgtagaatagataaacagcatgggatatgagggaaatcctcagcagtattaattttgcattccaatttcatgttgatgatatacacaatggctttttgttttaaaggcttttatcttgagaacatggtgtctggagttaaaggtatgtctcaatttgagttttcacatcatatttgtttatgtgtaggaaacagtatgttgtcagagcaagtttcattttattcagggacatttctaccatgcttttaattcccatttatactgatttctgaaaagaagaatcctagattcacacattttatagtgatgtgtcagattcattttagttgcaagcattagagggtcctgaatttgttagtttgtagcaataatcagaactttggatttcctacttgaagcctacagcattattttgaattaatgcacaatctaaaatgaggcagaggattttatggtttaatgcaaaatatagtataataaaagatgattacacaggtcataagaattcataaatttgaatgatgtagagtttgattaaaagttatataatgccaaagtcgtaacttacaggcacattatattcctgtattttataatggatgacaattaattttgagccaagaattaaaatttgctgaaatcttcgaattgggaaaacaacatcctctgttgcaatactgaagttcataacaacagttagactttaaacttaaatcttaagtttaaatctttttcctttggttcatgtaaaggagctacttgatgttactttttatttatcattcctctggctcctaagcacaacgtgattgtgaaattattgtttttgtgattaacgtagtaggaagtttctgcagttggcaatattgtaagagcatattgcagtttctgctcataatttctttcctatggagtgttagactttgttatttatgtgtataaatactagctggacacagtggtgcctgtggtccccagctactctggaggctaaggcaggagaaacacttgagcccagcggtttgaggctacagtgagatgtgatcctgccacatctcactgtagcctcgaacccctgggctcaagtgattcagcaagaatcacacgatttttaaaagacatggcagatcctgtgtctttaaaaaaaaatcaaaaccttgtaaatagtggttgaggtctatcccgatggggcttttcctgtagcctgcacatcgttggaaacgcctcatagagtaactctgtggttttactttactcacaggactattgttagatctgtgggaaggaattacaagacagttgctaaaagtttgaaaaagacggttgctaaacgttatgaaaaaccagataatctacttttttaccttaggtattggcatactccacacatctgtaccattcttgagtgatcgcttaggtaagttttaattggtgacagtataatcttttgggaaataatgattacagttcagatgatgaatttaactgttcaactgctgaatgataacgggcatgaactaaaacttaattctgacagagctggatatggctgtataataaactggatcttaaatttatacttgggttttagttttaataactggaaatgtatcctttctaaatctttaattggtactttctataggaatgaatgtgatttgaactcattcatgttgagaggtaagtaaaatatttaacttataataatcaaggactcaaaagatgaaaaatagaaattacaccatcccagtatttcaggtataacacagaattagtaagatactggcaaaaatattacaatgtatatatttgtatagagaaggaaaatgaagagactgcatgtctatacctaccaaacgaaactacctgtgttctttgcatcattattcaactggcagttacacatatttcatcctaaagtcacgtaaacctgtgtggatatgttgaatcaatagggatatgaattacataaaaagaattttgtgtaactggcagtttgagcaacaatgagcttgacgtttgttgtctgatctgttaagttacatgtatatattccatctttaagttttatagagagactgggcaaagattaggcaaagactagagttgtagcttaaaatgtagttaatgtagcttccttattacagtgacaattaggaaaaaagctcaaattattgtacttgttaaaggaatttgagaggtttgtgaaagcatttctcagcaatattgcaaatttgggaatacgagttgtacagttcagtcataattgcactgcatggtatctgcactcagcagtttacacctgctagggtgttcaaaggtcagtgctatagaaattcagtatctggcatcgttggttttcttggctttgtgcttgttaaacctggtatttctactgatacagtatttgtgtaggtttctcagagtgttcagtttgatatactctaaaatagtaagcaatgcttttttttccagggtgtcaaattgagaaccaggtagatccccaccacctacagtaaaaaggtaagattctctgtttctattgattctgcttgtttccctctatcagtagcactgccagcataacaagaacttcgtacaaatacactactaagctttaaagacttttacaatgcctcattctagagaatgggcactgttgatcatggtgtccaaaaatagttaatgtggctaaattgagacaggttatgcttccatcacagtatgcatattgcagtggtgacaatgagacctgtaacattttgctatgtttatgagtaaaaatgtaggagaaaaatgttgacttttcaatattagaaataacatttaataaggaattttcagctcttataggaccactttttttatgtgctgtatattgactgaaacattgtaatgtggtatacattactgtgtcttggatcaggtgtcaaaatgtaactgtactttgtacaattcaacttctaggaccctaaagtaaattggttgaagaaattagatcccaaagattcttggtaagttaattcattacttaaaaggccatgcaggttattttgttgaatactagcttttctccaaatgttattttaggttatttatttatctagcaatgctattgcaacatctatcaccacttaggagtaaaaaaaaggactaggcttacgttattatgtgtttaaacttcattattaacgatgttatgatgatgggcgaaatgttcaactgctctgaaggggctgaatgaaaatggcctttctgaacatccatttacattaaatattgcattgtatttcagaagattataaaagctcaaaggtaaaagttaccagaaacatgatcatagagcaaattcggatatgaatgggcatgggatcattgatttttaaaaatacctattagtttaaatagctattttaagcatagaattttcaataccttacttggggtgccgggtttcaggatactttggaacctaagcaacctcattcttgaaagatagatttatgtacttaatagtaaatataaatttgaaatacacatttttccacaggtgaattttgaagtcttcatcagtatatccatattaaaacgagatgacagaagccaaagtaattatggcaagtaatggtttttatcttaactataagttatttgctcaagggtgtaatggtcattaccaaggcttttagaatgcagtttctcatttgctgtggacatgaccataaaaaaatttcccagtaggttttctatctgctactttgctagcaatcagcttattgggaacagttgattaactgtaatagaaatgcaatacaaataaaatgtgaaccacatgtgatttttctttaaaatcagtgagatttgaaaattctcctagatctcttgaatcatgcaaatttgctttgcctttatattgtaacccttgtgggttgctaataaccaagcagtttgtagtagagttaactcaggctcgttctagggactcattcatgttcactcactgtacactcatctctggaaatgtaaaatttacttttatactattgttatgtagggctgacaggacaactggatcagtttcattaaaaaggtatgtatgcattagaaaagacatttgtatgggtcatttcaaagagggcttatgaggctgtgaaacccagagctcttaacgctgtgaccaaagatggaagttctctataggaagccatagcactcctaatgtttggtgctatgttttcctgaggagatataaaacgtaataatccaggattgttgccatgtgagagttttaaaggttaatcaaaatttctcttcttcagggcaaacttgaagataaatcttttgactccagctctttagaggatctaaagtgaccttgatggacagtggaagaaatcacaacatggaattcctcgaataacaatttattgactttaaataattttgtctaatgctacatatacacaattaaaaaacctttacactatttctagaaagtcagcatgtatttttggctcgaagtttctctagtgttttctgtggaaggaataaaaatttgagtttcagttgtgtacttcatgcttgaaaaattaagtccttctccctcagttatactcaccttatgggattcttttgcccttgctctgttttgggcataagcttcttgttttgttttttcttccttttgttgtttcacttcagctagttgattgtataacctgtaaagaatttatatagaattagagacaaacactgcaaaaagtgaatcactaaaaaaaaaaaaaaaattaaccctaccttagacccctttggtgccttagagcctgtgtagtctttctgtcttcaggaaaagatgctctgactttattcacgccctttagacgactcacagatgaacctgaggaaagaaaagtgaaatcaagttgtaaacacaaggctttaaacatttcagggagttggttgaagattttaaaaattcaacatacttatagatggtttctctttaactgttttgatttgagaattttcagagacatgaattttattccttatttctttctgcctctggtgggatctctccataaatgattttttcctctttataaatgcttcttgtaagctccctggtacaggtgtaagcctgcgaggggtttctgctgggggaaaagaaatttatgacagaaataggcaaagtatctactttccattagaagtgtggaggccgtccaaggcttacctgtagatgctgtccttggtttttctatggaaagttctgatacagctggataatctgaggcttctgttgctgatacaagaggcagaaactcactcacctaatggcaagaaagttgcatgttttactctttttaaacgctttaagcgggtcttgctctgctgtcagattagagtgcagcggcatgatcacacctcactgcagcctcaatcttagctgggtctacagagacccgccaccatgcctgatttttgtattttttgtagggattgggttttgccttgttgcccaggctggtcttgaactgggcttaggctccactgccctcacacctctaggcctctgtttagatagctttattcttattgcctccctactcccctagtaaaattaccagttgttctgaagtcatttttcaatatctgggaataagtttaggtaaaacttccaacttggcactataacactaggtgtataagattagttctgccagtcttggagacaggcataaattggagtggggattaaaagaaaatgcacaatggttgacagaatagtgaaggtttaagacaaattgagagctggtgggggtgtcggcttagttaaatgcatagcataattccctccaatgagtaccttctgataagttgtaagagacaaatcaactggtttgcttgtaatagaataaaatagaaggaaagcttaaatttacctgaaagaagcattttgcttcattctcgctcttctcttctagggttaaatttgcaaaatccatttcagcaatactggtatcagtggtgcttattaaagtaagttctggttcttccattataccatggccagtttctgtttcctgtgaaccacaattaaaaggaaaaccatgtcaaaatagccttaaaagacttaaactaatcgttttgtatataatgcacattttttgcaagtgtatataaatgtgaaaatggaggaagaaaagcaatgattggcaaagaccaacagatcagatttccttaggcttccataactccagcattcagttgtagaaatactggagcctactttggggaggggatgaaatagtgtgacaatggactgaaaggtatctaccacaatgattacaaacctaaatgcttgtagtgttgggcaaaaaatataaatgcaggttggctgtgccgaattgtatcctttaaagggagcaggggtcgactgggctgctaccaaatgtgggccactgactgctaacagataatgtttcaaaagtatctaaacacaacaagaacaaaagcagccacataaaacgtggtttagttgtaattcttattttcaatctgttatgtttatttgtggaaggataaactgcacatactgctagatgaaaaccagtcaccagttgactggtgttgaaagcaagcagattataagttgcttaatatgaggagcaggtttccaatacttattccaataatggatgaattcattgcactggaatgaggctcaacactgaaagtgctgaagcacaggcagaaccaccatttttcagggaagttggagaaaggatatctgaattgggagaaaaaggatcttttgtaaaatactctcagaagacagttttcaaatttttaagtttctgcattatgctggatatttctagtgatcacaagctggatagcaatattaacaagcagttttgcttgtattttgtttcaggtttttcctgccaggcattgtggtgtgtccaaactacttcggaagttgaggcaggaggatcccttgatcctaggagtttgagttcagcctgggtagcatagtgggaacttcatctctaattttagaagaaaaaagttttttcccaaaaaggaatttaaatgttatttatacaacactgatttcacttacccagactggtatagagctctgtaatgaaaatgatccagaacttgcaaaaagctctgattctcctagttgagatagttttttggtgatttttggaatgtctgtttcagctgaattctcaaaatatttttcattttgagtagttaaggaatatggtgcctgaattgaagttcccatctccactgttcttacacataatcgagagtcagtttcctctacctgtggatttatgtctaaaaccctacaggtttcatttttattatcttcaatgagtccttgactttgtaacattgtaacaacccctctttttgatagttcttcaaagcccatactttcctttctgctttctagttggtgttttgttgagcactcactagagttagaaccacatggagtgctatgctgtacatttaactgatcaaatacattagcttcatcagatgaactgtagactgaacttaagtttcctatagaaagctggaaatgaacaatttttttcttgttttgtaatatttcagtatgttcttcagagggatagttctgatttttcatgccttgggaagaatctcttgcttcaatgctaaaaatacttggtagatcagcatgctggctctcctcctgtgaagaatattctggctgaagctgttcaaaacattgttcagatcctgcattaagaaattcaaaaatcagttaatcatcgttacatgttgtaaaagttggatactgacagtctctaatagtttatcatccaattgcaagtaacctacaattttaggcataaaagttgatgtgtataaacatgaatacaaagataaggatggtcacagtgatttctcaaactacagctcacaccaagtattttttctttttctattaatatttaataaggacaatatggctataaactgaggatgttttcctctataagaactgaatatgactttaataacagaaaagagaataaagcatccatgtgtatctcaattatccatgtgtgtatatataatttgtacatccttgtgtatctcatgtatgtttgtgtgtatatataatcatttgtaccaaaggctcaagaatacttgttttctatgttgcccaggctggtcttgaactcctgggctccagggatcctcctgccgcagcttcccaaagtgctaggattacaggcgtgagccactatacttggcctaagaagaatacttaaactggctgggcatggtggctcacacctgtaatcccagcactttgggaggccaagacgagtggatcatctgaggtcgggagttctagaccagcctgaccaacatagtgaaaccctgtctatactaaaaatagaaaattagctgggtgtggtggcacatgcctgtaatcccagctacttgggaggctgagtgaggcaggagaatcacttgaacccagcaggcggaggttgcagtgagccaagattgcaccactgcactccagcctgggcaacaagagtgaaactcagtcttcaaaaacaaaataaaaacaaaaacaaaaacaaaaaaaacaaacaaaaaaataatacttaaactgttaactatcacataatgattgaggtagggaaattgaggaacaagaggcaacacttttccttttatttcataatgttcagtattgtttaaaaaaatgcatgtattacttctgtaatttaaatattttttaacacccaggataggggtgagagcaggggtgaagacaaaccaagaggtgctaggcttaatttctaaggaaatggatgtaaaaaatcatggaaaaattaactttttctaacttagtcatacatacccccaataatattttctgtagcaaaactgtgagctccaacatgagccaagttagtgtcaggttgttgattcggacttgtgttaagagaagaatgcatgctggtcctcctcagtgctgtgaaataaactgtacttttggataatccagtagcacagtggctttcagatgaagaatctgatctctggcaggaaacaaaagggaaaggctgaaatactgattaggtattaacaattgaaacaataatcattgtgttcctttggtattactcttccttaattatcacttcactatgacagcaatgatttgctttttcaaatccagttcttttcaatcaatatgaaagagactttaaaatgtcaggccatcaggaagtggaagcaaaaagactcaggtttaaatctcagctcctttgactgtgtaggaggatactttaaattttgcaaaattgtatttactttactgtttaaatatgttccacaactaaaagttgttattaagccttttatggcatcatactccctaggtggagacaggtggatgggacaaacaaaattctaatgtagctgttttcctttttttttttttgagatggggtctcactatgttgtccaggctggagtgcagtggcacgatctcggctcactgcaacctctgcctcccaggttcaagcggttctcagcctcccgagtagctgggactacaggcatgccatcacacccaactaatttttgtgttttttagtagagatgggatttcaccatgttggccaggctgatctcaaactcctggcctcaagcaatccacctgcctcagactcccaaagtgctgggattacaggcatgagccaccgcacccggcccaatgcagctgttttcaaagttggttccacattagaatcacttggggagcttaaaaaataataataataattagtactatctgagcactcccagaaactctgctttaattggtctagggtgtagtctggacaataggatttatttttattttttatttaagttttccatgtgattctttttgtttgtttgtttgtttctttttttaaagacagggtctggctctgtcacccagactggagtgtagtggcacgatctcagctcactgcagcctccacctcctgggctcaagtggtcctcccacctcagcctcccgagtagctgggactacaggtgcgcaccacgacacctggctaatttttgtattttcagtagagacagggttttgccatgttggccaggctggtctcgaactcttggcctcaagtaatctgcccgccttgggctctcaaagtgctgggattacaggtgtgagccactgtgcccagacttccatgtgattctaggtaagggtttagaagaacttttgttccagtagaagaaatggcttaaaactatttttagatattcactgcaatgggacatctactttaatatacctggtaaaagtctctgttgtctggagaaatcccagaggatgatgatgataagtcaaaatctggatgtggttctaagggtttaaacagctgatgatgcaaattaggaaaaatgtgttccaattctggaaagtcaaggtcaactgttagaatttttgagggaaaaaaatcataaatttatttttaaggtaaacactagaaaaggagtattaagaacatattcataaacgcttattttcaggtaactccagtgtaacaaaaacttcagtttttcccccatgatcagcagatgctttaaagttaagtcctatcatgattatttcaaaggtccaaaatatggatcctctcagtgaccaaaactttttaagttttatttttagagaaatttaatttttttaaatttaaaaaatttttttttaaaatagagatggggtctcagtgttgcccaggctggtcttgaaatcctgggctcaagcaatcctcctgcctcagcctcccaaagtgctacgattacaggtatgaacaaacttttgacaaatacgaatttccatttccacagccttatgaggctaatgaggatcaacaggacatatgtaaccactgcttcagtataagcttaaaaaaggaaaaaggctcactgtattcagtgttactatgggccagacattgtgctttatgtgcactatctcatttaatctataatattcctcttttataaaagattaaaaagtaacttgcccatggttttacagctaggaaatggtcaggctatgactcaaatccagaactgtatgatttctgagctcctgctcttatttatcagtaataccgcctcagccgtaatagctaactctgcaatggcaaaggaagatttgctaattaatctcctataaatgtgcctcagtgagtctaattggttccagatcccctttctcactaaatgccctcaatatattctgtggtaaaacggtgttgtagcaggccataagaacatgaagctcaaacaatcactgcataaaatttaaaatgatgaaaggtgaaaatttaaaacttaatttacataaaagtattgctttaaaataattttaccttgcaaatctgttttttcaggtatcaaatttgcttcattaatgtacttgtctatcatttgctgaaagtgtgtgtgaccacatgtagtttcatccactgcaggcaacagagatttatgaacgtctgaagagttctgccgctgataaatatcttgtgttgaaggaactatggaacttataatatttgtttcctc

SEQ ID NO: 1370 - DNA, 357 bp, Homo sapiens
ttctgagctcaggtcaagtgtagaaaccatcatagttacaaagatcagtagtaaaaccttttcatcattgcccagaaatgattaggctttcatagacatacatacgcacccccccaccctcaatctcattcattcctacagctgttatctttataaacacatgtgcgtacacacacacacacacacacacacacacacacacaccagacatatgcccttattgttttacattgttttatagttttgcttctcagaactgtagagatcatgcatcaggtagactggaaagacttctgatgctcagatttggctagtttcatcattgatccacttcactaaaagcagatctcagaaagc

SEQ ID NO: 1371 - DNA, 357 bp, Homo sapiens; identical to SEQ ID NO: 1370

SEQ ID NO: 1372 - DNA, 357 bp, Homo sapiens; identical to SEQ ID NO: 1370

SEQ ID NO: 1373 - DNA, 1636 bp, Homo sapiens
agtggtgtcctaattagttactgagttaaaacaagttcatgaatttaggccttttgggaaagaaagagaatgtaagatttaacctgtaaatgttaagaatagaaccaaagagagggccacagaccattagttgttaagaggtatcaatcttaacagcatattttctcttgtgcaatgaaaagaacaatcgtagctcttttgggcatcttaggtcttttattctttctggatggcttacatcgaatccttgtgatttatttaaagacacatttttcctggagaggagaaagatcttctctaaaatagccttaacactgagaacatattaggcctaattttaaaagtccaattcagataactcctcagaagtaaatgcagcacactaaaattcattatcacaaaacttaatatttgttaatatgtttcctctgtgctaaaaggctgctgctaaccatggtagttagggaggaagagaaagtaaaagacattagtgttcaaaaacttacatctttgggggtaaacaagacatatagtacatttaactcctagggaacttagaatatttatggtaggatagaaagagatgattgtggacacacacaagtaccccaaaaggccattatggtctagaataggtttcatagagaggattactaccacctgtgattatatggtatatgaaacatgagattttgtaacctggacattgcttttagctctgttggaaatggtcagtagagcaatttctgaatattttgatggtacggtgttgatggcatcagtccttttctgtggctttcagcccaacttaatacaagaggagttaaaaatagcacccaaaaggggtagctagagcaccctcaccatgcactaaagataaatctaaaaggtgttcaagtacattgaatcaagatgagtaatccaacttctatgttatgtaggatggatggagcacacaaattcttgcaaacattgtagaggtttttttaaacttcatccactaaggatttttttataataattacttttgaaaataaaatctcaactattttccaagttatgagtgtgctgctcttaaccctgtgagatgaaatcttcccatttggattacatatttgtagttctatatcgacatcagcagatggcaatagtatacaaatagtatacagcatgagccttccattgcttttatttctttgtttataagtatactataatccttcatctgaaacccttagggttttagaattcagaattttccccttttcagagagaatatatataatgtagattacataacaccctcaatggggcctggggcaacaccccataatcaaacattagtacattcatagtaactgggattaactatgtaaggcagtaagctacctgccttacatagtttaggtcaatttttgtcacaaacttatggaaaaactaggtttttagaaattttttggatctcagaattcgtgattagggattgctgacctctgtaaggaaactggtgtcaggtctagaattttccttctaatgaaatacgtagtcattttccccctttttaaattgcttagctttggtagaggtaactgaaggctttctttagaattcgtgtgttagattttaagaaaaatgc

SEQ ID NO: 1374 - DNA, 1635 bp, Homo sapiens
agtggtgtcctaattagttactgagttaaaacaagttcatgaatttaggccttttgggaaagaaagagaatgtaagatttaacctgtaaatgttaagaatagaaccaaagagagggccacagaccattagttgttaagaggtatcaatcttaacagcatattttctcttgtgcaatgaaaagaacaatcgtagctcttttgggcatcttaggtcttttattctttctggatggcttacatcgaatccttgtgatttatttaaagacacatttttcctggagaggagaaagatcttctctaaaatagccttaacactgagaacatattaggcctaattttaaaagtccaattcagataactcctcagaagtaaatgcagcacactaaaattcattatcacaaaacttaatatttgttaatatgtttcctctgtgctaaaaggctgctgctaaccatggtagttagggaggaagagaaagtaaaagacattagtgttcaaaacttacatctttgggggtaaacaagacatatagtacatttaactcctagggaacttagaatatttatggtaggatagaaagagatgattgtggacacacacaagtaccccaaaaggccattatggtctagaataggtttcatagagaggattactaccacctgtgattatatggtatatgaaacatgagattttgtaacctggacattgcttttagctctgttggaaatggtcagtagagcaatttctgaatattttgatggtacggtgttgatggcatcagtccttttctgtggctttcagcccaacttaatacaagaggagttaaaaatagcacccaaaaggggtagctagagcaccctcaccatgcactaaagataaatctaaaaggtgttcaagtacattgaatcaagatgagtaatccaacttctatgttatgtaggatggatggagcacacaaattcttgcaaacattgtagaggtttttttaaacttcatccactaaggatttttttataataattacttttgaaaataaaatctcaactattttccaagttatgagtgtgctgctcttaaccctgtgagatgaaatcttcccatttggattacatatttgtagttctatatcgacatcagcagatggcaatagtatacaaatagtatacagcatgagccttccattgcttttatttctttgtttataagtatactataatccttcatctgaaacccttagggttttagaattcagaattttccccttttcagagagaatatatataatgtagattacataacaccctcaatggggcctggggcaacaccccataatcaaacattagtacattcatagtaactgggattaactatgtaaggcagtaagctacctgccttacatagtttaggtcaatttttgtcacaaacttatggaaaaactaggtttttagaaattttttggatctcagaattcgtgattagggattgctgacctctgtaaggaaactggtgtcaggtctagaattttccttctaatgaaatacgtagtcattttccccctttttaaattgcttagctttggtagaggtaactgaaggctttctttagaattcgtgtgttagattttaagaaaaatgc

SEQ ID NO: 1375 - DNA, 444 bp, Homo sapiens
acacttgtattttgaagtaaaataccctgatcaagtaatttaccaagaagctactttttgtgacacagctccgtctcctgaccgcggttccagacttcaccattacaccagtctattcccattctggaaagggagaggtatcagctcttagggggcagagattagcaaattgaaaaatagcagtgaaccagatggaaggctctcgatctttagaggttattaatcagtgtttgttcgttcaatttttaaccagtcagtcaccttgctgttaagagcagaacataattggctggaatgtaatgtagggaatttttccctgttggatccctagcacctagaaaagttcctagcacctattaggtgttaataaatgattgttgaatgaatcagtgattacaagtacttttaagaattttgaaaataaaggaaccattggaaatacga

SEQ ID NO: 1376 - DNA, 7359 bp, Homo sapiens
agtatttgtgtggaagtaatcgaaaagacaacatatttattgatcctggataccaaacatttgagcaagaattgaataaaatactgcgaagctggcaaccaagcatacttccagatggtaatgctattttcactaaaggtgttgctctcttgatattaggattgttatttttacagagtatgtttgaaaatattataattaagtcacttaaattagataacattttctgaacacttactcgagctcatctgcctttcatctcttgttgaattagaaacaaatgtggtcaataactagtgtttatgaagaactttgtaagaaatgtaatctactttctctggagtacgagactggatgttcatgtcttaagccttccagtggagcttctgatgtaaatttctcttaaaccactgttttcagtccgtgaagaaaatgtgtatgtatgtggagtcatcaatttttttcaggaatttaaattcctgaattttaattttaaaaggatttacactgttttctgaccactgtttgcttgtcctactgaagaacagaagcaaacatccagtcccttattccatagataatagttccatagtagcctctgtattgttaaagagctgcataggtaattctagaattattctagttgatctaatatgaaaggagaattggtatagatttgtccttaaattaactgtgtctgcttctagatggttaaatgaaaacttttatttattataattcttttaaaatagttctctctatttaagggtcaatattctctcgagttgaagaagactatctctggaggataaaacaactaggatcacactctccagtagctcttctgaatacactgttctactttaacactaagtattttggcctgaaaacagtggaacaacacttaagactttcctttggcactgtgtttaggcattggaaaaaaaatcctttaacgatggaaaacaaagcgtgtcttcgataccaagtgtcttccttgtgtggaacagataatgaaggtagtgtaacagatttctatttttatttttatttttaaattttttttgagacagagtttcactcttgttgcccaggctggagtgcagtggtgcagtctcggctcaccgcaacctctacctcctgggttcaagcaattctcctccctcagcctcctgagtggctgggattacaggcaggcgccaccatgcctggctaactttgtatttttagtagagacagggtttctccatgttggtgaggctggtctcgaactcccgacctcaggtgatctgcccacctcagcctcccaaagtgctgggattacaggcgtgagccaccacgcatggcccagatttctattttgggattgtctatggtagggatatccaaaccttgccttactaaagaccacctgggtcacttgttaagaacctaaggactgtcagttttataaaataagacaacctatgtcttaagatgtctcagttccttttgtttgaaaaattgtacattaccagaagccataacttaaaactccaaggggcacctggtcctattctttggtataacagacactaggagtgatgtttatatctttcttcaagattagtttaggaggtttatttcacttttattttttaagataaaattactactggaaaaagaaaacatgaagatgatgagccagtatttgaacaaattgaaaacacagccaatccttccagatgtcctgtgaaaatgtttgaatgctacttgtctaaaaggtgagtgttaatgatacttaacttttaaaaatgttggtagaagttggctggtttaaatttaacattaccaagaagtgacttttttagatggattctttctcagatttcttctctctcagttatacccaagttcattcagttataatcttttattttgaaatacccagtttatacatcatacttagagtttaagcatgtgttaagaaatctctctctactaatgaaatttctactgctgtcattttcttttggagatggggtcttgctctctcaccgaggctggagtacagtggcacgtgatcatagctcattgcaacctcaaactcctgggcttaagccatcctcccaccctctgcctcctgagttgctgggactgcaggcatgtgcctccatagctggctaatttttgtattttttgtagagacaggatctcactgtgttgcccaggctggtcttgaactcctgacctcaagccatcctcgtgcctcagcctcccaaagtgctggaattacaggcatgagccattgcgcctgtcattgtcttttaaattacagcaattccaatgacagcaaagcaagggacacaaactttttcttaaacggtcagatggtaaatattttaggcttttgggcctatagaatcactattgtaactaatcggttctcttgtgactagaaagcagccatatactatatataaattcatggcatgtggctgtgttataataaaacttcacataagcaggtggctggctgtagtttgccaatgcccggtgtaaaggtatgctcaaaggtagtatagataggtggaaatgtaagtgaagtatttacatttaagagaaaacagtcaagcaggtatgaaaaatggaatcatgttctggaattttttttcccctcaatctcagaccaacaggcattttaaaaagtttaagccaataaaacgtttagagaccatagattattttatgcttgcctgttgttttaagtaagcactctctaattttcagaaggtcagcatgaattcaaaatgtacttccctgtttaaacaaatttataaatcacaggtccccaggatggccctcaaggacttgtaaaaacaatagtatcatgtataggatgatattagtacaagttgaatgcgccttatccaaaatgcttctgaccagaagtgttttagatttcagattttttcggattttggaatatttgcatatacattataagatgtcttagggctgggacccaactctaaacatgaaattcatttatatttcatatacaccttatacatgtagcctgaagataattttatttatgcatagcctgaaggtgattttattttccccttggggttgctgaataacctgtgtgttatgtgcctgtgttttgggcgcgaactcctcacatgaggtcaggtgtggaactttccacttttggtgtcattttggcaaagagtttcagattttggatttttgaattagggatgctcagcctgtatttctcaccatggtttagggtggtcctatttggctgcagtagtgtcagggtcttcagttggtagtaactatttgttagtaggaaattcctatctcactattaccttgttggtattttaaaaattgagtttctattatgtagtgctgtaagaattttttaattttatgtgctgccatacatatttcatcaattctaagacattttcacatttcactatttctgaaactgggatgcacagtttaaattgtcgcatcttgaaatcataattggcagtgtttcacttgcttaatggtagcattaaaataatgagtggtgtgtctattgatagtgtcttggatttagtgaagtagaattaaaattgtgggaaataatctctatctcagaaaataactttgagaatattttaatgacagaataatggagacagtggggcatagggggtctggtcatataacgtgattaatggggtctgaattattcttgaaaaaagaaaaagttgtggaaattttgtgaaattgactttttctctttttcctcccgcctccaaagtccacagaatcttaatcagaggatggatgttttttatttgcaaccagaatgctctagttctacagatagccctgtctggtatacgtctacttcactggaccgaaacaccttggaaaatatgcttgtacgggttcttctagtaaaagatatttatgataaagacaattatgaactggatgaagacacagactaaaaaggaacgttgcagaagcaatcgggataaaacagcattagatagtcatgctgctagatctttattatggaaaacatttcaagtttactccttctgttttgagttttgtagcagtgtacccacgctgggtattaccatgtaaataatctgtgagtgaaagttgccattattctatgtagtggttttaggatacttaacaaatacattcaaattctttttttattattatttatttgattaggtatgtttgtaactttttacattacagaatatgaatgagaatgtgccatgtataatttttttcttgtagtaagaaacatccatattgcacaactctactgttgcaaagcttccttggaagggggctcttttactgggttcttaaccagatggttgtgtatgggtagcactactaaaagtttagaacttgcagtgtctttcggaatttttaaaataaactgtaaactaataggctggggtttttgttttgttttggggttttgttttgtttggttttacattttagttactgaagccttacaaggttatgtagagagataccatcttctgtaccaaaaatagacaagagaatgctgtcaatattggtgtactgtaatgtgaatctatgctggtgaaaacaattttttgttccccttattaaaaccttagtgtccttttctcatttgtggctttctgcatcacccaatcaataaaaaacaaatatatatatgtatatatatgtatgtatgtgtgtgtgtatatatatatatatatatatatatataaatgattgtaagttgaaaacaagatcatcaagacatttcctttgtaaaaatgtctggtgaaagtataaaattctgttttcttctatgccagccataagtatctgaaatcctcttcatttatagaggtttgatttttatttctttttttccctcttaaggatacagatcatgctgcagtgttagctgtgtagtactctaaaacttagcaattttatcagaattcttgtgcctgtttacattggataaaattgtttttagaaattccactcctgaaatagttacagaaagtcaagctatgttaaataagataggatcacattttataatgaagattaccagtgtagtaattctgatattgcaaatgattgaggaacaaacaaagaaactaatagagaaagtcagtctcagaggaaatcccatttaatgttagattgtttggcttttgaaattacttcttatagaagattgcattaaaaaaaaaaacaactttgtgcttctgcatagcaatttatccattcagaccttttcttttagaataaggaaacttaaaatctactttctaaagactgaacaaagtgctagctgcaaattatcttgaaatcatttggctcttttctagcatgtgtgtaatcatgttttcttctgattcctgaatgaccatggtagcattagtgtttagaaattgttcaggggaaaattgagctattttccatagtggctagcaattgctacacatccttagatactcctctctcccataggataaatgttacagcacacaaaagaaattttctcaattctgatttggaaaatttcacaggtgtcattattgtatatctaagcaataattatctgaatgttttggcataaaaaattataatgttctaacttgttttataagttgaatgacttttcagtcccttgattttatattgttgagtgataatcagactgatagtagcaaatctgatcatacattactaaaatagattgctgattgtctatttaacgaagacaagtgggtaacatttaaaatatataatacaaaaattttctctaacttacctttttccagaactacttctttaagcacttttcctattaatgcctattgttgattaaaaggtggttaattctaaccatcttttagtcttcaaagtggtgctatattccatcaagagcaataaagtttttcccaggtgtcacttattgtatatgttaccaaataccatgaatttctgccatagtactactatcaagcaccttgtcttgctatttacagtttcttcatttgtatatttttagcttttctaagtggaaatgtctacataattttgatcttgacatgattgaggatttagagctcttgtctttgtcttgattgcaatccaacgatagattaacttgattctcagggggaaaagaaaaacttattttatgagaattgtttgttctgtgaaactcacttcacctagaacacatttcattgattcttggatcttagtttatgtggtcatagttgactgctgagaaaaggacaatgaaatgatagcaatttccttttgcttctaggtgatctctgattatagatagcatcctgtaaatataactttattgtcttgaaatgtttattgaagatgctatatttttctgttctgttttctgaagattttgccatttaaaatgatccagtgaaaaatatttatccacattgaagaaagtggatttcccatgcaaattgaatcttcattaacacattttaaaaggctttactgtattaggtaacatagatattaaaggatttttctaggcaagaagctcaactttttttttccataaaaataatttttgcttaaatagtaactcatggttttcttttattaaatggggttgttgtcagtatgttaaacattgaagtaggaggaggatgcatattgtactatgcattcaaatttatcactgttttttctgacagactttccctttgtcctttctagttatgacttgggaatggggtaacttctttatgcatagtattaagggttatagtatgaagaaatcataaaattgcaagttttggtttgcattactctaatgtgggttcatttaatctgagatcttaaatatcttgcagccttaaatcactacaaacatttgcatttttattatgccagttatttccaaaatgtattgttatacatgtcacttatgtttttaagctaatattgactgtaggataatctccttgttcccctcaaaatagtcatgaaagtgtacatgaaaatatttttaaagaataaatttctttaaattacatacttttggatttcccccttaataagccccttactcatgtttagagaagattttgaatttcatttattccattctactgtgttctgaggattatatcaatttagaagttgatgtccagaacaggttatctgtatcagttctgagaatagaaacaacctacagtgctgtcccaatttgtacttttttttctttactcggaagttagatgtcagagggacacctcaaataagtgactgtgatcccctgccttgtaatga

SEQ ID NO: 1377 - DNA, 7359 bp, Homo sapiens
agtatttgtgtggaagtaatcgaaaagacaacatatttattgatcctggataccaaacatttgagcaagaattgaataaaatactgcgaagctggcaaccaagcatacttccagatggtaatgctattttcactaaaggtgttgctctcttgatattaggattgttatttttacagagtatgtttgaaaatattataattaagtcacttaaattagataacattttctgaacacttactcgagctcatctgcctttcatctcttgttgaattagaaacaaatgtggtcaataactagtgtttatgaagaactttgtaagaaatgtaatctactttctctggagtacgagactggatgttcatgtcttaagccttccagtggagcttctgatgtaaatttctcttaaaccactgttttcagtccgtgaagaaaatgtgtatgtatgtggagtcatcaatttttttcaggaatttaaattcctgaattttaattttaaaaggatttacactgttttctgaccactgtttgcttgtcctactgaagaacagaagcaaacatccagtcccttattccatagataatagttccatagtagcctctgtattgttaaagagctgcataggtaattctagaattattctagttgatctaatatgaaaggagaattggtatagatttgtccttaaattaactgtgtctgcttctagatggttaaatgaaaacttttatttattataattcttttaaaatagttctctctatttaagggtcaatattctctcgagttgaagaagactatctctggaggataaaacaactaggatcacactctccagtagctcttctgaatacactgttctactttaacactaagtattttggcctgaaaacagtggaacaacacttaagactttcctttggcactgtgtttaggcattggaaaaaaaatcctttaacgatggaaaacaaagcgtgtcttcgataccaagtgtcttccttgtgtggaacagataatgaaggtagtgtaacagatttctatttttatttttatttttaaattttttttgagacagagtttcactcttgttgcccaggctggagtgcagtggtgcagtctcggctcaccgcaacctctacctcctgggttcaagcaattctcctccctcagcctcctgagtggctgggattacaggcaggcgccaccatgcctggctaactttgtatttttagtagagacagggtttctccatgttggtgaggctggtctcgaactcccgacctcaggtgatctgcccacctcagcctcccaaagtgctgggattacaggcgtgagccaccacgcatggcccagatttctattttgggattgtctatggtagggatatccaaaccttgccttactaaagaccacctgggtcacttgttaagaacctaaggactgtcagttttataaaataagacaacctatgtcttaagatgtctcagttccttttgtttgaaaaattgtacattaccagaagccataacttaaaactccaaggggcacctggtcctattctttggtataacagacactaggagtgatgtttatatctttcttcaagattagtttaggaggtttatttcacttttattttttaagataaaattactactggaaaaagaaaacatgaagatgatgagccagtatttgaacaaattgaaaacacagccaatccttccagatgtcctgtgaaaatgtttgaatgctacttgtctaaaaggtgagtgttaatgatacttaacttttaaaaatgttggtagaagttggctggtttaaatttaacattaccaagaagtgacttttttagatggattctttctcagatttcttctctctcagttatacccaagttcattcagttataatcttttattttgaaatacccagtttatacatcatacttagagtttaagcatgtgttaagaaatctctctctactaatgaaatttctactgctgtcattttcttttggagatggggtcttgctctctcaccgaggctggagtacagtggcacgtgatcatagctcattgcaacctcaaactcctgggcttaagccatcctcccaccctctgcctcctgagttgctgggactgcaggcatgtgcctccatagctggctaatttttgtattttttgtagagacaggatctcactgtgttgcccaggctggtcttgaactcctgacctcaagccatcctcgtgcctcagcctcccaaagtgctggaattacaggcatgagccattgcgcctgtcattgtcttttaaattacagcaattccaatgacagcaaagcaagggacacaaactttttcttaaacggtcagatggtaaatattttaggcttttgggcctatggaatcactattgtaactaatcggttctcttgtgactagaaagcagccatatactatatataaattcatggcatgtggctgtgttataataaaacttcacataagcaggtggctggctgtagtttgccaatgcccggtgtaaaggtatgctcaaaggtagtatagataggtggaaatgtaagtgaagtatttacatttaagagaaaacagtcaagcaggtatgaaaaatggaatcatgttctggaattttttttcccctcaatctcagaccaacaggcattttaaaaagtttaagccaataaaacgtttagagaccatagattattttatgcttgcctgttgttttaagtaagcactctctaattttcagaaggtcagcatgaattcaaaatgtacttccctgtttaaacaaatttataaatcacaggtccccaggatggccctcaaggacttgtaaaaacaatagtatcatgtataggatgatattagtacaagttgaatgcgccttatccaaaatgcttctgaccagaagtgttttagatttcagattttttcggattttggaatatttgcatatacattataagatgtcttagggctgggacccaactctaaacatgaaattcatttatatttcatatacaccttatacatgtagcctgaagataattttatttatgcatagcctgaaggtgattttattttccccttggggttgctgaataacctgtgtgttatgtgcctgtgttttgggcgcgaactcctcacatgaggtcaggtgtggaactttccacttttggtgtcattttggcaaagagtttcagattttggatttttgaattagggatgctcagcctgtatttctcaccatggtttagggtggtcctatttggctgcagtagtgtcagggtcttcagttggtagtaactatttgttagtaggaaattcctatctcactattaccttgttggtattttaaaaattgagtttctattatgtagtgctgtaagaattttttaattttatgtgctgccatacatatttcatcaattctaagacattttcacatttcactatttctgaaactgggatgcacagtttaaattgttgcatcttgaaatcataattggcagtgtttcacttgcttaatggtagcattaaaataatgagtggtgtgtctattgatagtgtcttggatttagtgaagtagaattaaaattgtgggaaataatctctatctcagaaaataactttgagaatattttaatgacagaataatggagacagtggggcatagggggtctggtcatataacgtgattaatggggtctgaattattcttgaaaaaagaaaaagttgtggaaattttgtgaaattgactttttctctttttcctcccgcctccaaagtccacagaatcttaatcagaggatggatgttttttatttgcaaccagaatgctctagttctacagatagccctgtctggtatacgtctacttcactggaccgaaacaccttggaaaatatgcttgtacgggttcttctagtaaaagatatttatgataaagacaattatgaactggatgaagacacagactaaaaaggaacgttgcagaagcaatcgggataaaacagcattagatagtcatgctgctagatctttattatggaaaacatttcaagtttactccttctgttttgagttttgtagcagtgtacccacgctgggtattaccatgtaaataatctgtgagtgaaagttgccattattctatgtagtggttttaggatacttaacaaatacattcaaattctttttttattattatttatttgattaggtatgtttgtaactttttacattacagaatatgaatgagaatgtgccatgtataatttttttcttgtagtaagaaacatccatattgcacaactctactgttgcaaagcttccttggaagggggctcttttactgggttcttaaccagatggttgtgtatgggtagcactactaaaagtttagaacttgcagtgtctttcggaatttttaaaataaactgtaaactaataggctggggtttttgttttgttttggggttttgttttgtttggttttacattttagttactgaagccttacaaggttatgtagagagataccatcttctgtaccaaaaatagacaagagaatgctgtcaatattggtgtactgtaatgtgaatctatgctggtgaaaacaattttttgttccccttattaaaaccttagtgtccttttctcatttgtggctttctgcatcacccaatcaataaaaaacaaatatatatatgtatatatatgtatgtatgtgtgtgtgtatatatatatatatatatatatatataaatgattgtaagttgaaaacaagatcatcaagacatttcctttgtaaaaatgtctggtgaaagtataaaattctgttttcttctatgccagccataagtatctgaaatcctcttcatttatagaggtttgatttttatttctttttttccctcttaaggatacagatcatgctgcaatgttagctgtgtagtactctaaaacttagcaattttatcagaattcttgtgcctgtttacattggataaaattgtttttagaaattccactcctgaaatagttacagaaagtcaagctatgttaaataagataggatcacattttataatgaagattaccagtgtagtaattctgatattgcaaatgattgaggaacaaacaaagaaactaatagagaaagtcagtctcagaggaaatcccatttaatgttagattgtttggcttttgaaattacttcttatagaagattgcattaaaaaaaaaaacaactttgtgcttctgcatagcaatttatccattcagaccttttcttttagaataaggaaacttaaaatctactttctaaagactgaacaaagtgctagctgcaaattatcttgaaatcatttggctcttttctagcatgtgtgtaatcatgttttcttctgattcctgaatgaccatggtagcattagtgtttagaaattgttcaggggaaaattgagctattttccatagtggctagcaattgctacacatccttagatactcctctctcccataggataaatgttacagcacacaaaagaaattttctcaattctgatttggaaaatttcacaggtgtcattattgtatatctaagcaataattatctgaatgttttggcataaaaaattataatgttctaacttgttttataagttgaatgacttttcagtcccttgattttatattgttgagtgataatcagactgatagtagcaaatctgatcatacattactaaaatagattgctgattgtctatttaacgaagacaagtgggtaacatttaaaatatataatacaaaaattttctctaacttacctttttccagaactacttctttaagcacttttcctattaatgcctattgttgattaaaaggtggttaattctaaccatcttttagtcttcaaagtggtgctatattccatcaagagcaataaagtttttcccaggtgtcacttattgtatatgttaccaaataccatgaatttctgccatagtactactatcaagcaccttgtcttgctatttacagtttcttcatttgtatatttttagcttttctaagtggaaatgtctacataattttgatcttgacatgattgaggatttagagctcttgtctttgtcttgattgcaatccaacgatagattaacttgattctcagggggaaaagaaaaacttattttatgagaattgtttgttctgtgaaactcacttcacctagaacacatttcattgattcttggatcttagtttatgtggtcatagttgactgctgagaaaaggacaatgaaatgatagcaatttccttttgcttctaggtgatctctgattatagatagcatcctgtaaatataactttattgtcttgaaatgtttattgaagatgctatatttttctgttctgttttctgaagattttgccatttaaaatgatccagtgaaaaatatttatccacattgaagaaagtggatttcccatgcaaattgaatcttcattaacacattttaaaaggctttactgtattaggtaacatagatattaaaggatttttctaggcaagaagctcaactttttttttccataaaaataatttttgcttaaatagtaactcatggttttcttttattaaatggggttgttgtcagtatgttaaacattgaagtaggaggaggatgcatattgtactatgcattcaaatttatcactgttttttctgacagactttccctttgtcctttctagttatgacttgggaatggggtaacttctttatgcatagtattaagggttatagtatgaagaaatcataaaattgcaagttttggtttgcattactctaatgtgggttcatttaatctgagatcttaaatatcttgcagccttaaatcactacaaacatttgcatttttattatgccagttatttccaaaatgtattgttatacatgtcacttatgtttttaagctaatattgactgtaggataatctccttgttcccctcaaaatagtcatgaaagtgtacatgaaaatatttttaaagaataaatttctttaaattacatacttttggatttcccccttaataagccccttactcatgtttagagaagattttgaatttcatttattccattctactgtgttctgaggattatatcaatttagaagttgatgtccagaacaggttatctgtatcagttctgagaatagaaacaacctacagtgctgtcccaatttgtacttttttttctttactcggaagttagatgtcagagggacacctcaaataagtgactgtgatcccctgccttgtaatga

SEQ ID NO: 1378 - DNA, 440 bp, Homo sapiens
acacttgtattttgaagtaaaataccctgatcaagtaatttaccaagaagctactttttgtgacacagctccgtctcctgaccgcggttccagacttcaccattacaccagtctattcccattctggaaagggagaggtatcagctcttagggggcagagattagcaaattgaaaaatagcagtgaaccagatggaaggctctcgatctttagaggttattaatcagtgtttgttcgttcaatttttaaccagtcaccttgctgttaagagcagaacataattggctggaatgtaatgtagggaatttttccctgttggatccctagcacctagaaaagttcctagcacctattaggtgttaataaatgattgttgaatgaatcagtgattacaagtacttttaagaattttgaaaataaaggaaccattggaaatacga

SEQ ID NO: 1379 - DNA, 664 bp, Homo sapiens
cagagaaggagggtgatgtgagacttctgtccgggagctgactcggaatttgccatctaatatgttggaaaaggttctctgggcagaggtatccaaagtcactttgcctgtcaccctttgaggtcccagttgttgcctatatcatgtgaccagtgtgtggcttctcttgaattaagagctgcatgtctggactgcctgggattttacagatgtcatctcgttaactctccctggagcttgtgacacccaggagatggcagtttatagaagccctggcaccttcttgaatgatgcttggtttggtttctatgcactgggaattcctcacaaggaaagatttgtcacatcttaaggaaggaaaaaaaggcaaatttgggagtccatggataccctattattttagattccaggacaaattgtcgaataagcacgtttcataaaaacaatcctccgcagcatcccgtgacagcagctggtccctcgccacaggataattatgtctccttgtgcacacaaaagtctccgagggcatattgttgtggctggagtttctgataatttccaaattgaacaacctcagtcctaatgagtcagaggcttgtgcaatattttcaaacctcaggaacatctttttcattagttgtgcaataaagatggtaggcct

SEQ ID NO: 1380 - DNA, 416 bp, Homo sapiens
gttggttttgctaaagagttaaaatattaaggcttcataaaattaggaagttaacaagctcaaaaaccaagtgtttgagttacttcattccactgagagagctgtaaatgggttgcattggaacttaaaataactgcattgagtaagtgatggtggcgggcaccatgagctaactgtggtcagaagcctgatggcctccgctttggggctggattctccgtttggagctgtgtgatcctggatgagtttcatgccttggattcagaaatcagactttccatgagcttatatttcaagtgaataaatagctctggtcaggcttaatttgaagaagaagtaagcttggcagtgggtgagggttccttggaaggccaactggggcggaggggctgagggcaagcggctctggcccttcc

SEQ ID NO: 1381 - DNA, 977 bp, Homo sapiens
tggtttcccaagcaagaaatgacactttcactgtcagtctttctaggagtctggcagaatccaggaccgggattacccttatttatgaagcgaccttagactaacagtggctctctgggtctccagacaattggccagggactctaaaaaccagaaacaaagttgagagaactccatgctggtggagaaaaacagctggcctttatcaccagaatgtgccccatagaagcagcaaagcagcaagcgacgttcttaaacaagggcctgtgggcctcgtcaagatctggaggaatcatctacgactcactgctgagtgagagggctaggcagtgtctttaaggtcctgccagctttaacattgtatgctttttcttttgttcaatctctcaccacaactggaagtgttgcctcaactacacaggagaaagtttgcagtaacttagagaaaacattattttaatcaccagtgtatgttctcctgctccctggacaaatccatcagcagcggcaacactgaccaggtccagattggggccgctgcggtggatgtgaatccattgaaactaggggtctccagtgctcctgactcctcacagctctgttcctatgacaaggatggtcagcaaagccagcaaccttgaagggggaccttcttctaatctcctccctgcctgctgagagagtgtacagaagcagccacttgtcagctgcgatgaatccaatgataattacataaatcattaacaatacttgatatttgcccatcacatttctcatttcaaagtgctcataaaattgtatctcatgggtggcactgccggcacaacagaattccaaggaaggattacgggctaagtaaataaagcctggaggctgctttaaagcctaggagtctgttattaaccctttcctcctttttgtttaactttttctcatggaaatgttcaaacataccaaaaatagagaaaatactataa

SEQ ID NO: 1382 - DNA, 481 bp, Homo sapiens
ctaatttaataccctcaagttgtatatataccaggaaataaactcataatctccatcctaatcagtttgtaatataaaaggaagaacaaaattcccaaactttaaccctatggccttttcagtgtttattgatgagtatattgcaaacacctgggtagccagagcacctctgcttcactcctctgcttagaagcagcttctgccacacatccaggattatgtaatacatatctgtcacggtccacaggaccagcggactttaaaaaataatggtgacataaaaactcacagtggtagctataccacggaaccctaggtgagaaggcacctccacccgcacacaggtgtatggacgcaaggatgaacgttccggccgcacgcgtcccacacacggacgtgcacacgggcgcctccgaataggctcgcggttcccgaagccggctccgcggacgcctgctctggctccgtgggaaaggcgcct

SEQ ID NO: 1383 - DNA, 5005 bp, Homo sapiens
gaacaatttatctgcacgaataccccgtgctaccagaatggctgtcttagtacttcgcctgacagttgtcctgggactgcttgtcttattcctgacctgctatgcaggtaagtgcttctgatcacagcccatgaattgttcagtagttagcagtgactagagaaagctgatggcactgattcagaacataaaagaaagaaggggtctttgggcactccagaaagagcactggcctgggagacaagaggtgtatcttctaacacaaagaaagtagaattttaataaaaacctagcctctattttcagtggatgtatgaagtttgaaatttttttatgtgctcttatgatataatgacactattctagtataaattccatgggagctgactggcatttattttttgataattattcctaataatgttcattggtgaagaatatgtactctggaataaaactcctatacctggctctaccactaaccagaaatgtgactttaggaatgctattcaatctctctaggcctcacatataaatggggacatttaactttctcgtaaagttatcatgaaaattaaataaaaggaatgaaacaaattggaagggtacctggttgatagtaagcatgcaataaatactacctgctattgttgtcatgtataatctcatttggttctcatagtaatccaatgatgtaaacatgtacagttttatcattttcctttttgcaggttaataaacaggttgcagagggcaagttacttgagcatacatacaggtgaaagtggcatctgggagtgaaacctaggttcctagattctttctactattatcgagcaactatttctttcccaccttttccaagcacatagaagctcatgctgtatgctgccttctcattaattaatttactgtttgtctgcaaaagtctgtgagctccattcagaatgatagaccagaaaacagagggagtgcaaacatttagtgacagaatcctttgaatgtaacttggctgaagaacacacagacagacattacaacagaattactctagacatggccacggatattattcagtccattctactcctaaagaaatcactacagtgaagtgaaaggagagatttgataccaagaccaggcaccaccctgtctcttataaactctgaaactggttaaatcgttcactgctttgaacctcagtttctttatctgtaaaacgggataactatcaacttcaccaggtcaaatgaatatgctttttaattactttgtaaactattaaaactctacaaatatcagcaatactgtttattaagaacattatattcacattcactaagaaactcaacaaagtagttactgtaaataaaggctatcccatataatacttgaaaaaagaaaatattaaactattgactttgaagattgtttctaggatatcaatcgtttaatattttaatagcatttttaaaatttatattatcttctaaagcactagaggagaaagtgaattataaatcattttgctgctattattattaatagtaacaataaaacagataacatttatttattcattctttcatttattatttatttatataaggtaagtttatcttgggattggtactacgataagtggtatatatatgatatatgtatgtatatataatatagatatatgtatgtgtgtgtatatatatatagatatataatatataaaatatctttcaatcctgacaacatatgaggaaactgagagatgcaaagttaagcactgtgtgcaagtttacatggctaattttttgttaaaggcaggaatcagacagatctataaaactccagagcatgcaatccatcacactttaatacctctcaatatatatggggttcacaagctaaggccaagattttgatttccgcccactccaatcccaggcttcttgcatcttgaaaagccaggttttagtgtcatattaaaataacaagtcaatagaatttattatgcaagtagccagatagaaacacaggagaaaaaatctcatctttcatgcaagaaattactgctttgcatttggcaaatgtctttacagaacaattgtttggaggttgtattatacaatgtgaataatgtgctttgtggagttaaaaaaaattaggttcaaaccctgggtcagccactttctagatgagtgatttcaggtgagtcatttaattttcctgagcatctgtcttctctgctgtaactgtgataccactgctgagctaaatgacgattaaggcatgtgctgaaagcactgatggagtacctgcacgataggcaccttacacatgagttccgcttccgcctccttcccacaataaaaacaaaccaatccttctgagtacctgggttgcccagcactttatgtgaaggtcatatctacagttgtctttttttttttttaccttgactcttagcataactatgcacataatagtaggctcaggccaggcaggatggctcacacctgtgaccccagcacttcaggaggccgacgtgggcagatcactcaagcccaggagttcgagaccagcctgggcaatatggcgaaaccccgtctctacacaaaatacaagaattagccagctgtggtggcatatgcctgtcgtccctgctactcaggaggctgaggtgggaggatgtcttgagcccaggacgttgagcctgcagtgagctgtaatcacttcactgcccttcagcctggacgagagagtgaagccctgtttcaaaaataaaacattaaaaaagtaggcccaaaaatactttttgaatgaaggaaccaatcattggatatatgaataggtgatgattagtatattgattttggttatatgtcccaaactggtgcttctatcaaatctttagttgtgtcatagtaaacaataaatgctcatagaattgcctgccaatcttttttactaatagtttccattttaggatataatatagatgtaaagtttctgacataatttggcagcctccacacaaaaggtagttacatctcctttatccaaagtcaggggtacattgtctagaagttgggacttcttgagttaaaacttgtgctgaggttgctagataaactacgagaaacacagttagatttggatttctgataagcaatgaataatctttcagcatcagggtgtcctaattattgcatggatcttttttatagtaccagaaaagcatttgttgtttatctgaaatttaaatttaactaggcatcctgtatttttatgtacccagtctggtaacattacttgtcagggtacaatacaattaaaaaataaaggtcccactttatcctgtgaccagggctcagaggggcgaccacatgtagctactgtcactcttccatctcttctcatctcctgggaataaagacaatcaagcaaagtcaaaaagcccccaagggaccttgaatataatcaacctcactctggatccttggccctcattccaatgggcccttaagaatctagtgttaagaggcctgcagttatcatcttagcatttttcttactgtctatgaggtcttctgtaagcctcttaatcctttcacttttcagttcagtgagctaaaaaatgcatactctgtaagattgctcaggggataaaattacactacatttgtaaaatcactatttatgaaactactaggtgatatgcaagggatagaattgctttgtcatcattattgttatactattttgaatcttctaaaagaagtgcaaattgcataacttttccatcaaagactgtgcagctcatcatagagtactttagaatccaaattttaatgccaaactgacatgggtttgaattgtatttctgccacttactaactatgtgactttcaaccagtttctaaacatctctcaaattatattactttacctttaaattgggataattgttcctaccttgtagaattgctatgaggataaaataagacaatccatgtagatcgtcataggcatgtattcaacaaatgttacccattgatatttcatttttatttatttattttatttctcagagacagggtctcactttgtcacccaggcttggagtgcagtggaacgatcatggctcactacagcccctatcttctgggctcaagagatcctcctgcctcagcctcccaagtagctgggattacaggtgtgcaccatcacacctggctactttttactttttgtagagatggaagtctcactatgttacccaggctggtctcaaacttctggcctcaagcaattctcccatctcaccctcccaaagtgctgggattacaggcatgagccacctcacccagttgataatttatctttaatattattattaccatgggcatggagatcatatggaaaaacagacattctgtatgtcagtcctggcactggcacttactggctgcttaactctgagataagtacttagcttctgggaactttggttttctcactcaccaggcggtgccagtgtctacctaagtatcaatatcagtcggtctatttgtttgtttttacaaataaatgagacaatgcatgtgaagattttatccagacaggcattaaatgttcgatgaatataaccatataaggctatgaaatttgtgagtgggtcagaaagaatcccaagcgttccccacacagaaagaatgattccttctttgttgctgagaatcacctctgagattctgttgtttttcagacgacaaaccagacaagccagacgacaagccagacgactcgggcaaagacccaaagccagacttccccaaattcctaagcctcctgggcacagagatcattgagaatgcagtcgagttcatcctccgctccatgtccaggagcacgtaagcactgagaaaaacgttgctttttgtccaattctctgttgataatgaccacacaatgacctcatggcattaaaatacatgagaaacaaaat

SEQ ID NO: 1384 - DNA, 13832 bp, Homo sapiens
gaacaatatatctgcacgaataccccgtgctaccagaatggctgtctcagtacttcgcctgacagttgtcctgggactgcttgtcttattcctgacctgctatgcaggtaagtgcttctgatcacagcccatgaattgttcagtagttagcagtgactagagaaagctgatggcactgattcagaacataaaagaaagaaggggtctttgggcactccagaaagagcactggcctgggagacaagaggtgtatcttctaacacaaagaaagtagaattttaataaaaacctagcctctattttcagtggatgtatgaagtttgaaatttttttatgtgctcttatgatataatgacactattctagtataaattccatgggagctgactggcatttattttttgataattattcctaataatgttcattggtgaagaatatgtactctggaataaaactcctgtacctggctctaccactaaccagaaatgtgactttaggaatgctattcaatctctctaggcctcacatataaatggggacatttaactttctcgtaaagttatcatgaaaattaaataaaaggaatgaaacaaattggaagggtacctggttgatagtaagcatgcaataaatactacctgctattgttgtcatgtataatctcatttggttctcatagtaatccaatgatgtaaacatgtacagttttatcattttcctttttgcaggttaataaacaggttgcagagggcaagttacttgagcatacatacaggtgaaagtggcatctgggagtgaaacctaggttcctagattctttctactattatcgagcaactatttctttcccaccttttccaagcacatagaagctcatgctgtatgctgccttctcattaattaatttactgtttgtctgcaaaagtctgtgagctccattcagaatgatagaccagaaaacagagggagtgcaaacatttagtgacagaatcctttgaatgtaacttggctgaagaacacacagacagacattacaacagaattactctagacatggccacggatattattcagtccattctactcctaaagaaatcactacagtgaagtgaaaggagagatttgataccaagaccaggcaccaccctgtctcttataaactctgaaactggttaaatcgttcactgctttgaacctcagtttctttatctgtaaaacgggataactatcaacttcaccaggtcaaatgaatatgctttttaattactttgtaaactattaaaactctacaaatatcagcaatactgtttattaagaacattatattcacattcactaagaaactcaacaaagtagttactgtaaataaaggctatcccatataatacttgaaaaaagaaaatattaaactattgactttgaagattgtttctaggatatcaatcgtttaatattttaatagcatttttaaaatttatattatcttctaaagcactagaggagaaagtgaattataaatcattttgctgctattattattaatagtaacaataaaacagataacatttatttattcattctttcatttattatttatttatataaggtaagtttatcttgggattggtactacgataagtggtatatatatgatatatgtatgtatatataatatagatatatgtatgtgtgtgtatatatatatagatatataatatataaaatatctttcaatcctgacaacatatgaggaaactgagagatgcaaagttaagcactgtgtgcaagtttacatggctaattttttgttaaaggcaggaatcagacagatctataaaactccagagcatgcaatccatcacactttaatacctctcaatatatatggggttcacaagctaaggccaagattttgatttccgcccactccaatcccaggcttcttgcatcttgaaaagccaggttttagtgtcatattaaaataacaagtcaatagaatttattatgcaagtagccagatagaaacacaggagaaaaaatctcatctttcatgcaagaaattactgctttgcatttggcaaatgtctttacagaacaattgtttggaggttgtattatacaatgtgaataatgtgctttgtggagctaaaaaaaattaggttcaaaccctgggtcagccactttctagatgagtgatttcaggtgagtcatttaattttcctgagcatctgtcttctctgccgtaactgtgataccatctgctgagctaaatgacgattaaggcatgtgctgaaagcactgatggaggacctgcacgataggcaccttacacatgagttccgcttccgctctcttcccacaataaaaacaaaccaatgcttctgagtacctgggttgcccagcgctttatgtgaaggtcatatctacagttgtctttttatttttttaccttgactcttagcataactatgcacataatagtaggctcaggccaggcaggatggctcacacctgtgaccccagcacttcaggaggccgacgtgggcagatcactcaagcccaggagttcgagaccagcctgggcaatatggcgaaaccccgtctctacacaaaatacaagaattagccagctgtggtggcatatgcctgtcgtccctgctactcaggaggctgaggtgggaggatgtcttgagcccaggacgttgagcctgcagtgagctgtaatcacttcactgcccttcagcctggacgagagagtgaagccctgtttcaaaaataaaacattaaaaaagtaggcccaaaaatactttttgaatgaaggaaccaatcattggatatatgaataggtgatgattagtatattgattttggttatatgtcccaaactggtgcttctatcaaatctttagttgtgtcatagtaaacaataaatgctcatagaattgcctgccaatcttttttactaatagtttccattttaggatataatatagatgtaaagtttctgacataatttggcagcctccacacaaaaggtagttacatctcctttatccaaagtcaggggtacattgtctagaagttgggacttcttgagttaaaacttgtgctgaggttgctagataaactacgagaaacacagttagatttggatttctgatatgcaatgaataatctttcagcatcagggtgtcctaattattgcatggatcttttttatagtaccagaaaagcatttgttgtttatctgaaatttaaatttaactaggcatcctgtatttttatgtacccagtctggtaacattacttgtcagggtacaatacaattaaaaaataaaggtcccactttatcctgtgaccagggctcagaggggcgaccacatgtagctactgtcactcttccatctcttctcatctcctgggaataaagacaatcaagcaaagtcaaaaagcccccaagggaccttgaatataatcaacctcactctggatccttggccctcattccaatgggcccttaagaatctagtgttaagaggcctgcagttatcatcttagcatttttcttactgtctatgaggtcttctgtaagcctcttaatcctttcacttttcagttcagtgagctaaaaaatgcatactctgtaagattgctcaggggataaaattacacaacatttgtaaaatcactatttatgaaactactaggtgatatgcaagggatagaattgctttgtcatcattattgttatactattttgaatcttctaaaagaagtgcaaattgcataacttttccatcaaagactgtgcagctcatcatagagtactttagaatccaaattttaatgccaaactgacatgggtttgaattgtatttctgccacttactaactatgtgactttcaaccagtttctaaacatctctcaaattatattactttacctttaaattgggataattgttcctaccttgtagaattgctatgaggataaaataagacaatccatgtagatcgtcataggcatgtattcaacaaatgttacccattgatatttcatttttatttatttattttatttctcagagacagggtctcactttgtcacccaggcttggagtgcagtggaacgatcatggctcactacagcccctatcttctgggctcaagagatcctcctgcctcagcctcccaagtagctgggattacaggtgtgcaccatcacacctggctactttttactttttgtagagatggaagtctcactatgttacccaggctggtctcaaacttctggcctcaagcaattctcccatctcaccctcccaaagtgctgggattacaggcatgagccacctcacccagttgataatttatctttaatattattattaccatgggcatggagatcatatggaaaaacagacattctgtatgtcagtcctggcactggcacttactggctgcttaactctgagataagtacttagcttctgggaactttggttttctcactcaccaggcggtgccagtgtctacctaagtatcaatatcagtcggtctatttgtttgtttttacaaataaatgagacaatgcatgtgaagattttatccagacaggcattaaatgttcgatgaatataaccatataaggctatgaaatttgtgagtgggtcagaaagaatcccaagcgttccccacacagaaagaatgattccttctttgttgctgagaatcacctctgagattctgttgtttttcagacgacaaaccagacaagccagacgacaagccagacgactcgggcaaagacccaaagccagacttccccaaattcctaagcctcctgggcacagagatcattgagaatgcagtcgagttcatcctccgctccatgtccaggagcacgtaagcactgagaaaaacgttgctttttgtccaattctctgttgataatgaccacacaatgacctcatggcattaaaatacatgagaaacaaaatttgtggcataagtaaatgtgttatttttcattgaaaaatgttgccctacttaaaatatattttgcatctgaatcaactgccctgagctttttgggggaaaggacattcccatcaagtggttccatacaggatttttttttttttttctttttaatctcaggagcaaatagggaggaggaagaacactagactaaggaacaaaaagccaagttctgatcctaactcagttgctattttactaggtggtcttgaacaaggccctcccactctgaaggcctctatttgctcatattttaactgtgaagttaaaataatagatggcccgccccttgtaagcactgtgattacgtgatgaaggtaagaggtagtgatatgttcgttagtgatgggtgtgaggagtcctgcctatattttctagcttgagtagctcaagaaggttagcagagacagtagataacctctctttaaagacaatctagagaacctctcaacatgagtgttggttttcatcatgagagactgccttcgggcagatcaccaatcccagagtcttcccaatgttctcagcctgcttccaagcctgtgtctaattcccaatacatattatttttgcctacatagttttgatttgacactactacactgtatgctttattctccccatattaatctcccaaatttcagttctccaagatgaaattcactcttccaaatttccaggtgctttcaatttccactgctctaagcctctgctctctaattttctcccatatagatccttaagcagagtttgactaggtgtggtatacccacctgatacagaatcccttgggggaatttatttttaaaaatgcagatttctgcatcccattttgcatctttctggggacaaggccatggatatggttttcaacaagcttttcaggtaattctgatatacagaaattttcaaaagccatgccttgatcagatgttctgggttgcatggatgggccttaaagatccacaaaacctttacatttttattaatattttgtgtcagtgtgatttatttatttatttatttttgcattttcccggggaaagtgttcatgacttctattagattttcaaaggggtctttaaccaatagcagattaagaaccacttccatgtaggagtaatcaggggttttgtaatctctgatctgcttaaagggatagattgtcatctgattgggcagtgttctacaggcaatccttctccacaaattgttaaaactcacaggtgcttttttttaattgttacatttcctactgtggttgcttttgcaactgttatttttccaagactgttaatgtaaacaagaaggaaagtcataggccgacaataggagcaccacccattacatacaaactaaagattagactccagttgaattagtattgttacatccacacagcaaaacaaggagttagaacactaagagttcttttcattccttccctagggaattttccaagtataaaataggacatttttctctgtgttaaccataagagtcgactctctgatatgctaaagaattgctgtccgctctaggctcagaaatggcccttcatctactggtttccctttccctcattacattctgagtaaatgaccttctttctgttgctagaaattattaccatctcaggctctcttcccttgctctccctccttactaaaatactctccttttctaatgactagttcttgagcttacagctaatctaaaagtcacttcctcagaaactattctatgaccattcttgttaatactgtcttcttccattcccactgcctgttattctctatcactttaccttgttacagtgtcataatatttgttaccatccgaaatgacttatttatttttaatcaagtagctaagtgaaagtagagaccaaatcacctgactggttgcaagagcacagtacatggcatatagtgtcaggcacttgaattaattaattaaggaaagatatcttgcagatcagacctaaagcccatctacctcaatttgactgagaaatcctgaaggatctttgctcaaagacacagcaatatctgctcaagagataaatctgcgggtggtagagccaggatctaaaacatacccataactccctgctcaagggaagaccataagcaaaatagggggtggaggataggaggagacgtcagaaagtattgctaagcacttaacatgtacaaagcagggacacggattgtgaaggaatagtctaggctcttaatcccttctcctcaaataatttgcagtccttatggtaaaattacttaagccaatgcacaatgccataaataaaaatgagtagcaagataaatgtcagccaaagatcacaggcagtttccagcgaaaggagttctcaatgggtccagtgtgcttagggaagtgtttatggcaaaagcaagatgtaatttgggccttgaatgactaaacaatatttgatttggaagagagaatgagaggaataacaatgattcataaaggtgggaattttactttatttactccaatatgtctgatgcctaagtggtgtgtcagatgcatagtaaatgctagagacatgcatttgaaacaatgaatagactggattgttctctccacttgcttttggatcagcttggagctacctagactgcattttgctcatcatttttctgaaaaatatacatattcttaactcctctcaccctttgagagcccttaattctagggaatattttcccctctgggttccatgatgtattttcctggttctctctctaccactagccattctttctcattctttttatttgacttttcttcatgcacctgccctccaaatgtcattgttcctcagaattccaaacgtgcttggttcttcacattgcagtttacacattgggaacactgcctataatctaatgagtttcaaattcacatttctgttgcaattttttcctgagctccagatggaataactgattgcttgctacaaaattccatcgtttttctaccactatttcaaattccactggtctaaacccaagcccatcatctcactcaaaaccttcctccatatctcattaagtcacatcatcatccacccagaatccagaaatctaaggatcttctcaaatccttcctgctcatcatcaccttcatcgaattgctgaatattctaccctatataccttcctcgggtatatgtatatgcaccctatatacatttctcttcctcagctccactgactagttggtcaagttgagtcctttatcatctctttcccaagttccttttattggatttctaataagtttcacttttctctgtctctctttttattggatttctaataagttccaccttctgtctcatcaattcatcttctacctactaccagaactttatatcaaaaaaatttaaatttggtcatatcactgccatgcttgaaagtttttcatgaatttccattgcctccaaaattcaagcaaatgcattaggctgatgtcaaatgtccttctctgatgccaatgtatctttcagtcacatttctcacctctgcaacctgaagccccaatgactaatgagtttcattttaaagcaggtcatgtttgtataaacccccaatatctgtgcgtgtgatttttccctctgctgaaaatgcctagccccaaagccaaaaccccactctgttcacttggcaagtctaatcattttctaaagcccaattcaaaaacaaactctgtaaaaaagtcatagacacttaacatcagaaatttcagtttttcatattcagggatttcataatcctttgcagaaatcttcataacaacttttatccccacattgtattaaattacttgtatctgagttgtctgttttctccactagactgcaattcacaaaccatattttagttatcttttacgatctcagcagataccctggtacccagtccttaagccatagggcataatgtttctagcatttagtaatgactctggagagccaaatttttaaattttctttgtaacttaccagccatgtgctttggacaggttgtttaatctttaagcttcaaaggttttctcacacataaaaagagataataaagatgcattcaacaaatatttattaatttctactatttgccatgcactgttctaagtgctggggatatattactggaaaaatataccaaaatatatgactttatggagtttatgtgtgaatagatacctaactaatgggtttgttggcagatgcaaaaaagataattatgcataaattacttgcccactatgaactatgtagaaattttaggtcttatttctttctgacatagaaaaatctagagaagaacagtgtggctcaaacattatacagcgccttagtgatcattctaacactcctgttcagtctcaattgtaattcttattttctctttttttctcaagaggatttatggaatttgatgataatgaaggaaaacattcatcaaagtgacatcctcaggtgatttttcacttaaaatttacaactgaaataacagtgtattggacaaaggaaaaagagtctgtccagttttatttaataattttggttacccatgtctacctacaagcagaaaaagtacattttaaaaaaataaatgaatatatttttttcatgtacaagtttctaataataaaattttcttaagagaggaggtagagctgtgagatgaagtgaataaggatggcaagtttggagacctgattcctgtcacaaatctgctaggaacttgctttgtacaagttcagcctgtgaaatgaggggctagcacgcactagcaatctaaggacccacgtaatcatgcagttagttactcataagaagagtgaaatttgctgaacctaattcagagagaaaggataacaaactttctatctcacgcagttagatatatgggcaaacaatatagtttgagtgctcagaaatacttgctttttccctactcgggtctctcctgaaaatgcatattgaaatacgaaaacaaaagtgttagatctggaaaagtagtaatattagtagctggtatgaactgtgttcttactctgttttaggcattaagctaagtgattaatgactaagggcttgtagtatttaattcataatcactatgcaaaatagatattattattcttaaattttataaataaggaaatgaaggttcagggaggtttgctaatgtggctatattgataaaggatgaagacacaatttgaatttaagcagcctgattccaaggcctgtgctgtatctctaagccatagtgctactggaaacagagcagaatagtataggagaaggcagtggagaataatgattaagctaagtaatctaagtcatacctcaagatgttcatagaaatacaacaccacccctttgcttagttgagttactttatctgcatattcaggaagcatggcctttcccaacttctgtttgtgatctggtctggaaatgctccttttccccattggctccatttcataacctgggtgtgattaatgtaagttcagaaagctactatcatattcccccggaacttagcccaccctttcccatgtgcttctaaggatgagaatcaggcttgggcattgaaatcaaaacatgcccaaccccgacactcctgactcttaccctaaggccaattaagcttttaaactcagtcacttatgtttgtatgtcttcattcccatcttctcagagaacagcctgcctcttcttgcaggtgtcctaatactttgccttcattccggcttctggtacacacctataatttttggtacccacaccccaaatccttggagtacatcctacaggtctggtctatgatgtagtctaataggcaaggccacatggaggagcagaaagaacagaagacatagacaagatgtaaattcaacttctaaatcagccacttaatggttatgtaaccgtggtcaggccactttacctgcctgagccccacttttctccttatgaatttttaaaacatagggaatcttaatgccataaattttttaactgcacatgaaaaacttggaattgatgcatgaaccaacctaagatgccctgatgagcagggaggaatggctcaatctagggttgtaatataaaaaacattaaactagggagaaggaagcaactaagggagagactaatttttgtattcttagtagagacagggtttcaccatgctgcccaggctggtgttgaactcctggcctcaagtgatctaagtgatcacttggatgcccacctcagcctcctaaactgttccgattataggcatgagacatggcatgcagccagaatttcctaaattaagataggtagttggatagatagatcttatgtttctcttattaacattgatttttttttttttgagacagagtctcactctgtcacccaggttggagtgcagtggtgccatctcggctcactgcaacctctgcctcctgggttcaagtgattctcctgactcagcctcccgagtagctgggactacaggtgtgcatcaccacacccggctaatttttgtattttcctttagtagaaatgaggtttcaccatgttggccatgatggtcttgaactcctgacagtgattcaccccccttcggcctcccaaaatgctggaattacaggtgtgagccaccattcccggccgatccctcccttttttttttttttacacatttctttaatgcttctttaatccatacctactatatcaatcagccaatgctaccaaaatgaataactagctggctgttgagaagtttatggactcagcaatcacatagctctgtgtatctcataactgtggaaggaaatgataaagttatgcataaaggggccttgggaatgccttggaaaagataagaaggaatatctggaggaggggataagcattatgaatgctctacaaataaggtgaactctgagagaagagattctacacacaacctgatatgatgagtagagagaggtacagtatttggaaaaatatccaataaccgaatacctggttcatctgagaacctctcagcctctactgaacaacattggcatgatttttactggctttaatattttcaataaaattaaaattttaactccatttgtcctgcattgtttaaaaccatatgaattcaagtcatctttttttgtgtcttaagtcatttgatattttaagtataaattttctttcctgcttaaaaacaaatttggacaaacctcactagattactaaaattatcaaaagaggtaatggatagaaagtcactttatgaattcttaatttttatacaagtgttttggattaaggcaaaatgtactataggacacactagacttttatgcttagacttgctcagtcagaacttcctagggagggatctaggaataagtaagtcagacaggaaattccagtgcacctgataagcaaaattgcccgtggccacaatgtcacttgattacgttttcatgaagtcttatggaaaatttttcttttagaaatcaggcaaaaaaaaaaaaaatatgccttccctaaagtcagattcctcttttctgcttataagatttatgtgatggctgggcatagtgcctcatgccattacaggtgcctaccaaatcccagcgctttgggaggccgagcgggcagatcacctgaggtcgggaggtggaaaccagcctgaccaacatggagaaacactgtctctactaaaaatacaaaattagccgggcatggtggcacatgccagtaatcccagctactcatgaggctgaggcaggagaatcgcttgaaccagggaggcagaggttgtggtaaaccaagatcaagccactgcactccagccagggcaacaagagcgaaactgtggctcgtaatcccagcactttgggaggctgaggcaggcaaatcatgagatcaggagatcgagaccattctggctaaaactgtgaaaccctgtctctactaaaaatacaaaaaattagccaggtgtggtagcgggtgcctgtagtcccagctactcgggaggctgaggcagaagaatcgcttgaacctgggaggcagaagctgcagtgagccaggatcacagccactgcactccagcctgggcaacagagagggactctgtctcaaaaaaaaaaaaaaaaaaaagatttatgtgacttagtttttttctttttcatcacctatctatccagaaactcagtgaaactggtgactcaacttatccttaggagtttattcaatgtacattctcccttcattcttgtttctgattctttctttatatactctgaatttttgctttgttgtttttgttgctcatttcctcaagaatgtattatagttgattttattatgaaacctcttctattttaaagtgcagaagcataaaaattttaagggaaaggttaaaagttatttggtttatttaacgtcttaaaccagctctacttggtaattgttttcctctctttggcttgtgtttcaaaggacacacccatgtggctcctggacaatccaagagcagccaaatcctgcttttccagtttggctccacaagtcctccaggacagagccctcaaagcaactcccaacgagttctcaggattcaggctctggcttcaaccaaacagaactcattttgaacaccctgactgcatttttgcttttagaaagttagaataaatatggcgctttgggatcacatagttgatggagagga

SEQ ID NO: 1385 - DNA, 13831 bp, Homo sapiens
gaacaatttatctgcacgaataccccgtgctaccagaatggctgtcttagtacttcgcctgacagttgtcctgggactgcttgtcttattcctgacctgctatgcaggtaagtgcttctgatcacagcccatgaattgttcagtagttagcagtgactagagaaagctgatggcactgattcagaacataaaagaaagaaggggtctttgggcactccagaaagagcactggcctgggagacaagaggtgtatcttctaacacaaagaaagtagaattttaataaaaacctagcctctattttcagtggatgtatgaagtttgaaatttttttatgtgctcttatgatataatgacactattctagtataaattccatgggagctgactggcatttattttttgataattattcctaataatgttcattggtgaagaatatgtactctggaataaaactcctgtacctggctctaccactaaccagaaatgtgactttaggaatgctattcaatctctctaggcctcacatataaatggggacatttaactttctcgtaaagttatcatgaaaattaaataaaaggaatgaaacaaattggaagggtacctggttgatagtaagcatgcaataaatactacctgctattgttgtcatgtataatctcatttggttctcatagtaatccaatgatgtaaacatgtacagttttatcattttcctttttgcaggttaataaacaggttgcagagggcaagttacttgagcatacatacaggtgaaagtggcatctgggagtgaaacctaggttcctagattctttctactattatcgagcaactatttctttcccaccttttccaagcacatagaagctcatgctgtatgctgccttctcattaattaatttactgtttgtctgcaaaagtctgtgagctccattcagaatgatagaccagaaaacagagggagtgcaaacatttagtgacagaatcctttgaatgtaacttggctgaagaacacacagacagacattacaacagaattactctagacatggccacggatattattcagtccattctactcctaaagaaatcactacagtgaagtgaaaggagagatttgataccaagaccaggcaccaccctgtctcttataaactctgaaactggttaaatcgttcactgctttgaacctcagtttctttatctgtaaaacgggataactatcaacttcaccaggtcaaatgaatatgctttttaattactttgtaaactattaaaactctacaaatatcagcaatactgtttattaagaacattatattcacattcactaagaaactcaacaaagtagttactgtaaataaaggctatcccatataatacttgaaaaaagaaaatattaaactattgactttgaagattgtttctaggatatcaatcgtttaatattttaatagcatttttaaaatttatattatcttctaaagcactagaggagaaagtgaattataaatcattttgctgctattattattaatagtaacaataaaacagataacatttatttattcattctttcatttattatttatttatataaggtaagtttatcttgggattggtactacgataagtggtatatatatgatatatgtatgtatatataatatagatatatgtatgtgtgtgtatatatatatagatatataatatataaaatatctttcaatcctgacaacatatgaggaaactgagagatgcaaagttaagcactgtgtgcaagtttacatggctaattttttgttaaaggcaggaatcagacagatctataaaactccagagcatgcaatccatcacactttaatacctctcaatatatatggggttcacaagctaaggccaagattttgatttccgcccactccaatcccaggcttcttgcatcttgaaaagccaggttttagtgtcatattaaaataacaagtcaatagaatttattatgcaagtagccagatagaaacacaggagaaaaaatctcatctttcatgcaagaaattactgctttgcatttggcaaatgtctttacagaacaattgtttggaggttgtattatacaatgtgaataatgtgctttgtggagttaaaaaaaattaggttcaaaccctgggtcagccactttctagatgagtgatttcaggtgagtcatttaattttcctgagcatctgtcttctctgctgtaactgtgataccactgctgagctaaatgacgattaaggcatgtgctgaaagcactgatggagtacctgcacgataggcaccttacacatgagttccgcttccgcctccttcccacaataaaaacaaaccaatccttctgagtacctgggttgcccagcactttatgtgaaggtcatatctacagttgtctttttttttttttaccttgactcttagcataactatgcacataatagtaggctcaggccaggcaggatggctcacacctgtgaccccagcacttcaggaggccgacgtgggcagatcactcaagcccaggagttcgagaccagcctgggcaatatggcgaaaccccgtctctacacaaaatacaagaattagccagctgtggtggcatatgcctgtcgtccctgctactcaggaggctgaggtgggaggatgtcttgagcccaggacgttgagcctgcagtgagctgtaatcacttcactgcccttcagcctggacgagagagtgaagccctgtttcaaaaataaaacattaaaaaagtaggcccaaaaatactttttgaatgaaggaaccaatcattggatatatgaataggtgatgattagtatattgattttggttatatgtcccaaactggtgcttctatcaaatctttagttgtgtcatagtaaacaataaatgctcatagaattgcctgccaatcttttttactaatagtttccattttaggatataatatagatgtaaagtttctgacataatttggcagcctccacacaaaaggtagttacatctcctttatccaaagtcaggggtacattgtctagaagttgggacttcttgagttaaaacttgtgctgaggttgctagataaactacgagaaacacagttagatttggatttctgatatgcaatgaataatctttcagcatcagggtgtcctaattattgcatggatcttttttatagtaccagaaaagcatttgttgtttatctgaaatttaaatttaactaggcatcctgtatttttatgtacccagtctggtaacattacttgtcagggtacaatacaattaaaaaataaaggtcccactttatcctgtgaccagggctcagaggggcgaccacatgtagctactgtcactcttccatctcttctcatctcctgggaataaagacaatcaagcaaagtcaaaaagcccccaagggaccttgaatataatcaacctcactctggatccttggccctcattccaatgggcccttaagaatctagtgttaagaggcctgcagttatcatcttagcatttttcttactgtctatgaggtcttctgtaagcctcttaatcctttcacttttcagttcagtgagctaaaaaatgcatactctgtaagattgctcaggggataaaattacacaacatttgtaaaatcactatttatgaaactactaggtgatatgcaagggatagaattgctttgtcatcattattgttatactattttgaatcttctaaaagaagtgcaaattgcataacttttccatcaaagactgtgcagctcatcatagagtactttagaatccaaattttaatgccaaactgacatgggtttgaattgtatttctgccacttactaactatgtgactttcaaccagtttctaaacatctctcaaattatattactttacctttaaattgggataattgttcctaccttgtagaattgctatgaggataaaataagacaatccatgtagatcgtcataggcatgtattcaacaaatgttacccattgatatttcatttttatttatttattttatttctcagagacagggtctcactttgtcacccaggcttggagtgcagtggaacgatcatggctcactacagcccctatcttctgggctcaagagatcctcctgcctcagcctcccaagtagctgggattacaggtgtgcaccatcacacctggctactttttactttttgtagagatggaagtctcactatgttacccaggctggtctcaaacttctggcctcaagcaattctcccatctcaccctcccaaagtgctgggattacaggcatgagccacctcacccagttgataatttatctttaatattattattaccatgggcatggagatcatatggaaaaacagacattctgtatgtcagtcctggcactggcacttactggctgcttaactctgagataagtacttagcttctgggaactttggttttctcactcaccaggcggtgccagtgtctacctaagtatcaatatcagtcggtctatttgtttgtttttacaaataaatgagacaatgcatgtgaagattttatccagacaggcattaaatgttcgatgaatataaccatataaggctatgaaatttgtgagtgggtcagaaagaatcccaagcgttccccacacagaaagaatgattccttctttgttgctgagaatcacctctgagattctgttgtttttcagacgacaaaccagacaagccagacgacaagccagacgactcgggcaaagacccaaagccagacttccccaaattcctaagcctcctgggcacagagatcattgagaatgcagtcgagttcatcctccgctccatgtccaggagcacgtaagcactgagaaaaacgttgctttttgtccaattctctgttgataatgaccacacaatgacctcatggcattaaaatacatgagaaacaaaatttgtggcataagtaaatgtgttatttttcattgaaaaatgttgccctacttaaaatatattttgcatctgaatcaactgccctgagctttttgggggaaaggacattcccatcaagtggttccatacaggatttttttttttttttctttttaatctcaggagcaaatagggaggaggaagaacactagactaaggaacaaaaagccaagttctgatcctaactcagttgctattttactaggtggtcttgaacaaggccctcccactctgaaggcctctatttgctcatattttaactgtgaagttaaaataatagatggcccgccccttgtaagcactgtgattacgtgatgaaggtaagaggtagtgatatgttcgttagtgatgggtgtgaggagtcctgcctatattttctagcttgagtagctcaagaaggttagcagagacagtagataacctctctttaaagacaatctagagaacctctcaacatgagtgttggttttcatcatgagagactgccttcgggcagatcaccaatcccagagtcttcccaatgttctcagcctgcttccaagcctgtgtctaattcccaatacatattatttttgcctacatagttttgatttgacactactacactgtatgctttattctccccatattaatctcccaaatttcagttctccaagatgaaattcactcttccaaatttccaggtgctttcaatttccactgctctaagcctctgctctctaattttctcccatatagatccttaagcagagtttgactaggtgtggtatacccacctgatacagaatcccttgggggaatttatttttaaaaatgcagatttctgcatcccattttgcatctttctggggacaaggccatggatatggttttcaacaagcttttcaggtaattctgatatacagaaattttcaaaagccatgccttgatcagatgttctgggttgcatggatgggccttaaagatccacaaaacctttacatttttattaatattttgtgtcagtgtgatttatttatttatttatttttgcattttcccggggaaagtgttcatgacttctattagattttcaaaggggtctttaaccaatagcagattaagaaccacttccatgtaggagtaatcaggggttttgtaatctctgatctgcttaaagggatagattgtcatctgattgggcagtgttctacaggcaatccttctccacaaattgttaaaactcacaggtgcttttttttaattgttacatttcctactgtggttgcttttgcaactgttatttttccaagactgttaatgtaaacaagaaggaaagtcataggccgacaataggagcaccacccattacatacaaactaaagattagactccagttgaattagtattgttacatccacacagcaaaacaaggagttagaacactaagagttcttttcattccttccctagggaattttccaagtataaaataggacatttttctctgtgttaaccataagagtcgactctctgatatgctaaagaattgctgtccgctctaggctcagaaatggcccttcatctactggtttccctttccctcattacattctgagtaaatgaccttctttctgttgctagaaattattaccatctcaggctctcttcccttgctctccctccttactaaaatactctccttttctaatgactagttcttgagcttacagctaatctaaaagtcacttcctcagaaactattctatgaccattcttgttaatactgtcttcttccattcccactgcctgttattctctatcactttaccttgttacagtgtcataatatttgttaccatccgaaatgacttatttatttttaatcaagtagctaagtgaaagtagagaccaaatcacctgactggttgcaagagcacagtacatggcatatagtgtcaggcacttgaattaattaattaaggaaagatatcttgcagatcagacctaaagcccatctacctcaatttgactgagaaatcctgaaggatctttgctcaaagacacagcaatatctgctcaagagataaatctgcgggtggtagagccaggatctaaaacatacccataactccctgctcaagggaagaccataagcaaaatagggggtggaggataggaggagacgtcagaaagtattgctaagcacttaacatgtacaaagcagggacacggattgtgaaggaatagtctaggctcttaatcccttctcctcaaataatttgcagtccttatggtaaaattacttaagccaatgcacaatgccataaataaaaatgagtagcaagataaatgtcagccaaagatcacaggcagtttccagcgaaaggagttctcaatgggtccagtgtgcttagggaagtgtttatggcaaaagcaagatgtaatttgggccttgaatgactaaacaatatttgatttggaagagagaatgagaggaataacaatgattcataaaggtgggaattttactttatttactccaatatgtctgatgcctaagtggtgtgtcagatgcatagtaaatgctagagacatgcatttgaaacaatgaatagactggattgttctctccacttgcttttggatcagcttggagctacctagactgcattttgctcatcatttttctgaaaaatatacatattcttaactcctctcaccctttgagagcccttaattctagggaatattttcccctctgggttccatgatgtattttcctggttctctctctaccactagccattctttctcattctttttatttgacttttcttcatgcacctgccctccaaatgtcattgttcctcagaattccaaacgtgcttggttcttcacattgcagtttacacattgggaacactgcctataatctaatgagtttcaaattcacatttctgttgcaattttttcctgagctccagatggaataactgattgcttgctacaaaattccatcgtttttctaccactatttcaaattccactggtctaaacccaagcccatcatctcactcaaaaccttcctccatatctcattaagtcacatcatcatccacccagaatccagaaatctaaggatcttctcaaatccttcctgctcatcatcaccttcatcgaattgctgaatattctaccctatataccttcctcgggtatatgtatatgcaccctatatacatttctcttcctcagctccactgactagttggtcaagttgagtcctttatcatctctttcccaagttccttttattggatttctaataagtttcacttttctctgtctctctttttattggatttctaataagttccaccttctgtctcatcaattcatcttctacctactaccagaactttatatcaaaaaaatttaaatttggtcatatcactgccatgcttgaaagtttttcatgaatttccattgcctccaaaattcaagcaaatgcattaggctgatgtcaaatgtccttctctgatgccaatgtatctttcagtcacatttctcacctctgcaacctgaagccccaatgactaatgagtttcattttaaagcaggtcatgtttgtataaacccccaatatctgtgcgtgtgatttttccctctgctgaaaatgcctagccccaaagccaaaaccccactctgttcacttggcaagtctaatcattttctaaagcccaattcaaaaacaaactctgtaaaaaagtcatagacacttaacatcagaaatttcagtttttcatattcagggatttcataatcctttgcagaaatcttcataacaacttttatccccacattgtattaaattacttgtatctgagttgtctgttttctccactagactgcaattcacaaaccatattttagttatcttttacgatctcagcagataccctggtacccagtccttaagccatagggcataatgtttctagcatttagtaatgactctggagagccaaatttttaaattttctttgtaacttaccagccatgtgctttggacaggttgtttaatctttaagcttcaaaggttttctcacacataaaaagagataataaagatgcattcaacaaatatttattaatttctactatttgccatgcactgttctaagtgctggggatatattactggaaaaatataccaaaatatatgactttatggagtttatgtgtgaatagatacctaactaatgggtttgttggcagatgcaaaaaagataattatgcataaattacttgcccactatgaactatgtagaaattttaggtcttatttctttctgacatagaaaaatctagagaagaacagtgtggctcaaacattatacagcgccttagtgatcattctaacactcctgttcagtctcaattgtaattcttattttctctttttttctcaagaggatttatggaatttgatgataatgaaggaaaacattcatcaaagtgacatcctcaggtgatttttcacttaaaatttacaactgaaataacagtgtattggacaaaggaaaaagagtctgtccagttttatttaataattttggttacccatgtctacctacaagcagaaaaagtacattttaaaaaaataaatgaatatatttttttcatgtacaagtttctaataataaaattttcttaagagaggaggtagagctgtgagatgaagtgaataaggatggcaagtttggagacctgattcctgtcacaaatctgctaggaacttgctttgtacaagttcagcctgtgaaatgaggggctagcacgcactagcaatctaaggacccacgtaatcatgcagttagttactcataagaagagtgaaatttgctgaacctaattcagagagaaaggataacaaactttctatctcacgcagttagatatatgggcaaacaatatagtttgagtgctcagaaatacttgctttttccctactcgggtctctcctgaaaatgcatattgaaatacgaaaacaaaagtgttagatctggaaaagtagtaatattagtagctggtatgaactgtgttcttactctgttttaggcattaagctaagtgattaatgactaagggcttgtagtatttaattcataatcactatgcaaaatagatattattattcttaaattttataaataaggaaatgaaggttcagggaggtttgctaatgtggctatattgataaaggatgaagacacaatttgaatttaagcagcctgattccaaggcctgtgctgtatctctaagccatagtgctactggaaacagagcagaatagtataggagaaggcagtggagaataatgattaagctaagtaatctaagtcatacctcaagatgttcatagaaatacaacaccacccctttgcttagttgagttactttatctgcatattcaggaagcatggcctttcccaacttctgtttgtgatctggtctggaaatgctccttttccccattggctccatttcataacctgggtgtgattaatgtaagttcagaaagctactatcatattcccccggaacttagcccaccctttcccatgtgcttctaaggatgagaatcaggcttgggcattgaaatcaaaacatgcccaaccccgacactcctgactcttaccctaaggccaattaagcttttaaactcagtcacttatgtttgtatgtcttcattcccatcttctcagagaacagcctgcctcttcttgcaggtgtcctaatactttgccttcattccggcttctggtacacacctataatttttggtacccacaccccaaatccttggagtacatcctacaggtctggtctatgatgtagtctaataggcaaggccacatggaggagcagaaagaacagaagacatagacaagatgtaaattcaacttctaaatcagccacttaatggttatgtaaccgtggtcaggccactttacctgcctgagccccacttttctccttatgaatttttaaaacatagggaatcttaatgccataaattttttaactgcacatgaaaaacttggaattgatgcatgaaccaacctaagatgccctgatgagcagggaggaatggctcaatctagggttgtaatataaaaaacattaaactagggagaaggaagcaactaagggagagactaatttttgtattcttagtagagacagggtttcaccatgctgcccaggctggtgttgaactcctggcctcaagtgatctaagtgatcacttggatgcccacctcagcctcctaaactgttccgattataggcatgagacatggcatgcagccagaatttcctaaattaagataggtagttggatagatagatcttatgtttctcttattaacattgatttttttttttttgagacagagtctcactctgtcacccaggttggagtgcagtggtgccatctcggctcactgcaacctctgcctcctgggttcaagtgattctcctgactcagcctcccgagtagctgggactacaggtgtgcatcaccacacccggctaatttttgtattttcctttagtagaaatgaggtttcaccatgttggccatgatggtcttgaactcctgacagtgattcaccccccttcggcctcccaaaatgctggaattacaggtgtgagccaccattcccggccgatccctcccttttttttttttttacacatttctttaatgcttctttaatccatacctactatatcaatcagccaatgctaccaaaatgaataactagctggctgttgagaagtttatggactcagcaatcacatagctctgtgtatctcataactgtggaaggaaatgataaagttatgcataaaggggccttgggaatgccttggaaaagataagaaggaatatctggaggaggggataagcattatgaatgctctacaaataaggtgaactctgagagaagagattctacacacaacctgatatgatgagtagagagaggtacagtatttggaaaaatatccaataaccgaatacctggttcatctgagaacctctcagcctctactgaacaacattggcatgatttttactggctttaatattttcaataaaattaaaattttaactccatttgtcctgcattgtttaaaaccatatgaattcaagtcatctttttttgtgtcttaagtcatttgatattttaagtataaattttctttcctgcttaaaaacaaatttggacaaacctcactagattactaaaattatcaaaagaggtaatggatagaaagtcactttatgaattcttaatttttatacaagtgttttggattaaggcaaaatgtactataggacacactagacttttatgcttagacttgctcagtcagaacttcctagggagggatctaggaataagtaagtcagacaggaaattccagtgcacctgataagcaaaattgcccgtggccacaatgtcacttgattacgttttcatgaagtcttatggaaaatttttcttttagaaatcaggcaaaaaaaaaaaaaatatgccttccctaaagtcagattcctcttttctgcttataagatttatgtgatggctgggcatagtgcctcatgccattacaggtgcctaccaaatcccagcgctttgggaggccgagcgggcagatcacctgaggtcgggaggtggaaaccagcctgaccaacatggagaaacactgtctctactaaaaatacaaaattagccgggcatggtggcacatgccagtaatcccagctactcatgaggctgaggcaggagaatcgcttgaaccagggaggcagaggttgtggtaaaccaagatcaagccactgcactccagccagggcaacaagagcgaaactgtggctcgtaatcccagcactttgggaggctgaggcaggcaaatcatgagatcaggagatcgagaccattctggctaaaactgtgaaaccctgtctctactaaaaatacaaaaaattagccaggtgtggtagcgggtgcctgtagtcccagctactcgggaggctgaggcagaagaatcgcttgaacctgggaggcagaagctgcagtgagccaggatcacagccactgcactccagcctgggcaacagagagggactctgtctcaaaaaaaaaaaaaaaaaaaagatttatgtgacttagtttttttctttttcatcacctatctatccagaaactcagtgaaactggtgactcaacttatccttaggagtttattcaatgtacattctcccttcattcttgtttctgattctttctttatatactctgaatttttgctttgttgtttttgttgctcatttcctcaagaatgtattatagttgattttattatgaaacctcttctattttaaagtgcagaagcataaaaattttaagggaaaggttaaaagttatttggtttatttaacgtcttaaaccagctctacttggtaattgttttcctctctttggcttgtgtttcaaaggacacacccatgtggctcctggacaatccaagagcagccaaatcctgcttttccagtttggctccacaagtcctccaggacagagccctcaaagcaactcccaacgagttctcaggattcaggctctggcttcaaccaaacagaactcattttgaacaccctgactgcatttttgcttttagaaagttagaataaatatggcgctttgggatcacatagttgatggagagga

SEQ ID NO: 1386 - DNA, 232 bp, Homo sapiens
tcaagaatctctttcatctgcatagaatttttcttttgggactctttcccagtatcatctccttgtaatctcataactgcaatgcgattgaagtgaattagggaggtattgttttctgcatatgacaggtgaagaaactgaggctcaggaggctgattggtatcatgcctaagataccaaaattggtagaggctacatgggagctccagccaagtgtgtctaactcccagca

SEQ ID NO: 1387 - DNA, 232 bp, Homo sapiens; identical to SEQ ID NO: 1386

SEQ ID NO: 1388 - DNA, 14667 bp, Homo sapiens
  SITE (12053): n equals a,t,g, or c
tcacgtggttgttcggagcgggcgagcggagttagcagggctttactgcagagcgcgccgggcactccagcgaccgtggggatcagcgtaggtgagctgtggccttttgcgaggtgctgcagccatagctacgtgcgttcgctacgaggattgagcgtctccacccagtaagtgggcaagaggcggcaggaagtgggtacgcaggggcgcaaggcgcacagcctctagacgactcgctttccctccggccaacctctgaagccgcgtcctactttgacagctgcagggccgcggcctgggtaagggcgaaggggttgttgaacggtcgcgggagccggggcggggttgggaggtgagtcgagggactgccccattggctgggtcggttttggcgcgctctcacttccgcgcttcctattggctggctggcgcagttcccgaggcgcgcgccgcggttggtaggctcggacgcgcggggccacactgcccgccccctagcctggcgctgggcctccgggacaagttggctgggtccgggcttggggactgcaacgcgggtaagggactcagcctgggcttgccagctgtggggatgaggcgaagcatccatcctcttggcagttaagtggctggtcctgatctgagggatctgcaaatttggctcatggaaagaggtggctgaattctgcgtctcccattaaacggatactggcgttgttgatacgggtttcgcatggaccctgtcctgtgccagggtttttaatctagctattaaaggaactggagaataacaagtaagggttgcaaggtcgctgacaggcgtgggaaacttgtgaaggattagaatgctaagtggctttcagcttttttcacactaaggtacgttttacgtcgcaacctaggacacagctatctaaccaaatgagacgtgatggaagcaatgtttctcgtctcttcaattccattctgttcagttgcatttttctaagcagtgttgctcatgactcactaatttcgagatcacggcccgcgacccgcagtttgaagaacattgcgtagggtctgtttactggggcccgaacaccattttcttaacatgaaatagagtagaaaatagcaggatgcccgcacaaattagattgttttgttttctaagctttttttttttttgagacggagtctcgctctgttgcccaggctggagtgcagtggcaggatctcggctcactgccacctccacctgtcgggttcaagcgatactcctgcctcagcctcccgagtagctgggactacagacgagcaccaccacgtccggctaatttttgtatttttggtagagatggagtttcaccatattggccaggctggtttcgaacttctgacctcaggtgatccgcttgcctcgaccttccagcactttggtgatcatgcaggtgatccgcctgcctcgacctcccaaagtgctgggattacagatgtgagccaccacgcccggcctttcctaagcttttttgtttgcacatgtgtgtgcacgcgccaggacacaaggtaaaatgtattaatgttagaagccactgcactgagtaaaggcatggccacaaaaattagggacatctatcgacgaggcacaggcgcagacacggcaggggccaatgggtagtgggcagtgggcagtgggcagtggagcagcagttcagatgctgagtttggcccagtggtctagtcaaccgcattacatagatccctttctaccttttccctctttcttgcttgttagtccttcagttcatgttactggttaaacatttcctacaaatgtaaatgcatgatctcatttgaccagatattaagtctgtgttaagttattgtcagagcccagtttattataccttaaatctgtctttgaatcaggaaagttaagatgctgctctttaggatggacctgggcataccctagtatctgtttattttgctttttctggtgactatttaatccaggacaatatgtttagaaattttaaaccagttttagaaattggtttaaaatacattaatttcattttttcagctataattattatgtgtgtatatatgtaaaatatagatatcaagagtcattaactttagtcaccttagtcattgacagggctgagtttggattaagagagaaaaaataatagttctactgtacaatagtataatttttatgattgtaagtattttaaacctagactccaccttcgggggtgcaaaccatattgttttttaattactagtcttctgtgcttcaccatctacataatgaatcccagtatgaagcagaaacaagaagaaatcaaagagaatataaaggtatgtgattgaataactttaatttttttttgtagaaagcatggggctaaaagtattttgacataatttatccaaatttagcctggctataatttctgtaagccttgagttagtcagaggatgagtaacaatagagaacatttttaaaaaactaattacggttgaatattaagtctgacccaagaatatgggttgtctctcttattttggtctttcaacagtattttgtagttttcagagcatgaattttacactatttatgttaaattttttcctaagtattctttttgaggttactgtgaatggaattgtttccttaatttcattctcatttggtcattgctactgtataggaaaataattgacttttgtgtcttgattttgtgtcctgaaaccttgctgaacttaatagttctaattgttttttagtagattcttcaggattttcttttctttttgtattttctctgtgaagattccagaagtatctttaggattttctatgtatgagattattactgctttgtttctactcttatatttcatgaaatgttattaaaatccattgtgtatatcttcagaattaagagtctttgaccacagacatgttttgcattatattacacatttttctagagtataccatattcattaccatctaacctatttgatttgtgatactttttcaatccctatatgatactttcactggaaatcttattccaagtatttactcttatgacagcaggacagagtttgtttagttttgagtttatacttctgactagattcatatttatggttctaagttaatttacaatttagctaggtccttccacacaacttaaattatatgaataccttgggaattggatcacatcttcaggtaaactatcaatttgcggttttaaataaataaagagccaggtgcccatggtggctcatgcctgtgatcccagctacttgggaggctgaagtaggaggattgattgagctctggactttgagaacagcctgggcaacaaagggagaccctgtttctaaaaaaccataattagctgggtgtggtggcacccactggtaatcccagctactgggaggctgaggtgtgggaggaattgcttgagcctaggagtttgggctttggtgaattatgattgcttcactgcactccagcctgggtgacagagtaagaccctgtacctaaaaaaattttttttatattaagtaaattaaattgagtacctaaaagccattgataagtataagcaagtaccttttgatgggttttttgtttgccttgcttttcttaggattcttacaatatttttcttgaataagaatgtcaattgacattatattcgcattgacaatttgtgaatttgattccattagcttccatttaggatgatggcatcttcccactgtgctttgtgtgtgattatttaaaatttttgttatgaaatttttgaaatatttaaaagtattttaataatttacttccccagcttcagcaattaccgctatatggccaatctggtttcatctatgtccttatttactccacttttccttcagtggattaatttgaagcaaatcacagccaaataatttatatatttccagcagattacattttaaagaaagtcttgtgtttactagctacagtgaaactatcttgaatataaaggatactaggttctgtttggttttggttctacctccaaaactgagaccttgggtgggttagttagcatttcagccttagtttactcatctgtaaattgggagaactggactagaactagatccttgtgagttgcatgcaaaattctgtgtgaatgtgcttttatgtgaatttttttggggagaggattcacagagtattaaatagttttccaaaaaggttaagacccattaatatacaagaaactttctggctttaagagtctattattccaatgcatactctatatacagaaaataataatagtaatgttacattgttttaggcaaaagtctatatagcttatataaataaaagttaaatcttggaaatggtctttttttttggtgacagttacttagctggcttctttgaccattattaacagaaagcatttaaataacacctcttgttagtaaggttccaacgttacattttcttttatttgtctggagactgttgactaatctataatctaaattatatctgaaatgttgatgtaatatttgtcctcacagtagctggcatttgtccttcagttaaatggtgagataataatcagcagtagaaactttaccgtgggaaaggtgaactcttatcatgtgaagtacagtgtggaatcagtaactttctcacgctggtatggtatcatgttcttgctaaccttgtttgagtattcaccattgtttgctatcccatggtggcagtataactaatgatattttgcaaaaataggagagaactttcagatcatgaaatatacaggaagttgtttacatattacaaggaaggcaatattttcaccaaaacaatagcttgggcattttagagtattttagtatgcctcaggcactgacattttagccaccttctaatgaatgggcttgaagcagaactgcttctactatcaggtaatggttgaggggggatgtctattacacatgtactttgttttgtgtaaagtatgttctggaaagttacattcttttggtgagtacatgtaagtatttgagggatattcatgatttaaggaggcctgaaatgaatctttttgattagggaaagaaatattttgcagtgtaaatgattaaccatttcttccagtttacctgtttggtgagttcataccataaatgttacgatgtttggttttataaaagagtacctgtaagtttttagtttctgtgtggaagattttttcagagagaatacagatagccttcttgtattagaattttgtcatatgtggtttgaaactgttcattggagctgaggaattttgttacgtttgttttaactagatatgattaacaaaatgaccatagcaagagcatgcattgaaatgagagaagttacgtgtgtttgtgtctagtttgggtaatatgattcattcttaagaattcttcaaactttattataatttttggaaataacaagtttgtcagttgattaaaccagtgtcttgttcataggcgaccttacgcaattatatagcagaccaaatgtttgtgttgttagtgttccttttccacccctaaattatagaaggactaagagtaacactccatacagaaactcagtaactaaataaccatattgcaactcagtaacaagataatgaattatgctgactttttagaatagttctgtcccaagaagaactctgaagatgattcagccttctgcatctggatctcttgttggaagagaaaatgaggtatgcactatatggctaaaatggggtactggtgatacagtgtctacatcgaaaacatttctactattttcttggtcagaaacacgtaaattgttgaaatttggaaataatttgggaatcacaattatatatttcccaaagaagtgattttggttttaattgttcaatttaagaagttcgtcgggtgcagtggctcacgcctgttatcccagcacttagggaggccgaggtgggtggatcgcctgaggtcaggagcttgagacaagcctggccaacgtggtgaaaccccatctctactaaaagtacaaaaaaattagccgggcgtggtggcacacacctataatctcagctgcttgggaggcttgaggcaggagaatcacttaaacctgggaggtggaggttgcagtgagccgaggtcacaccactgcactccagcttgggtgacagagcgagactctaaaataaaaataaaaataaaaaattttttaaaaaataaataaataatttcagctaagctcttgaccccagtctaatccaaaataattgttgcaaataaaattcctaaaatgttactatatgttttggtagaatttttaattgtataacttttttaaagatccagagatgtgaaaaagttagatatgcgtactctttttttaatacataaatgaaaaaccacctaatttcttgttaattaaatcaaagtaaatacagttgataagtgttttcattatagctgtccgcaggcttgtccaaaaggaaacatcggaatgaccacttaacatctacaacttccagccctggggttattgtcccagaatctagtgaaaataaaaatcttggaggagtcacccaggagtcatttgatcttatgattaaaggtatgaaaaaatagataacttttgtcttaattttaaattatgatataaggaaaaatttgttaatactattatgaattctgccaattactgtaatctggggatagtataacagcactataaatgtttttgtatgtgaccatttgtttgacaagatccatgtgtggatgaaatgttaggaaaaggaggcccagtgcagtggctcacacctgtaatcccagtagcttaggaggttgaagcaggaggatggcttgagtctagaagtttgagactagcctggacaacacagtgaggctctctctgtatgaaaaaattagctgagcatggtggcttgtgcctgtattcccagctactcaggaggctgagtcaggaggatcacttgagcctaggagtttgtggccgcaataagctatgtatgatagcaccactgcactccagcctgggatacagggcaagacccggtctctgaaggaaaaaaaaagggtagggggaaaggatagttattaatatgacagctctgataattggattgccttgtaggggtttacaagacttggaaataggctttttagaagaaaaatgtttagataatgagttcgaggtatgaaaggaatttgaatattccaggagagtatggcataaggaaaccaataaaaatatggatgaagagtaaagatgaatgagaagaattatgcctataataagtactagtttttaatagaatggtagtatacatcagaagaagaagcaactgatgttttgtaagcattatggaagattattatttctgtatgaattatgggtcattgaatgttaagtactgatgataaaattgaggcctagagaagttaattgacttgctgaaggtcacagtaacatttggactcattttgaattgccttgaagacaggaagaagagaaatagatggtaggatttttattaggcaaaattaggaaaggttgactggatagaaataaagcagctctttaaaaatattgtagattgaagagcaggatttgtgacactcatatctgattaggttaaaaattaaatcaaggattagttaaaataaactgctaaagttaaatatcaagacaaataactatatatcatgttggtaatataaccacaggtggaacacattatccttgtaaccctctgcgatacatggtaaaaattaaaataactgcgaagaaatcccaaactttattacatttgttgtttgaactttattatatttgttgacagtggtattagtgtaattttgaaaaaaaaaaaaaagttgtgtatattttaggactgagcaaatgaataacatgttgaagtattacatttcctagcactgcccctaaacaggtagaaacaaactacacctctgtagaaaggagcacaccgtgtatccagttcttggtttataaacactattcttcactaaagttccatggagaaattgctgattccaggtcaggggcagggaaactttgggtgatcatggattatcttttgacagaaaataaggaagtactcaaaaacgggtggacatgttgaaagaacacatgtcatcttggaaggattctcacagactacagttgggaaaatttgagcatcaaaatgaataacgtcaagaatggattataatacattgaataaaaaaggatatatgagtctatactgataaattttcttttaaattggggtaggaaaagtttttatttacagaataatgctaactactacttgtagaaggaattacataagtgaaaaaaaattggttttccatccaccgtagaagtaatagatataagccggaaacatcaatcatcaatggaattaaacttaggtaaaaagttgttggaggacagggtattgacacagtctcaaatattttgctctacagatcattagttaattactaagggaaaaagttatctttacaaggcagaaatctgatagatagcatcttaatcaaatgatcaaatttaacatctccagtatcatgacaaattggcgtgtgcttcttgatgatatactgaggatacatacttatatagtattcttatactatacttatatagtattcctgccaaaaatgtttagtttgaatctaatcatggagacagaaataaaaaattaaggacagtgtacaaaataattgatctggactttgtaaaaatgtcagtgttacataaaaagacacgacctcacaaaacaaatgtattgcaaaaatctttaataatctaggtggaagatatatacgtattgtacttttgttgtaattctgaaggattgaaatcttggaaatgttggggaaaatagaataatattgattttattttttaactttaatcttttaaaaatgagtattactaaacaatatgggggtactaagattggaaatttttttgaaacaaattactgggttttgacagtaatgatttttaaagttatatttaaaatattattttagaaaatccatcctctcagtattggaaggaagtggcagaaaaacggagaaaggcgctgtatgaagcacttaaggaaaatgagaaagtatgtattgagtataatttgtaccatttttaaaaattccaggattgttttgctgcttagcatattttattagagcaatatgggctagctttagtattggcttaagaaaagtttaagtaaaaaggcagctcttgacaattatacaaaatgaatcccgttgtgttgagagtcaattctatgctgcatgtcctccatgttatatacttggaggtatgtaatttgatttatagcatagcaaatctatgaatactgaacttatttatgtatacagcttcataagaaatggacaaaagacatgaaattgccgcctgaaaaggagaataaagaactggcagaagtagcagaacatgtacagtatatgtcagagctaatagaggtaggtaatttaatagttatctggttcaaatttatgtatttttctataaagttgaggtagtgtagtgtgatcactttgaagtgttagggctctggaatcagatttcctggatttaagacttaacttccttcctaacaccattaagtttgctgggtagagtgggtttatccggtcagggcttcatcttcctcatccacaaaatgagagtaatgatgcctaccttatagacttgttatgagaattaaatgagttacaatagatggacaattgcaaggagtacttgcacagagtgaaagttcagtaacttaattattgttatgaagcaaaagaccatattttttggtagagttattaaaaggaattatccctggaaaatatgtatagcaaattatttcatagttgacacattttagatagttttaattttaataccagcttgacattactgtcatttataaaattgataatttgtacaataaatgagttttgtggttttatctgactttaaaacattttgtaagtagctaatatgtttgtaagaattagcctggtgttgctttatcagacttgaccttaaaaaggttttaagatttatttattcatgtttgcaaaaagtttttcttgctgataggaagaaagtttttcaaatcaaaacttcatgtaactgaattgtgaccttttacatttgagatccatgatagaattaatatttgaagttttcatttggagatactgtggtagctgtcttaactgccttaaaagaattagtccacagctgattggaaatgtagaacacctacttgtccttgcagctgattggggaagtacctgtttatactctgaaataatttcagtgctttttaaaaaaaaaagacaaattattaaacactttgactttgctgactatgatctagcatggtagagactttgatataatactgtttataaatgaatttattgaggggcaagatgaaaaaaatctcatagctatatcagtatgctatacgggtcagctatatcagtatgctgatcagcttaggttttaacatttttacaataaattattggtttattctttaaaagagactgaatggtgaacctctggataattttgaatcactggataatcaggaatttgattctgaagaagaaactgttgaggattctctagtggaagactcagaaattggcacgtgtgctgaaggaactgtatcttcctctacggatgcaaagccatgtatatgaaatgcattaatatttgactgttgagaattttactgccgaagtttacctccactagttctttgtagcagagtacataactacataatgccaactctggaatcaaatttccttgtttgaatcctgggaccctattgcattaaagtacaaatactatgtatttttaatctatgatggtttatgtgaataggattttctcagttgtcagccatgacttatgtttattactaaataaacttcaaactcctgttgaacattgtgtataacttagaataatgaaatataaggagtatgtgtagaaaatttgtctgtttctatgcttttatgttgttctctttccattcttttgctaactaccttggaggagacaaggagaaaacgaacttaaagtatttaaactgagatagctgaggtttttaactcccaaactttgttgtacctcaagctcattgtagacactattgatattaacaagttgtttttggaatggagcatgagaatctattttccaaaagcttttcaagtgaatctgattagacagtgagaggcccaactggctagcaggatcagactcttcttggaagcttaaaatgatggatgatggtgataatcctcaagacacacagtgaggagtgggtagaagtttgacggaaaaaatcaggaatagctgaaaattatggagcttttctatttcacatattggtatagtgcaaagtatgtaaatattgaagaataagagtagggtcagattcattagggatttcccatatatactaagttatgaaagaggaaaagtacaactaggggtatgtagcattggaactgaaaaagttctgtgagaggcatacaaagtagttttgtataaattggcaataaagagcaatgtcatgcttttattttttttcctttgagacggagtcttgctcttgttgcccaggctggagtgcaatggcatgatcttggctcactgcaacctctgcctccctggttcaagtgattctgcctcagcctcctgagtagctgcgattacaggtgcctgccaccacacctggctagtttttgtatttttagtagagccggggtttcaccatgttgggcaggctggtctagaactcctgacctcgagtgatccgcccacctcagcctctcaaagtgctggaatgacaggtgtgaggcaccacgccaggcctcaagctttttaaaggattgtnttaggtaagcatccttatagaaccttaattttctctctctgtcacccaggcgggagtgcaggggtgcaatctcagctcacttcagcctccacctgatgggcgcaagtcatcttcccacttcagcctcacaagtagctgagactacaggtgcgtgccaccacacctggctaattttttatatagacggggtttcgccatgttgcacaggctggtcttgaattcctggcatcaagcgatccgcctgcttcggcctccagagtgttgggattacaggcgtgagccaccgtgcctggccttaattttctttaatactgagataaagcctacctcatagtgttatcgtgaagattaaaacctttagtgtctaggctaagtgtcttaaaaatggaagctattattaatctataacaacattgtccagtagaacttattgggatgatgagaatatctgctgtacagtatggtagccatttctgtgtggctgtttagcacttgaagtgtggctagtgtgaatgaggtatggacattttaatttaagtcactacaagaagctagtggcaattacgttagtgtggctctgtgtgtttcaggtgtggatcactagcctaaagataggattaataggtaaattaattttaaaggaagtgaagaatattctggattagagcatgaggagactcagttgagaggcctttagcatggttaagaaagaaaataggtaagtagaatagggacttgacaaatagaaagtatttttgtaaaatgccagaatttgatggtggggagcaaaaggagagggaattgaaggggattaaaaaactaaggtagtagctaaaaccataaaacttctagattatatagaaaagttcttagtgactttgggtttggcagagagttctcaaataggacacaaaaaagcatcaacttcaaattaaacgttgtaaattttaaaaactttttgaaagacaagcaaatgaaaaggcaagaacagactgggggaacatatttgcagaacatagccaacaaaggatttgtatctataaagaactaaggtatgtatgagatggaaactaagtgcatgaaaagatgctcaacattagtcattaaggaagtgcaaattaaatgacaaccagatactgctacatacctttcagaattgttttaagtttgaaaaataaaaacaactccatcgagtgttaaggatgtgaaacatctgaaaccctcctgcagtggtggtggcagtgctaaatgctacaactgctgtggaaaagttgaacaattccttaaaagttatacatacacattttatatgactcagccattccacccctgggtatttacccaagagaaacgaaagcatatgtccacatgaagactagttcacacattttcatagctttatttgtaatagcccaaatatccattggtaactgagtggataaattatggtataactatacagtggaatactatttagcaataaaaaggggacaaaaattggtacacgccacatggacgaatctcaatgttgtgtgaaagaagccaggtaaatacatactgtatgcttctatttatttaaaatcacaaaactacaaagtataatgagaaagcagattagtagttgcctaagggtcatgtaggggctgttttgggggacatattttaagcttctagtccctgggaactgaccctagtgatggagaatttgtaggaatttcctgtggaagatgagtctgatttttaattaggtatcaaatgttagtatagcatgtcagccgggtgtgatggctacgcctgtaatccctacactttgggaggctgaggcaggcagatcacttgaggacaggagttcaacatcagcctggctaacatggcaaaatgctttgtctactaaaaatacaaaagattagttgggcgtggtggtgcacacctgtagtcacagctcttcgggaggctgaggcacacaagaattgcttgaatctgggaggcagaagttgcagtgagcatagattgcgccactgcactccagcctcggcaacagagtgaggctctgtctcaacaaaacaaaaaacatgtcaatgaaaataccttggagaaggggtcagggagtcaatcaagcctggcccattagaacaagttctttgaagttggtttaataaaatgcagtcgagcttcgttaaggaaatggcaaatggataagaatcagttggaaaaacagtatgcatgaagcctggattagactgaactaatttgtcaatatattttacaaggctagcataactgatatcaagatttgaggatggaccagccaggtgtggtggcttatgcctgtaatcccagcactttgggaggcccaggtgggcagatcacctgaggtcaggaattcaggaccagcctgacaaacatggtgaaaacctgtctactaaaaatacaaaattagccaggcgtgatggtgcatgcctgtagtcccagctatttgggaagctgaggcaggagaattgcttgaacccaggaggtagaggatgcagtgagccaaggtcgcgtctttgcactccagcctgggcaacgagcgaaacctcatctcaaaaaaaaaaaaaaaaaaaaaaaaaagaag

SEQ ID NO: 1389 - DNA, 177 bp, Homo sapiens
cttgcttccagcccacctgtgtgtccagctgctgccagccttcttgctgctgatcacgttccaagagaaccaccatcctcacacaacaaatttctgctcaactgactcatcttttgggggactaatttaatttgctgctgacagccaccatgctctcacccaaatttttatgaattc

SEQ ID NO: 1390 - DNA, 11872 bp, Homo sapiens
cttgcttccagcccacctgtgtgtccagctgctgccagccttcttgctgctgatcacgttccaagagaaccaccatcctcacacaacaaatttctgctcaactgactcatcttttgggggactaatttaatttgctgctgacagccaccatgctctcacccaaatttttatgaattctctacatgtttaaaatcttggaaatctgcttgagggagggcagaatacttcatcctgattctctttttccttacaccttgtggatcatgtgccagcttcatctgttctcaagtttgagtcatggtctcagctttgactctaaagtcaagagcttcattccctgcttctaaggaatttaggtttctgcaactgatcgatgatctttgcaatcttttttttgttttcaatatcctcctcatcgttcttgtatccttctttcttcttttcatgataaatttgtgttgtgtccctggtagcagaaatccttacctatatgtttctgaataaattctgaaccatcctcatctcatatagtgttttgttttatttgaaagcactcctgatatgggatttacacacatatcacataccatagttattatccaatttgattctcaaaacaggtggtcatgcattattaccttcatttttcacctgaaaaaaaattaatatgtgatgttatgtagctaataaaggacagattctgatccaagctgaggtcctctctttctgcccaaggacacttacatttaactctcaacatagtagaaatgacattggaagtcagcactagcaagacatgcacttgagtttatttaacaatgagagaaataatctctcatatttgcaaataatatttttattcacaaaaaaatcccaaattattttttcccacacctcagtgagcaacagctgcatgacatggcagcagggattgcatttaatggctgccctgaatgcagggatctttttgtctcagcctctgaccagccaatcattcaattcatccgcatcaaaaagatgcttgagaattcattatatcatcataagagagagtctcatctgaagtgacttattctcagtatgatgtaaataaaattcttacacagcctccccctcctgaatacctgttgacaaagtcaatgaaactaagttattccttgtaaaatacagaccacaccttatgccacattaagacaatttgtcccctaatcgaaatgttatgaggaaaattaagtaaggaattaagctgggaattgagaaagtacgcaatgggtatgtaagacgtggcacaatccataatctctaaaccaaggaagggaatgaaagaaccttctgaattttgtaagaccaatatgaggcatctaaagaaactgaaaacggtgtttgcagggaaatcagaagaatgtaagaaaggagcaaagtagaacgtgtgcattcatagaagtcatgatagacagaggttggtgcttttggttctgaactggtgcaagctaagcattcactcagggaaagatagattgatactggctctgagagaaatacaaagtttggggacctgggtcaccttcttgcgacctcctaccagcatgggagtggtagaaatacctctgatgagctaacaatgtagatttccatgacagatgccaacttctgagactgtgaatctagaatgctctgaagacttggctgagggatgaaggccacttactgtgatcatcgttcagggatgaagtaaaggacatgaaaactaggacattccttttgactagcatcagttatgaaaggtgaataagttcagcatgtctactgtacagtagtgtcactatagttgtaaacactgtatcatacacctgaaatttgccaagaagttagatcttatatgttcacaccacaaaaataaaaaggaaatggtaactacgtgggctaataaacatgttattcacaatggatatatatattagagcatcatcttccatacctgaaatagacacaatttttatttgtcaattacacctcaatacagctcgaaaaagtatttggttgatctggttaattattacaaaaatattcttatcttcaacattaaaattagaaattttctgaacaaaaacactaattctgggctgcctgctataggagacatattggctaaatgctttgtgtacactattattaattctttttttttttttttgagatggagtcttgctctgtcacccaggctggggtgcagtggtacaatcttgactcactgcaagctctgcctccctggttcatgccattctcctgcctcagcctctcgagtagctgggactataagcacccgccaccacgcccggctaattttatgtatttttagtagagacggggtttcaacattttagccaggatggtctcgatctcctgaccttgtgatccgcccgcctcggcctcccaaaatgcttggattacaggcgtgagccactgcacccggctattattaattctttaacaaactttcaaaacaggtattaatgttccctttgtagagatgaaaaaattgaggctgagagagttagtgtattgtcatagattagtttctcccagaagagactctgaggaaagcattccagtgaaactagtttattcggaagtgcagatcacactggtagggattggggaagtgatacagaaaagggtacactatcaagtcagtatcacagtcaccaactaaagcttaaactaaagggaaaactatcagaaatgacaaaaaaacacacagctagagttatcctacttcaggaatgaggaagctagagtctttataaatcagctctccagaatcattggttgagagtttttctctgtgttgcattcacaggtgacatgacttcttacagcagcaatacaagagctcttaggcacagagatgcagattctaacagatggaaattagtccaagcacactaagatctaatatatatgggtgcagtcatgaaaacttatctatgatctacaattagctccactcaagtaaaacctttgctacttaaatgtgatggacaggcacaagctctagaagaaggaagaagaggaggtgagaaagaggagtaagagaagggacagaagatgagtggaggacaaaagaaagaaagagagagagagaaagagaaaaagaaggaaggaagggagagagagagaaagaaagaaagagagaaagaaagaaagaagaaagaaagaaagagaaagaaagaaagagaaagaaagaaagaagaagaaaggaaggaagaaaggaaggaagaggaaggagagagaagaaggaaatgaaaagaaaggagaggaagtgagatgtaaaatgaaggccaatgaaataagctacacttactgctgctatagtacagtgcacctgagattcacagtctccgtttattaccaccagttctattctcccttcaccgctggccagcactcttcttggtctggataactgcctgataactgccttgataacttccttcctaaattgtctgagcctctagttactataccactgtccactgtgattgctgttcttaccgatttgtagttatcactggacatggacacactatgagattctccagtgttatgggttaatttgtgtcccccaaaactcatattcaaatagaatcatttaaagtgttatgtgataaggcaaggtcatattggaaacaattaggcctctgattaaatatgactgatgtctatataaaagggggaaattcagagacagcatgcatataacagaaaaattatatcaaacacacatggaaatgatagacatcaacaagtcaaggagagagacctggaacatgtacttccctcacaggcttcagatgaaaacaacattgccaaaaccttaatttctgaactgtgaaaagataaatttaagccacttggtttacagtaatttattatggcagtgctggtaagttaatacacttactaagtatcctgagctatagatatattctgctacactatatggcttaaagataattacccctcaccaaatagtaactcctttctctgtctgctgctctgctgacgggaagagtccaaaatgactaggcgataacgattccttttgattataacaaagaaacagagaagcaaatactataatttttattcacatggaaattttaaaaagccaaagtcatctactggattataacttgatagagtgattagctgtttggaaatgagtaagcggatataattgggagagaatggcattaatttctatttcctaacctggtaatggggacatagatgtatttacaatgtaatactatatcaggttggaaattaataatttgcattcttctcaagtgaatgatatacctagacaatgttttcaacatgttagaactccacgatgaatcaggtgtcatctcaactcatctaatcccttcattgaaaagaaatagaagaaattacttctacttacttcttcttctagttactgctagtaactaggtttagggctagagccacagcacatgctggttggcctgaatttcaacgcttacttctagttactgctagtaactaggtttagggctagagccagagcacatgctggttggcctgaatctcaagaagttacgtgatagaaagtcctccattctcatcccggaaatccccacactcccagacaagtcagaatgaatggtcgtcctagggcatacattgcttgatgctgtctaaatctcagcagatttctctgcatccacctgttctcgatctgctctgtcgcatggaacacactgtgcagtcaccgtcttcccaagtgacattcaaagaactgaaagacacagatgatgtgggtggcacaaagagatgcctgttagtcttgagtcagaatttggtgggtgaatagtcttgggcccaggcatggattcattttgtcactgtaaatatatcagcatcatgcttctccccacagacacttccaagtctatatacagccaaacatgaggctggccagagagaacttcctgagccccccggatcaacaggaactgtcacatgaccagatgatggtcagagcaggaatgatgctgatgatgagacgggcttccttttatctgaaacaaactttctatgagtaactcacaattaagaaacagattaaacccttagtttaaaaggttcataagatttcagtaacaacttcccctttgacaatcccaaatggactgtggaaaacaatgtaaacagcaacaaggaaaagtcctgctgattggtggaaactttggaggccaggtgtataaaaggtccagattgcaaggggtcatcagattttgggaaactcacctcttaacagaagcccaccctccatccctgacaccatgacccactgttgctccccttgctgtcagcctacctgctgcaggaccacctgctggcagcccaccactgtgaccacctgcagcagcacaccctgctgtcagccctcctgctgtgtttccagctgctgccagccttgctgccacccaacttgctgtcaaaacacctgctgtaggaccacctgctgccagcccatctgtgtgaccagctgctgccagccttcctgctgtagcacaccctgctgccagcccacatgctgtgggtccagctgtggtcagagcagctcctgtgcacctgtgtactgcagaagaacctgctaccaccccacaagtgtttgtctgcctggttgcctaaaccagagctgtggctccaactgctgccagccctgctgccgcccagcctgctgtgagaccacctgctgcaggaccacttgtttccagcccacctgtgtgtacagctgctgccagccttcttgctgctaatcaactcccaagagaactaccatcctcacacaacaaccttcagctcaactgacttgtcttttgagggactaatttactttgctgctgacagccaccatgctctcacccaaatttttatgaattctctacatgtttaaaatcttgggaatctgcttgagggagggcagaatacttcatcctcattccctctttccttacaccttgtggatcatgtgccagcttcgtctgttcttaatttggagtcatgatctcagctttgtctcaaaaatcaagagcttcattctttgcttctaaggaatttaggtttctgcaactgatcaatcatctttgcaattatattttcattttaaatatccttctcatggttcttgtatccttctttcttcttttcacgataactttgggttatgtctctggtagcagagattcttacctatatgtttctgaataaactctgaaccatcttcatctcatatagtgttttgttttatttgaaagcattcctgatatgggatttacacacatatcacataccataggtattatccaatttgattctcaaaacagatggtcgtgtattattaactccattttttcagctgagaacaatttaatgtgtgatgttatgtagctagtaaagggcagactctggtcaaaggtgaggtcctctctttctgcccaaggacacttacgtttaactcccaatatagtagaaaagacactggaagtcagcactagcaagacatgtacttgagtttatttaacaatgagaggaataatctgacatatttgcagataacacttttgttcacacacaaaaaaatcccaaagtagttccccacacctcagtgagcaaaggctgcatgatatgcatttaatggctgccctgaatgcagagatctttttgtctgagcctctgaccagccattcattcaattcatctgcatcaaaaaatgcttgagaatttattgtggactcaggagacggagcctcatctgaagaaacttattctcagtgtgatgtaaataaaattcttatacagcatcggtctcctgaataccaattgacaaagtaaatgaaactaagttattcattgtaaaatacagaccatacgttatgccacgttaagacaatttgtcccctacttgaagtgttatgagtaaaattatgtaagaacaaagctgggaattgagaaactatgcaatgggcatgtaagacttggcacaacccataatctctgagctaaggaagggaataaaaacaaccttccacattttgtgaggccaatatgaagaatctaaagaaatgaaaaacttctttttccacggaaatcagaagaatgtaagaaaggagcaaggtagaacttgtgcattcatagaagacataatagacagaggttggtgcttcgggtcctgaactgatgtaagataaccattcactcatgaaaggattgattgatgctggctctgagagaaattgaaaagtcggggacctggggcaccttcttggggcctcctaccagcaggggagtggtagaaatacctctgatgagctaaaaatgtagatttccatgacagatgccaacttccgagactgtgaatctagaatgctctgaagacttggctaagagacaacagccacttactgtcatcatcgttcagggatgaagtaaaggagatgaaaactaggacattctctttgactagcatcagttatgaaagatgaataagttcagtaggtctaatgtacagtaatatgactatagttaaaaacactttatcatatacctgaaatttactgagaaggtagatcttaaatattcacaccagaaaaataaaaaggaaatggtaactaagtgacctaataaatatgttattcacaatcaatatatatatcagagcatcaccttctatacctgaaatgtacacaatttttgtttgtcaattatacctcaatacagctagaaaaaaacgtatttagttgatctatttaattaatacaaaaatattcttatcttcaacataaaacttgggaattttctgaacaaaaaacactaattctgtgttgcctgctctatgatgggtactggataaatgctttgtgtacattattattaactatttaacaaactttcaaaataggtattaatgttcctcttgtagagatgagaaatttgaggctgagttaacgtatagtcatagatgagtttctcccagaagagactctgaaaaaaaattccagtgaaactagtttactgggaagtgcagatcatactggtagggactggggaagtgatacagaaaagggtacactattaagtcagtttcacagtcaccaactaaagcttaaactaaagtgaaaattatcagaaatgatgaaaaacacatagctggtattatcctacttcaggaatgaggaagctagagtctttataaatcagctctccagaatcattggttgagtgtttttctctgtattgcattcacaggtggcatgactttctacagctgcaatacaagagcccttaggcacagagatgcagattttgacagatagaaattgatccaagcacactaacatgcaagatatacgggtgcagtcatgaaaacttgtctacgatctacaactagctccactcaagtcaaatatttgctacttaaatagaatggacagccacaagctctaggagaaagaagaagaggaagagaggaagcagaggaagagaagggacagaagatgagaggagaaggaaagagaaaagaaggaaagaaaaacagaaagacagagagaaggaaggaaggaaggacggacaggagggagggaaaagagggagcagggaggaaccgagggagggaaaggaaggaaggaaggaaggaaggaaggaaggaaggaaggaaggaaggaaggaaggaaagaaggaaggaaggaaggaaagagatcgaaagaaagaaagaaagaaagaaaaaagaaagaaagaagaaagaaagaaagaatagagagagagagaagggaagggaagggagggaggcaggaagggagaaaaaggaaggaaggaaggaaaagaaagaaagaaagaagaaggaaaggaaaagaaaggagaggaagtgagatataaaatgaaggccaattaaataatctacacttacttctgctataatacagtgcacctaagtttcataaactccgttaattaccaagagttctattctcccttcacccctggccagcactctttttggtctagataactgctgatagagtagctcagagcatccttcctgaagggtctgagcccctggttactataccattgtccaccgtgattgctgtttttattcatttgtggttatcactgggcatggacacactatgagattctgcagtgttatgggttcatttgcgtccctcaaaatccatatacaaatagaaccatctaaaatgttatctgataagacaaggtcatattggaaacaattaggcctctgattaaatatgactgtgtctattcacaagggagaaattcagagacagtatggatataatagaaaaattatgtcaaacacacttggagatgatagacttcgacacgtcagggagggagacctggaacagatacttccctcgcagtcttcagatgaaaacaacattgccaacaccttaatttcagaaaagaggccttcagaactttgataaataaatttaagccactttttttcagtaattcatcagggcagtgctagtaaattaatatactcagtaaatctcctgagctatagatatattctgctacactatatggcttgagggtaattatccctcaccaaatagtaactactttctctgtctgctgctttgcttatatgaagagtccaaaatgactaggcgataaagattacttttgtttatgccaaagaaatagagaagcaaatactatactttttattcacatgaaaattttaaaaagccaaaagttacctacaggattacaactgatagagtgattagctgtctttgggaaagagtaagagcatataattgggagagaatggaattaatttctatttcctaacatagatgtaatgggacataaatgtatttacaatataatactatatcaagttgaaaattaatagtttgcattttctcaaatgaatggtatacctagaaaatgttttaaacatgttagaactccatgatgaatcaggcatcatctcaactcatctaattccttcattaaaaagaaatagagagagaagacatgatgcttactgtgctggtaactgggttgcagctagagccagagcacatgctggttggcctgaatctcaagcagttatgtcatagagagtcctacattctcgtcctggaatcgccacactcacagacaagtcagaatgaatggtcactcagggcatagtttgcttgatgttgtctaaatcccagtgaatttctctgcatccccctgctctcgatctgctctgccacatggaacacactgtgacagacaccctcttcccaagtgacgttcaaataacggaaaggcacaggtggtgagggtggtacagagagatgcctgttagtcttgagtcagaatttggtgggtgactagccttgggcccaggcatggattcattttgtcactgtaaatatatcagcatcatgcttctccccacagacacttcccagtctatatacagccaaacatgaggctggccagagagcttcctgagcctcccagatcaacaggaactatcacatgactagatgatggtcagaataggaatgatgctgatgatgagacgggcttccttttatctcaaacaaagtgtctatgagtaattcacaattaagaaacagattaaaccttaatctgtttaaccttaaggaaacaactaccctttgagaatcacaaacggactgtggaaaacaagataaacagcaacaaggaaaagtcctgctgattggtggaaactttggaggccaggtgtataaaaggtccagaatgcaaggggtcatcagattctgggaaactcacctctgaacagaactccaccctctacccctgacaccatgacccactgttgttccccttgctgtcagcctacgtgctgcaggaccacctgctggaagcccaccactgtgaccacctgcagcagcacaccctgctgccagccctcctgctgtgtgtccagctgctgccagccttgctgccgcccaacttgctgtcaaaacacctgctgccagcccatctgtgtgaccagctgctgccagccttcctgctgcagcacaccctgctgtcagcccacctgctgtggccaaaccagctgtgggtccagctgtggtcagagcagctcctgtgcacctgtgtactgcagaagaacctgctaccaccccacgactgtctgcctgcctggttgcctaaaccagagctgtggctccaactgctgccagccctgctgccgcccagcctgctgtgagaccacctgctgcaggaccacttgcttccagcccacctgtgtgtccagctgctgccagccttcttgctgctgatcacgttccaagagaaccaccatcctcacacaacaaatttctgctcaactgactcatcttttgggggactaatttaatttgctgctgacagccaccatgctctcacccaaatttttatgaattctctacatgtttaaaatcttggaaatctgcttgagggagggcagaatacttcatcctgattctctttttccttacaccttgtggatcatgtgccagcttcatctgttctcaagtttgagtcatggtctcagctttgactctaaagtcaagagcttcattccctgcttctaaggaatttaggtttctgcaactgatcgatgatctttgcaatcttttttttgttttcaatatcctcctcatcgttcttgtatccttctttcttcttttcatgataaatttgtgttgtgtccctggtagcagaaatccttacctatatgtttctgaataaattctgaaccatcctc

SEQ ID NO: 1391 - DNA, 96 bp, Homo sapiens
gctgagggtcctgactgttagaaggaaaactaacaaacagaaaggacatccacaccaaaaccccatctgtatgtcaccatcatcaaagaccaaagg

SEQ ID NO: 1392 - DNA, 161 bp, Homo sapiens
cccacattcatttagccttgaccagatactattctatatgaggcagaaaggtagactagatgacttctggtcatcctcccaggtctgtttccatgaatcttgattctggggtttcttctaagtcctcatgctaaactcctctgcagcttaggatcagcacc

SEQ ID NO: 1393 - DNA, 161 bp, Homo sapiens; identical to SEQ ID NO: 1392

SEQ ID NO: 1394 - DNA, 3617 bp, Homo sapiens
agggctcacgtccccgcgccccgagcggccacttagcgccgtcgccgccggctttcgacggcgagctggatctgcagcgatactccaacgggccagccgtgagcgcagggtcgctcgggatgggagcggtgagctggtctgagagtcgtgcaggcgaacggcgcttcccctgccctgtatgcgggaagcgcttccgcttcaactctatccttgctttgcacctgcgggcgcacccaggagcccaggccttccagtgccctcactgcggccaccgcgcggcgcagcgggctctgctgcgctcgcacctgcgcacacaccagcccgagcgcccacgtagtcctgctgcacgcctgttgctggagttggaagagcgcgcgctactacgcgaggcccgactggggagagcccgaagctcagggggcatgcaggccacccctgccactgagggtctggcgcggccccaggctccttcatcgtccgccttccgttgcccctactgcaaaggcaagtttcgcacctcggcggagcgcgaacgccacctgcacatcctgcataggccctggaagtgcggcctgtgcagtttcggctccagccaggaggaggagctgctgcaccacagcctgacggcccacggggctcccgagcgtcccctggcggccacctccgctgcgcctccgcctcagcctcagcctcagcctccaccccagcccgaacccagatcagtcccccagccggagccggagccggagcccgaacgtgaggcaaccccgaccccagctcctgccgctcccgaggagcccccagcgcctccggagttccgctgccaagtgtgcggccagagctttacacagtcttggtttctcaagggccacatgcgtaagcacaaggcctccttcgatcatgcgtgtccggtgtgcggccgctgcttcaaggagccctggttccttaagaaccacatgaaggtgcacgccagcaagctgggcccactgcgtgccccggggcctgcctccgggcctgcccgcgccccccagcctcctgacctcggcctgctggcctatgagccgttgggcccagcgctcctcttggccccggctcccaccccggccgagcgccgtgagcccccgagcctcttgggctacctgagcctgcgagctggcgagggccggcccaacggcgagggtgctgagcccggtcccggccgcagcttcggaggcttccgcccgctgtcctctgctctcccggcccgggctcgccggcaccgtgcggaggagcctgaggaagaagaggaggtggtggaggccgaggaggaaacctgggcccggggcaggtcgctgggctctctggcttccctgcacccgcgcccgggtgagggaccggggcactctgcctctgctgctggggcccaggcaagatcgaccgccacgcagggtatgtaggtaccctccgctctccgggtacgccgcgtcctcctctgactcttacgccgccactccctcgtagcttccttgttaaaagaacttacgtttaatttctcctgagtttttttgttttgttttgttttgttttcctggaggctttgccatcatttgagaacacttaactctttagtcacaacaaatctaacccctcagactttgtttcctcctggaccccgaggggaagcagccctatgggatgggtgtggggtgggtgcgcggcacctggacagggtgtgggcccccctgacttcctcttaacgtatgtgttgcagaagagaatgggctgttggttggagggacccggcctgaagggggccggggcgccaccggcaaggattgtcctttctgcggaaaatctttccgctcagcacatcacctcaaagtgcatctgcgagtgcacacaggtgagggaggcagcctccggcgtggagaggggactgggggcgggcagaaaggtgagggctaccgaaacactaggaggtgaagtttgttccgaagccttcagtttggctggatgagatcacttgggaaacgctcctttattaaatcaaagtgggtgggagacgcagtgccctttcttggttctgagaatgaggtctgtaaattgggcgaaattcgggtgggtgcgtgcagtcatcgtgaccccgtgaccctatcgcacccactctccccaggcgagcggccctacaagtgtccgcactgcgactacgcgggcacccagtccggctcgctcaagtatcacctacagcgccaccaccgggagcagaggagcggggccggccccgggccacccccggagccaccgcctccttcccagcggggttcggccccgcaatctggagccaagccgtctccgcagcctgcgacctgggtggagggcgcctcaagtccccggcctccttctagcggtgctgggccggggtcccgtcggaagcccgccagccctgggaggaccctgcgcaacgggcgaggcggtgaggccgaacccctggacctgtccttgcgggcagggccgggaggcgaggccgggcctgggggtgccctccaccgctgcctcttctgcccgttcgccactggagccccagagctcatggccttgcaccttcaagtgcaccacagccgccgggctaggggccgccggccaccccaggctgacgcgtccccgccctatgcccgagtaccatcaggagagacccctcccagtccttcgcaggaaggggaggagggctccgggctgtccagacccggagaggcagggctgggggggcaagaacggtagtgggccctcaggggcgattagcttagtgagcttaccccgccggagcgggggagcgctagaggtagttgggtagagaagccagcagggggcagcgtgggacccatatcccagccccaggcggaccagaggtggaaggcgcggcgggcgtaggagggtgggctggcggtacccacccagcccaagggagtcacagtgccttagaagtggcagaggtgagggtcaaagaacggggtccctgggctggcagagaaggtttgtgtccctgttgaggagccactctgccagtctttgctggtccataggcgtgagagtttatttttgtacaaggggtgagggtggggggcactgtacccttctagccccatcaggggccctgtagacgtcgctatttttggtacgattcctgtcatccctattgcagagtcgtgtccccaataaacaggtgtcttgaggcacagggccctgtgtctgtctgcctacctatgtcctgcttccctctttgggtccttctgtcaggaaatagtcacctcttcagacacttagttatcacccaaagagtttgataagaaatgcagaatattgggttttacccccaggtttcgatgcagtagctctgatggggcccaagaattagcatttaacaaacagccaagcaagttctcacgcactgtggcctgaggacctcattttgagaactgctggactgtgctggatcccagtttgtctgtgaccagttcagcctcaaggagtaggtgcagtgtgggagaaggagcttcagagagtgtgtggaacctctgggagccactgtggaggagacacattctcccaggctcatacacagtcagctagctctgggcctg

SEQ ID NO: 1395 - DNA, 2598 bp, Homo sapiens
ccgaggctcacgtgggtgctaagactgacttttctagggtcagctccacttaaagggacttagggctggctacatgcccctctttcccaaacccaggtcttccagaactttcaaaatcaaaatcggggttgcgttaggacatgcctctgggataagattccccatggtgggatggcagcaggtgagcaggtgtgccttcctctcgcctcctgctgtacctttgaagtccatggctgaggttccatgtccctaactcaggagagtgaggacagagggaaggaggctttaccaagatctcagtctaaaaaggctggtgagctgcagagtggagcgggttaggaggagctatctgagcagtgaggttcagagggccatggagaggagaccataaaagtgaactactggtgtgtctgtgtgatcaaggtagtcttttgaacgtagaccgccctagaagctccctttccttttaaccccatctagtgcagtggtaatcataattgttagcagatttgggaggtctaggattctcaagagggaaaaccatcgtgttagaggtgaccagaggcagttacaactggaccccagaagtcctgaacccttgctccttacactttgaccctaaaaacttttgaatcacaagacttgagggacagtctttgtggtccatttagcaaatacttctatgtacctgtccttgttgtttctaagtcttttcaccaaccattccatccttctctactgagtaaggtttagtggtccacacccacttccctaccagctgccccagcatgtaaggataattggcctactgcttttgaaaggtttctgatatctatccctggccccgcatccttatagaatccaaataagggcaagataacccctgattcccagtgggggtggaaagtaggtcagtgctgctgtctggccaagtctcgaggatggtgtttaaggcctgactatagaaaactctgtgattattgtccaggggcaatatatgcatgacctcggttccaaggcagttcatagtatcccagtccctgtcagttctttcccctactgagaaaaaaatcatgggatcaggtgtctggaacctggtttgatatggagatgattcagatcttcattgggcctaagaaggtatctcagtgagttttgttgattttaggccaccttctggggaaactttccgtgctggggaattcagcttcagtttgggccttcttgtatatcactctatttctgttctggaaactgctatgtgcaaagtggtttattgttgttttgttttgggataggaagctttgcccttttctgactcttcttgcctcagatatgaggccagcttcctaagagattttgcttgctatcctacagacagttttaggggccctagaatcttctcagaatgagagtatgtgcccataggttagtcagctatgaccatgcagtattcccagcccccccgccccacgcctccaccatctgcttcctctgaatataccagattggctgtacaccaggatgttccgggaatccccaggagagcaacagaatgtgatggacccaaatatgatgcctcagtaactcattccaggatgtacaaactgtaactgtcaggatgctccttatagctaattaaaattcttctagttacatctattttctattagctctttctattttcagtgacatctaaaaggccaaaataatccctctggtaccactgggtttttttctatggttttcagataggaacgaaaaaaaaatgctctagcttttctgtgttgtatctgcgatgctaaaatggcaaacagcccctctagcacctcatagctctatctatggtactgaggtggcccaagtggcttctgtggtagcccactgcactctccatggtactgaagggatgaccatttgttttaacatctctctggggtccaaaagagtcctgtgacttagaatcacaaacttttttcgagcaggaagggactaacactataaattagtccaatccccttattttactgatgagtaaactgggaggttaagtgatttagtaaaggttgtagggttatcaatgttcagactaggcctacaatagccttgtacccttcagtcctattctaattcaccttttgtgacactattcagtaagcctggctaggctcttagtcccaggaaaggatccagaggatgagagtgggtgccctaatttgaagctacagaaatacacatattaagtggtagtggaggtcgtctagtgacccttggacaaggacactttgttaattaatcatctgctaataataatcctatagcccagattccacatgtaacaggtacctgccccttcatggagttttaccacatccactaaatgtcaaaaattaaagaagccttggacctccagagccttttctctctgctgacaggcaggttgactcctggcacagttcttttctattaaagatccttaggcaaagtaatgcttgcatctttttctttctcagtaacccatttcagttttgtgatgcctattgtaaggaagttctttatatctcaaatatcctttcttagacaaaaaaaaaaaaaaaa

SEQ ID NO: 1396 - DNA, 3617 bp, Homo sapiens; identical to SEQ ID NO: 1394

SEQ ID NO: 1397 - DNA, 2598 bp, Homo sapiens; identical to SEQ ID NO: 1395

SEQ ID NO: 1398 - DNA, 6202 bp, Homo sapiens
gtccccgctgcgcccgctgctgctggccctggcccttgcctccgtgccttgcgcccagggcgcctgccccgcctccgccgacctcaagcactcggacgggacgcgcacttgcgccaagctctatgacaagagcgacccctactatgagaactgctgcgggggcgccgagctgtcgctggagtcgggcgcagacctgccctacctgccctccaactgggccaacaccgcctcctcacttgtggtggccccgcgctgcgagctcaccgtgtggtcccggcaaggcaaggcgggcaagacgcacaagttctctgccggcacctacccgcgcctggaggagtaccgccggggcatcttaggagactggtccaacgctatctccgcgctctactgcaggtgcccggccgcccaaagctccgagcccaccccaggcccaggccccagctccgcataagcccccacacccaccacccaagccccgaggctgctccacacccctgagctcccgactgtaacagggagcaccaggcctccctagaaccagtcctggaggcccccatctcagagtcctcacccaaaccaggtcctccttctcctcacccccagcacccggtccccactccacctgcagcccaggcccctgggacggagatttccgccccagctctgagattcagagccaaccctccaccttctggaatcttccgcctacccacccgcccacagctgtacttcccagagagggctggctaattctggggactgagagctcctagaccccctcaccctggagtccccagaaccaaagccagcccccactccccagatcatcacatctcaaagctcccagactccaaaactaacccagacctcaagactccagactcgattataggaacacccagtgtagccttcatgctctccactcccctagaccctccagaccagcctcagccctaaaatcagtcccacagcccacccccaagacccaaccctggaggtccctgaggccaccttgcactcacagacctgggacctagatccagcggtgacaccctcccaaaccctccccagccactcctgtcccccaagagctccaaggagcccccagctccaaactcccaggctaggatccctggttcctgaacttggagcctcagacccagactccccagcccccacccagtctcaggcttctagaactcaccagactctgggtctctgagagcccctggaaggaattcttgattacatttcaggtgcagctgatgcattgctggtctctcatctgcagcttccacagagtgccaagcccctcactcagcccatccctgggctctgctccggggccccaagacccaggaggaggagcgttctgcctgccccctcccacctcccctgcaatacagcctttgtgcagttgtccccgtctgtcatctgcttgtccctgggatgcaaggaccgggtgggatggaggagacagcagggtggttgggcctgggtcagcccatacccaggacaatgccatggataaggacacgccatcgactcggacatggttttaggtgtgcacgaagacacacgcccacagaaggacatgtgagtgaactgcaggggaaccttgggctgattgttaaatatgaaacatgccccatccttttcagtaatagcccttccttagccctggtgtggtggctcaggcctgtaatcctagcactttgggaggctgaggtgggcggatcacctgaggtcaggagttcaaggccagcctggcaaacatggtgaaaccccgtctctactaaaaatacaaacattagggcggggtgcggtggctcacgcctgtaatcccagcactttgggaggccgaggcaggcggatcacgaggtcaggagattgagaccatcctgggtaacacagtgaaaccccgtatctactaaaaatacaaaaaaattagccaggcgtggtggtgggcgcctgtagtcccagctactcgggaggctgaggcgggagaatggcttgaacctggaggcggagctggcagtgagccgagatcatgtgacagagcgagacttcatctcaaaacaaaacaaacaaacaaacaaacaaaaaaaccccacaaacattagccagaaatcgcttgaacctgggaggtggaggttgcagtgagccgagatcgtgccactgcactccagcctgggcaacagagggagcactctgtctcaaaacaaacaaacaaacactcttccttgagccgtttctggcctccaggggcctccggactccctccatggttcctgcaggggacagcagggggccttctagtacccagccctgcactagggctaggatctgcaagtgatcagatcaggacttagaggttgataaatgcttttaatccccacattccacacacgggggacgctgtcattcacattttcatatttctgttctggtcgcagtctgtgtcctcaccaccctcatgaatgagggactttgatagatgcctgggtttgtgggctctgcggtagctggaggagatacacaaagggtcctcggaggagggtgtgggacagctttgaggggacaaccactgcagacacctggagggagctaggggagattctgagacttaagagacatggaatggctgggcgcagtgactcacgtctgcaatcccagcactttgggaagccaaggtgggcagatcacttgaggtcaggagtttgagaccagcctggccaacatggcgaaatcccgtctctactaaaaatataaaaattagtcgggggaggtgctgtgcacctgtaatcccagctacttgagaggctgaggcaggagaaccacttgaacctgagaggtggaaattgcagtgagtcgagatcgtgtcactacactccagcctgggtgacagagtgagatgccatctcaaaaaaaaaaaaaaaagtaggtaagtggagatgctaaggggagatgtgtgaagagatcagaggtcaaggtcagttcagaaggaccccgggatgtgaaggtaatggaagatcaaggatcggggcggttaaatgggacaggaactgagtgaagtgaatggcttcattcccctttcaacacacatttgctgccacccactccgttcacagccctgggctgggtggtgctggcaacacagcagtgagcattcagtttcagtgaagttcaaagaagcagagaccagccctcagcatccttgggcacaggtgtctatgcattctctcaacagagatctacaaagcatctgtgccagagcatctgtcgggcactgaatttacaaggagtggctccgccctcatggggctcagacagtgctgggaaaatgctggagtccaccgcttaagggtgtgtgaagctgtccatcaagtgagaagccaagggccagggagaaataagaggcctaggaggtgactaagagttggggctcctaaaggtcagggaggtgctgtggggtcaggacagaggagccagccagtcactcccggagctgcacagacacggaggagtcggtcacccgtgtccgccgcagcccaccaggctccatgcggttcttggccttgtgcaggaagtggataaagcgcacaccgggaccataatggcggaatacgtgggacacctgtggtgacagcacctggggttagggaggagccctttttgaggacccgcggacctgttctcctccctctgtgaggtcttgggacaagaacacacgtctggggttgagggccccggcgcggagagtctcacctggacccagcggccagggggtcctctcccagaagttcggggggccacgtggtgctgagcaatgaccgtgcggcggtcggccgccagcagccagacatgcagctcatagacgcacgcatccagccggctgtcctcgaacctgcaggcggagtcaaggccttcagctgtcactgcagtctcagctacccagccccagcccctggccccattccccattcaacacacatgctgctacccatgctgtacacagccctgagctgggtggtgctggcaacatagcagtgaccaagacagccccacaccctgccacatgggattcacagtccagtgagggaggcaggcatgccaccaaacatgacagccaggaacggccaggtttgggatggggagcacgggcagaggggtcagggccaggatggggggacccaggcagaggagttggggacagaactggggacacaggcagaggggttggggtcggaattggggacccaggcagaggggttggggctggaattggaggcacagggcactggagaaaatgcacgtgacccagctgaggggtgatcagggagggcttcctggtgcagccatgtggaagtgactcctaaggaataagaaggaattggtcttgagaatagagggtgacaggcttttaagaaataaggaataggctgggcacagtggctcacacctgtaatcccagcactttgggaggccaaggcaggcagatcacttgatgtcaggagttcgagaccagcctgggcaacatggtgaaaccccatcgctactaaaaatacagaaattagccaggtatggtggcgcgcgcctgtagtcccagttacttgggaagctgaggcaggagaatcgcttgaacctgcgaggcagaggtagcagtgagctgagatggcaccactgcagtccagcatgggcgacagagtcagctgtctcaaaaaaaaaaaaaaaaaaaaaaaagaaagaaaaaagaaaaaaaaaagaaaagaaaaagaaataaagatcagcctcagtaaccccctggcacatttcaaaatctgaaaggctcaaacagaaggggccagggaggtgggcagggcaggaccctgtagcaccaggagggtcttggtgaagggctgaaagcaaggggagctcagagtaaggctcatgctctgggcagccctgcgcgatcacggggtcaggctggcaggggaggggcacgcaccagtccatgaccgtaatggctggttgttcgtcatccagcagctcctcccacaggccctcggccagaaggtccacacactgctgcttcactgtccagctgtgaaagaagggccgggagaggcggggtctgcgatctgccaggatccagggagcaggaagccctgtcttagtgctttcttagggatagcttgggtccccacacgtggggtgctccctcagcaccttccactctcagttcccacgggcccctctgagggcaatgcatcctgaaccccatgctacagacaaggaacctgaggctgaggatggagacgtgtccaaggtcaagcagcaaacatgtggcagagccaggatcccaaccctggcctgtgtgaccctgagcctccaagtcacaccagctcatctactgtgcaggagcaaggctctgtttcatggaggacaggggcctggggtgactcttcccctcccagggaaagagccttagaataattacaacaataacaagaatagccaggcgcggtggctcatgcctgtaatctgagcactttgggaggctgaggcaggcagatcacttgaggtgaggagttcgagaccagcctggccaacatggtgaaactccgtctctactaaaaatacaaaatgagctgggcatgatggcgcacacctataatcctagctactcaggaggctgaggcaggagaattgcatgaacctgggaggcagaggttgcagtgagctgagattgcgtcactgcactccagtctgggcaacagagtgagacttcatcttaaaaacaaaaaccaaaaaccaataatagctgctattgactggtgctagccagacctggccgggccctatgctgtgtgttttacaagcattctctcttatgctaaccctgtttacagagcaggaaatggaggtccagagaggccaagtcagtttctccaggtctcacagtgaggaagggtggagcagggaatggagtgtaagccacactggccctggcgactcacctttggttctgctggagcttttcagttctaatgtaccagccacggaaattgcctgcaggttggggagcaaagggttaggacaccccaacgctggaggaccctccccaccctcagcaacctggccctccaagcacttacccagagtttccaggggtcgctgggtgggaccagtagggggtgctggctcataaatgttgatgcct

SEQ ID NO: 1399 - DNA, 257 bp, Homo sapiens
cactcacctgggccttccaaagtgctgggactacaggcgtgagccactgctcccggcccttgtttcatttctattggctgattggtaagagctcattttatatgataggaattgagtctatttttccctggatgggtttgtgggttttgttttgtttttgctatatgacagtttttacagttttatacagctcaaaatctataaaacaagattgaagttttatagattgaagatttccaaccttagttaagaaagtc

SEQ ID NO: 1400 - DNA, 566 bp, Homo sapiens
cgaagacccccctcctccccctccccactctgcagagggggagtggatggatgagctgaggtgcaaagggaaggtcctgcctctgccacttccttctctgtcctcacctgggacacccccttggggccctgacacatactgtccagaaaaccaaggtgaggagagcagagagacacccaaaaccagagatgaggagcctcagagatgggggaccccagggaggcacaaagatggcagtgagagggaagcagtgatcccaactgggtgttctgggggcctgcacccctgcctgggactggggtggggggctgcagaagcctcccccatcagaggtcacgaggaggtgggagcaagggacggggcacaggtggggacaggaggtcaggtgtggaggaagtggggtggcagaggaacctgtagcgccagattcccacagccacttcctgcccgtggccacatccctctacctggcccaggtaagctcagcactgagcgcttgcttctctctctctctctctctctgatggagtctcactctgtcacccaggctgaagtgcagaagcacg

SEQ ID NO: 1401 - DNA, 1196 bp, Homo sapiens
aaaacttcaagggcttaaaaaagtatctaaaaattcactgaattaaaatgaattatgagaacaaaactgggactaattgagatctctggctaacattggatctcgatatcctgtcacatattgatatatggccatcctagtcccaaatacaccatctcataaggcaaaatagtcacatgctatttgcttaagatgaattcttctgatgcctttagcaatacaaacttaaggaactataattttatttttaaatgaacagagatgactagtgatttaaagagcaaattcacagattccatttttcatgaaattggtggggtcattacaagggcatggctaaatccagatggtaaactcttggaatagggaaacaaatcaaggcgtctcattctgaagtgctcaccaaactgacccgcttggctggcaagccatcctccagccctctctgaggccctgggtctacacagctcccagagtgtggctctctactaacaagaacaggagaggaggcaggagggcagatcagagcgcctctgggggaaatggccgagctgcaggcggtcccagtgggggtggccaggcacactgtggcttgtgcaaccacgtcagtcgggaggagagagacttctcatgaaatcccaagcatcaagccacagcccccgccaggcaggcctcggtgctgtggttgcactggtgatgaggtgagagcagggtatgggacatgaggagctgggtccctggccgtggtctgggcgatgaatgagggtgggctgggggcagagcaaagctctgtgtgggggcccacctcaagggtcagctgagggcctggacacccaaccttgtggcagccaagattgatgatacagtcgaagtcactgctgcccatcgattctggttagaaccatctgagggcctggggtgcacccagcctgcaggagagcccagccatagaggctgctgccggagatggggccaggaagccatcgaggcctctcagccttgggtctcaccccagaccctctggatcgggtggagggtggagtcatcacacattgtgcagcttcgcagggattaggatgcagcccaaagtctgagaacatggctctaatctttcttcaaagagtggatagtggatcttggggtggggcctgcctctctcctggtaaagcttataggcttgggaggcaggatcttga

SEQ ID NO: 1402 - DNA, 8879 bp, Homo sapiens
tcttctgtctgcactggtgaggtgcagtgaaggtttcctctcaatgagtcagtccagttggaaacaaagattcttttagatgtgtcaacctgaaagaaaacagcgtttcaaaatttgattgctatgtgattcccccaaacacggctaacagcttgtctttctttcagatatcatacttgggctacctgctgctgtttaactacgtcatcctggtgcggatggatggctggccgtccctccaggagtggatcgtcatctcctacatcgtgagcctggcgttagagaagatacgagaggtggctactccaaaggcctcccccagcccactaaccgctgactgcaaatgcagatatggctccttactgaaaaaacgtttcatgcaaattatgcatgttgggccaggcgtggtggctcatgcctgtaatcccagcactctgggaggctgaggcggatggatcacttgaggtcaggaatttgaaaccagcctggccaacagggtgaatgaaacactgcctctactaaaaataaaaaaaattagccagtcgtggtggtgcacgcctgtaatgccagctactagggaggctgaggtgtgaggatcacttgagatagcagtaattcgaaaccagcctggccaacatggtgaaaccccgtctcaactaaaaatacaaaaattagccggtcgtgtggcagttgcctgtaatttcggctactcaggaggctgaggtggaaggatcacttgaaccctggaggcagaggttgcaatgagccgagatcgcgccactgcactccagcctgagtgacagagtgagagtccatctcgaaaacaaaaacaaaaaaacaaattacacatgctgtgggactttttttggaggtatcacaatcccaagtttattccatttctttatttaagatgtatacatcttgaatgaacttgaacttgcaaatcaaaacacaaggcaaaataaagatatttaataatgaaaacaggtttgaatgcataggaaagcatcagcaaatgctgccagcgacctgagataaaccaattaccgcaactgggcacaaattttggcttagttatttgggatcagagggagaaagagagatacaagagacacttgcacagtgtggtccaaagcccaaagttacaggaaaaatgccatctcttttatctctggactcttgtgcaggagatttatgaagggagggctcccagtcaggaggaaaaggagctaagtgaggtgtggcttcaggtggaccctgtccttggcctaatcctgtagggggctctgagtggactggacactgtggagtctgtctcacctttgggccccacctcaatttgtcattggtacccaccagagacatggctccaagcatctaagagcaagcctcccagaagggggcaggtgtgggcctaacagcagcacctgcagcagatggggtgggcaagcccacctggggaaaagctccaggggatatgggaggggcctagagcgtttgctgcaaacagagggaacaggattttcaactcagtattgcaaaagaacagataccatctcacatatgactcgttatcccagagagctcgagtgaaaatgtaactcccagtaagcaatctctgcagacagcagaggaaagataggccggatacttccctttccaatatcattcagaagttttaattcactaaatttgcttataaagagaaagcatgtatccaagcaaaaaagcaacttgagctgaaaaagcccacagcatcatttcatatcctttctccaactgatatacaaccaatactattattttgcagtaattgttgaccctttcactgaactgaaaaacattattaacctagtccagatagagggaatctgatggcatcggtctaattagagcctgaaaaaccaaaagagcactgaatccaaaattatacttgccaccttctactactgttccttttctagctgggcctcattcaaattctgcaggtgctgcaactggtatttcctgagcggcctgctttaccatcgctgtgccgtcctggccttgctgagggtccaccatacaccgagacactgttctttattccagaaacctgcccccagttataggagagagagggtggccatcggctagtgtgcatgggttgttaaactagtgaatcccttctgtgtgggctgacagatagccactgccccatcctaccacagagatccccaagacctctgcaactgaaggggtaccacctggcatggcaaccctccatcccagtgtggtaccacagacagctgtgccattgggaaggctctgcgcacgcctgtgcatgctgcttgctaaatatcttccattttactctgtggaagtctccccttaagcagcagtgattttgaaaggataatatctcaagtaggggaaaacctggtctaactttcccctaatttctcatgtctaagttgcaaaggaattttgccaaatcaaaacatttcctagtggtattctgccatctccactgggtggactgcccctctgtggggccacgtggggctcatctatgctctagagttttcatcctgtgtgactctggaatgtggagtaacaggcacgtgtccagataattaaaaaagaaatcaaaatgcagctgctttaattacagccagaaggacataatttagaaggcatttcctgagtttgtaaaaccctgaatctaagaatagggaggattccgtggaatttccctttctagatatctctccctgcctgagaagaagagtgtttaaacgttttgagtaggaaaggggccagatgacctggaatgttccatcagtcttattgttccaagattctaagacaagacttctaatacggcatctcagtttattgttctttggggtttgttttcagatcctcatgtcagaaccaggcaaactcagccagaaaatcaaagtttggcttccaggagtactggaacatcacagatctcgtggccatttccacattcatgattggagcaattcttcgcctacagaaccagccctacatgggctatggccgggtgatctactgtgtggatatcatcttctggtacatccgtgtcctggacatctttggtgtcaacaagtatctggggccatacgtgatgatgattggaaagatggttagtagtggcatcctgtgggtatccagagagactttggctgtagttaggacataagaacaggccttgggcatggcttccttcaatttcatttggtttttcttttgcagttggctttttaaaggaaatattctttgctttaagatacacagttctcctacatgttgataacttaataaaatccaatagaaaaacatgagttgagggcctactgtgtatatatacataacatatatacatatatagtgtatatacattcactgtatatatgtgtgtatacatacacacgtacacatgtatatctctctcaatatatatcaggtactcaatatatactgtctcccttcttccataccatatctcaactgtagggtgactaattacgtttgttttttattccttctgatttattattaatgagtctattttgacagcaatataaaagaaaatagcctcgtttttttgtaagagcttacttcactttcccaggacataagagaacatcaatttttgatgcaataggaattcagtagcaaaatagatgtctcaaaatatttacttcttgatggctggaaacatattttcagcattctttagtacagggacatggatttgatgttctatgagactacatccacttcagaatgtatatatatatggccaaaaaaaaaaaaaaaaaaaaccccgcctgatttataacctcctaacatgtggtagaagccggagacaaagggagcccagggccaatccccaacctgtactccagatgatcttcagctcatttactctggcctggagtgaacacaggaagtccatgtgattagaccatgatgacttatactccagaacaggccagagaatatgaaactgaaaatgaaccagcaggtcatccttacattacctaaaagagcttcagtgttaggactggtacaagaagaaagcaagcctcctacatttaggaaggactctttatagggcaagtggttttgagctaagggaagtatgctttagtaaattccagcaagggcctccatcttcagggatgttcaaaattaggaattataccagtttagtatccacagtaaccagggcattgctcagcacttgtgtagtgaatgaataaatgttggtctatactctcaattcattatcgttttatttccttaggtatctgctcctcttcctccttagcatcccttacaaactcccatcttttcttctaattcttccctttctccatttgcagttgtagttactaagggacatgtgtttatgggcaacaacagagaagaagcaagaaggatgaagagcagatgaagatagcaatgttctagaagacattctaggcataaagcattgcatggagtaggaaaaagccttcccagggatgggaagaaaggaagggaaagaggctttcttcgtcctaattaagcactcgtgaagtgcttaattggagacagcaatataatgagccagggtgaacttggcccacaagccaagacagtgagagacaaatgttctccttactcagatgatcgacatgctgtactttgtggtcatcatgctggtcgtgctcatgagtttcggagtagcccgtcaagccattctgcatccagaggagaagccctcttggaaactggcccgaaacatcttctacatgccctactggatgatctatggagaggtgtttgcagaccagatagaccgtaagagtagaattcatagtaagattctcttccctgcttctgaggcagatgatcagttccaaattaatggaagaacatgtattaatttggaaataaaaaatatttgtcactccaccataggcatcaaattattttacaaagaaataagaacaaattatggaacatggattttcagacatcagtcatttcttttattctaaaaataattcactagaattcccttgagctggacctgatggacatcgtgtcacatgaatgcagttctaatgccaatagcctagtttttcttcaacccagtatctccccaccccaggataaggctgatagtgttttccagtagaatgaactagtgaacagagcagagtaactgatacttcccaccatcctcttcttaaagccatcagagcccattttccacatagctacccatttcatacccatttcatcttcactactagagtgctattttgtattatcaaaaataatctggatgttagtagaggaaatgggctatgatcctgcacagatttctggggaatgtaggcccagctcctctgcaggctgagctggtgtcttctggattgaaggaatgtaaagctcaaatgttcttgtacactatttaccaggacagttgaataaatgttccaccagtgaaggaggcacttttagtcccatttccatttcaggaccaacattttcatttgcatgttgtgatttatcataaagcatcagctataatagcatgtctgctgcttccagagctctgctatttgggaatagaaagtttttatcatcttcctctcatatggaatgtagggctgtcagtgtatatctactgcctctaggttagacaataaccagctcatgcagtagcttctttctaacttttataatgtcattctgaccatatcattattgcaagtatcacaaagtcaactattgaagtgtgttagtagcttggtaagccagaacataaaaatctaatttgatttcaaaagaatattagtttaggtagatatacatacacgttaaaagttcctgaattccaggcataaactgtagtatttttattgttgagctcttttttttttaaattaaattgggttatgagagaaggtaaagaggtaaactttaggctgtgctattctcagtaacataattaaatgtaggtttttgattcttgatctattaactaataattttgtagttatttgtgcttatgaggtgtttgtgttggaatatagggagcgcgtgattggttaacctgatcatctgccagtaacatcatgtctttttcacagtatttttaactagtgagcttttgctctcgcttatgacacagggtaaaataaatatccatgatatatattttctagaatgattaatgtatgtaattcttctaaacagatcactgtttctaagtgtgaatcaatatttcccaagcttaaaatatttgcatttcttcacagcaaaacagttatgttgttaaaccacttgttttacttttctctcaaccatcatcttattttctttcctcccctcctgtcaaaacaaaacaaaacaaaaatcctgctttccaatcgtcatgtagtctacgccatggaaattaatcgtaagtttacatggaattgattattctagtctatggaatgtgtttttcaattaccttttccttagctgattactagtagtcttaaactgttttcaaatacttctcttgttttttggtgccagtactttttaagctgtcagtaaaaagtaaagagaaccacaaattcactgttgggatcaccctatttttttaggggagaaatagaccccctatgataaaaagttgcatttcaaatgagcagagggagaaaagattatttttcaaacatggcaccaaaacagttgattaaacaatttgggaagtagaggaaatccctaacccatacaacataacaaaaatattttcaaatttaatgtatcagtgaaaccaagaaaacaaccagaagacaacataagctgatgttaaataattagaagccacaatgactttcaaatggataacgataaagggaaaaaacataaagatacatttgtctgcttaaaaatgaagacttttatatttgaaagccacaataaagaaatgggaaaatgtttagaaatatgacaaataatgactatctctgagcgcagatatgagtttctgacttttttctttgtgtgagttgttttttttttgagacaactgggagtctcgctcagtcacccaggctggagtacagtggctcgatctcggctcactgcaagctctgcctcccgggttcacgccattctcctgcctcagactcccgagtagctggggctacagagtttattttttcccatggaaaaaatattgcttatgaaataagaaagaatcatattaaaaaagaaataggtattgaaaaacatatgtaagagatatttatccttttcattatatgtaaaaagcaaagacaaaactatttttttctttcagctccttgtggtgagaacctatatgatgaggagggcaagcggcttcctccctgtatccccggcgcctggctcactccagcactcatggcgtgctatctactggtcgccaacatcctgctggtgaacctgctgattgctgtgttcaagtacgtgtcacagccgatgaccacatgcttattatttattactgtacagattttccatttaatctcagaacgctcccaagataccaatatatttgcagataatttcattagggtttttaagtagatccaatttttgcagtctctttgttcaaacttaatcagtcttaatgtattcataaatcaagagttgacacttaaatacatttaaatttaatcttggttagtattttaacactttagcatgtattttaatctaatgaaaatattttcttagatgaaagtctcctggggtacagaatatttgattaagtcatgctttttattcatcagcagaggtggaaaaggcaatatgagtttcataagctgttacaattactgtaatactagtaaagcatttttttctgatcatttatagaatacaagataaaatggcctaagaaaaaaatggcttaaagggttaaatcgagtttcttataaaacctgcctatttggcatgttgtgttgagtatgttgaccatgctcaataaatattgaaaaaaatgattttagcttctaagatgaaaaatatagagggaaaaatccttcacagaaatatgcaatcttagaattgaacagggcattggagaaaacctggtccaaacttctggcttgagagatgagaaaactaaggtcagggaaggtaactggttttcctaaggtcccagtattggtagacaatgaaatcatgcacttactgcttcctgttggaagctaaaataagacaaagattgtacctaccccatgtccaaaataacgaaccttcaatcaaataagttcaataactaattaattcagttgaaaaaaaagtagtcatctacttgttagacagaattgaaagtttaaacatgtgaaagcatttagttaaatggcttataccgctacacataggaaattaaatttcctgagtatatgagtagattgtggtgtggtttttcaagaaagcagtacatagcaatttattacacttagctatttatgaatacaatgtccttaagcacagataatccacattgatggataaaccaaaagattggataatcaaggaatcagtactaaagggcactaaaaggccatctcattgagtattttcacttaaatgtgagtaactttgactgctctgggaaatcactataaaaagtaatataactaactgtaaaaatgtcttctttttaaagcaataccttctttgaagtaaaatcaatatccaaccaggtgtggaagttccagcgatatcagctgattatgacatttcatgacaggccagtcctgcccccaccgatgatcattttaagccacatctacatcatcattatgcgtctcagcggccgc

SEQ ID NO: 1403 - DNA, 31871 bp, Homo sapiens
gaaaatgagagaaagggcctggaggtgagtgtgaggagggaaaagaacatcaaacagataaagtcctgtcctgttgtcctgggaccttgggcagccatcttggcccagatgatccccacaagaaagaggtaagggtttcctgacccatttctgccatggtcttaggaaagtcattgagttttcatgccttagtttcttaagcaagtttgaaagttcactttttggatagcaataaaattactccttttcttttgttcacagagatgctgcaatttgtcagtaatcaagtgggagagttccctgacttgttttcagaacagctgtgtagctcctttcctggcagtggtggtagtggtagcagcagcggcagcagtggcagcagcagcagcagcagcaatggcaggggcagcagcagcggagctgtggacccttcagtgcaacggtcattcacccaggtcacattaccttccttctctccctcggcggcctccccacaggctccaactctgcaagtcaaggtttctcccacctcagttcccaccacacccagggcaactcctattcttcagccccgcccccagccccagcctcaacctcaaactcagctgcaacaacagacggtaatgatcacgccaacattcagcaccactccgcagacgaggatcatccagcagcctttgatataccagaatgcagctactagctttcaaggtgattcagaagttagaatggtagtggttggttggttccaatgtttatgtgccagtttgcagacactgtaaatatttctgtcgtcttcaggaatggcaggtatatcaatatggtcctgtctgaatgaggttctggtaactggcaataagaactggtacaggagcatgtcacattctgcagcttcaaataccttaatatctattgcgcctaattcaaaaatacttggttaaaaaatccagcaagcggccgggcgcggtggctcacgcctgtaatcccagcactttgggaggccaaggcgggcggatcacgaggtcaggagattgagaccatcctggctaactcagtgaaaccccatctctactaaaaaatagaaaaaattagccgggcatggtggcgggcgcctgtagtcccagctactcgggaggctgaggcaggagaatggcgtgaacccgggaggcagagcttgcagtgagcagagatcgtgccactgcactccagcctaggcaacagagcgagactcccatcttaaaaagaaaaaaaaaaatccagcaagcatagtagacacagggccattctgataactagtggtggagacttgaataaggcttgaaattggctaggcggcagccagatctcagctgccacagttgagaactattcattcagcaaacatctgagcatccactatggtgatgaatatgacttttaatataggtgcagcagcttcaagtagcaagcctcatgctgggcccttagtatgtgttgagggaatggatgactgaaaggggcctgttctttctgtgatgtgctgcatcccagtgccttttcatcatatttccctctgactctgtggggagcccagggtaagattagtattgctttgaatttcaaagaatcttatagttcttcaatggagttcaagaattgggacaggtgggggaatgtaaaggcaaaaagctgagacagtcctcccaaagtgcacttgccgtccagaaaggatggaagaaaatgaagccccagggagttgttgattctcaacatctgttaactcccttgctgggtgcagtcatttgctgattagcttccctttcccccaccctggcacccagagtaataaaacaatttgtactcgttccctcagaaattgatgcagcccttatgggatgttcttgttgtctaagccaccttgtaaatggctgtgcacatcatcttcagcagtaggtggggagttggaatcattatgagatactccatcctcaggtttctgctgcagctgcagtgacagaatgcattcctcatctctgtgccttctttctcctcttctcccaagtccttcagcctcaagtccaaagcctggtgacatcctcccaggtacagccggtcaccattcagcagcaggtgcagacagtacaggcccagcgggtgctgacacaaacggccaatggcacgctgcagacccttgccccggctacggtgcagacagttgctgcgccacaggtgcagcaggtcccggtaagtggctggaaaggattcagggaggcactggttggggctgttaactggtccttggttgaagatgtggtctacatactaagaaggaccaaccagagtgtacacaaagcagcttgtagggcgccaggatgcacctgtgagcagcgtatagtgacctggctgagtccatatctgtagatagacactggcactcaggaaaggctggtgcagtcacttacgtacacatgtaatgggcataaaactggaaagaaatgtgctaaattggtatttcccagataattttctttttcatagttttgtgttgtgtttttttgttgttgttgttgttttgagacggagtctcattctgttgcccaagctggagtggagtggtgtggtctcagctcactataacctccgcctcccgggttcaagcagttctgctgcttcagcctcccgagtagctgggactacaggcatgtgccaccacacccggctaatttttatatttttagtagagacgggatgttggccaggctggcttgaacttctgaccttgtgatccacccgcctcggcctcccaaagtgctgggattacagacgtgagccactgcccttggctttcatagttttctgttctccatattttctgctgtggatcctgaacatatattgggttggggggagggggggcatgtattattaatcttttttttaattttttttttttggagacagttttgctcttgttgcccaggttggagtgcagtggcgtgatcttggctccctgcaacccccgcctaccaggttcaagcgattctcctgcctcagcctcccaagtagctgggattacaagcacctgccactgcacctggctagttttttgtatttttagtagagatggggtttctccaggttggccaggctggttttgaactcctggcctcaaacagtgcatcgatctcggcctcccaaagtgctgagactacaggtgggagccactgtgcccagctgggggacgtgtattatttttataatcacaaaaaacgtctttatgttatatatcatcgtggactatatcctcttttttctttttttttttttgagagtcttgctctgtcgcccaggctggagtgcagtggcacgatctcggctcactgtgcaacctcagcctcctgggttcaagcaattctcctgcctcggcctcccgagtagctgggattccaggcacgcgccatcacgcccagctaatttttgtatttttagtagagacagggtttcaccatgttggttaggctggtctcaaactcctgacctcatgatccacctgccttggtctcccaaagtgctgggattacaagcatgagccaccacatctggcctatattttcttactaacaatttatcttaaaaaaatcaggtttattatttttgcttctcagccatgtgtctggctttcctgagtcttttctctcctctctgccatccaccctacccatctctgctctgctcctgctgggccactggcaccaccctcttgaaagtctttcaacctaaaaacccatgacctggctgagcaccatggctcacgcctgtaatctcagcactttgggaggctgaggcaggtggatttcttgaacccaaaagttcaggaccagcctgggcaacatggtgaaaccctgtctctacaaaaaaatacaaacaattagccaggcatggtggcacacacctgtagtcccagctactcaggaggctgaggcagcaggatcacttgagcccgggaggtcaaggctgcagtgagctgagattgcaccactgcactccagcctgggcaacagagagcaaccctgtctcagcaaaaaaaaaaaaaaaaaaaaaaagccaggaccctcattagctagcccctctttctccacctgaacccggtattcaggctgtacaaaatagccggcttttgaaatggcctctatgaaatttcctgttcatttttttattctcaatttcataaaaattatatcatttctcattctttcttggaaggtctatgcagtaagaaaggaatgcataacagaaggataatgctatcatccttttacttttcttccttcttcatccaggtcctggtccagcctcagatcatcaagacagattcccttgttttgaccacactgaagacagatggcagccctgttatggctgcggtccagaacccggccctcaccgccctcaccacccctatccagacggctgcccttcaagtaccagtaagagctgccttctcccccaccctcctccctccccctttattcctggaggtgttagtcttcagagatgttaaatctctatatgctgagtaggtatgggagggtctatagcacaaatcagtcaaattgtaaatgtcacccctcttagttgtttttcgctcgaaaaagtattagcaatgtgtgttcgatgtgggagtactggagtctacaaggaggtagaaaagaatagcagaaggaccctctattcttggctaatagctccacacaagaccattcacctcttagatcctgctgatgacttctgaaggaccctagggccaccaggcagggaagggctccaaggtgaagaacatggaaggtaccccatccttcagttgtaggttcttagccactttcagcatcctatagcatgagaatctgatagagtaaatggtgattaaaatttagaagcactagctttattcataaaatccaagaactggaagcaactcaaatgtccatccacaggaaaataagcacattgtgatatattcatacaatgaaattatgcctagcaattaaaaaacagaactgctgacaggcacggtggctcacgcctgtaatctcagcactttgggaggccaagaggggtggatcacctgaggtcaggagtttgagaccagcctggccaacacggtgaaaccccatttctactaaaaatacaaaaattagctgggtatggtggtgcatggtgcatgcctgtaatcccagctactcaggaggctgaggcaggagaattgcttgaacctgagaggtggaagctgcagtgagccgagatcgcaccactgcactccagcctggatgacagaacgagactgactctcaaaaaaaaaaaaaaaagctactgatgcatgaaacaacatggggctgtccctcagaaatagtgtgtcaagccaccgggcgcagtggctcacacctgtaatcccagcactttgggaggccgaggtgggtagatcatgaggtcaggagatcgagaccatcctggctaccatggtgaaaccccgtctctgctaaaaatacaaaaaattagccgggcatggtggcgggcacctgtagtcctagctactcgggaggccgaggtaggagaatgtcgtgaacctgggaggtggagcttgcagtgagccaagattgcgccactgcactccagcccgggcgacagagcaaatctccgtctcaaaaaaaaaaaaaaagaaatagtgtgtcaagccaaaggagttcatgctaatgagtccatttatatgaagtttaaaaagaggcaaaatgaagctatggtgctggaattcagagcggtggtgacaaggaggggaggggcatgcggggactttctgagctggtagaaatgggctatatcttggtctgggtggttatatacattgtgtacatatgtaaaattcatcaagctataaacttaagatttgtggtttttattgtgcatgacgtacttattggcaactaatgaaattgggcacctttttatttatttattggctgattagatattgaggccattatttaagaaattaaactaaaattggtccaggcccagtggctcacgcctgtattcccagcattttgggaggctgaggtgggcagatcacctgaggtcagtagtttgagatcagcctggccaacatgatgaaatcccatctctactaaaaatacaaaaatgagccaggtgtggtggtgggtgcctgtattcccagctactcaggaggctgaggcaggagaatcacttgaaccaggggggtgcaggttgtagtaagctgtgatcacgccactgcactccagcttttgggcaacagagtgagactttgtctcaaaaaaaaaaacaaaaacaaaaaaacaggacgtggtggctcacgcctgtaatcccagcactttgggaggccaaggcgggtggatcacctgaggtcagcagtttgagaccagcctgaccaacatggagaaaccccgtctctactaaaaatacaaaattagccaggcatggtggcgcatgcctgtaatccaagctactcgggaggctgaggcagcagaatcacttgaagctgggaggcagagtttgtggtgagccgagatcacaccattgcattccagcctgggcaacaagagcgaaactccgtctcaaaaaaaataaaataaaataaaataaagttagaaaaaataagaggagaaaacagagatgaagaataaaaaggggagacctccatggttggcctatttacttaatcaaatggctcttattgagagtgtcacttctgcccttgagctttttgatggcaaaattgtataaagaaatgcagtaatttgcttaattgtcatttgagaggaaaaaatgtgtcatacactaggagaaagttttctctggtgccaactcgtggttcaccgtgtacaactttagaagtggttaacagtttgacagcaaagcagaaatcatatgacttgtttctggcatacgtagatcaaaacttaaaacatatttagccatgttaatcctcttgtggtgtagtttatcagcagtgattcttgaagggaggtagtaaccaaggttccgtggctcctgagacttcttggggcctgatttgattaacccaggaagagtctcagacctcatgaagtactgccaggtctggcagcacttggccaaagcgggcaggtctgtgttgaggttgctttatgcagactaacaaagggatcattctgctgtgtacctgtccctattctagaccctggtgggcagcagtgggaccattctgaccacaatgcctgtaatgatggggcaagagaaagtgcccattaagcaggtacctgggggagtcaagcagcttgagccccccaaagaaggagaaaggcggacaacccataatatcattgagaaacgatatcgctcctccatcaatgacaaaatcatcgaattgaaagacctggtcatggggacagacgccaaggtgggtgccaagcaaaattgtgttttatgttccaccatctcccctctacctgtttttgcctcaggagcctagagaagtcccaggctcaaggtaagtgaatacaagaccgagttagaggtgcttttttattaaagcatcttggtgtcatgtcaagattataaaatattaaaaaacataagggactggtgagggttgataaggcagtgacccgctgagacctttgactcctttggctatgctctgcagtgatggggactccactgtcagaggcagagaaagatgcctgccactcagtagttccagatacaggactgtgtgtaccttggagtcagctgatggcatagttttagctgtgtttaggggttaccttttaaggaaaagaaagaaaaaagaggttgagtctttgaccagcaacacatagaggaaactgatgttccaaatgtttctggtgtttcagtgtatgtgtcttctagaaagtaggagattttatttttaaaacctatctatgtttaaaccctattttgaaagaaaatttcattttccttgcctacaaatctgaaagctgtacatcctaagtaaaaatctatgccttaagataactgtccaggctaggcactgtggcttacgcctgtaatcccagcactttgggaggctgaggcgggtggatcacgaggccaggagttcaagaccagcctggccaacatggtgaaaccccgtctctactaaaaatacaaaaaattagccgggcgtgctggcaggtgcctgtaatcccagctacttggaaggctgaggcaggagaattgtttgaacctgggaggcagaggttgcagtgatctgagatcgcgccattgcactccatcctgggcaacaagagtgaaactctgtcttggaaaaaagaaaaaaaaaaagataactgtccaacaatgctgtggttgtttttttcatttgttttcgttaaagtttgttatggtgctaggattattataagaagtgggaacaatagctaatatttattgagtgtcaactatttgccaggctcagggctaagccctttacactcattatctcatttagccctgctgcaagcctgtgattcacgcgctttcattatctctgtgctaatgaggaggaaagtgaggttctgaggtatggaataacttctcccgagtggcacagctaatcattgggaggaccagcatctgaacttggtttctcctctcacagagccatgctgtcatcccaagtgctagggctctgctcttttcacactgtagcctgcactggtctcactgtgttttcactcatcttcctacccagatgcacaagtctggcgttctgaggaaggccattgattacatcaaatacttgcagcaggtcaatcataaactgcgccaggagaacatggtgctgaagctggcaaatcaaaagaacagtaagtgtgctgagaaaaggcttgtcagccctggcccaggtggggctttgtaaaagcagatcattttcaccaggtggggttttctttgcagagcttctaaagggcatcgacctaggcagtctggtggacaatgaggtggacctgaagatcgaggactttaatcagaatgtccttctgatgtcccccccagcctctgactcagggtcccaggctggcttctctccctactccattgactctgagccaggaagccctctattggatgatgcaaaggtacagacttttgaaatctcctgatccctggaatctttcccatttcccctaagaagatagctgggaggtcacagttatgaggccaggccgcatgttaagagggcctagcctggagaaaaacaggaattctgtgaaattagccaggtcctggagaataaagaaagaaaaaactgactccggggggaaacagtccctcaggtttaactggtccttgccgataggccccgtcagagaggaatgagtgccagatccagaacgagaatgcagagtagctgttgtgggggcgttgggagctgctggaggcacctcattgcttcactctgcctttaatgggcctggcaagaccactttgggaggctgatcagttggtttaggatgaggctgcctctgggtcctcttttcagaaatgattacaatttgcagtctaacagataacattttacctatgggcctttaatcgtcaaagcccctggcaatggtagtttaatggaattacttaagagacgctctgagcctaatgatcttcctgggaacctgtagagaccactgggttttgtactgtattttgacttcggcagtttctgactctgaaagcacaaagttccctcctagtgtttgtttttgactaagctgtttattgtatcatatacttaattttactaaggaagctccatttttgaaatattcttataaatgtggttctgtttggcaacaacaggctgtttgacatataaattgaattagctgggcttctgagtcatcagaagaaaatcttaaatggttttaaaatattgaaaagaaatgacatgctatatacacattggggcgcaggggagatctggcttcagccctcctgctgtaaaatggagagtggggtgggtgtagacaatgatacagttttagaacaggtaaaatcctttagatagattcacactaaatacggtctttgatcaacttcattgaggtgtaatttaaatgcaataaaatatacctactttaaaagtacagtaccaagagttttaacataatgtacagtgctatgtaactgtcactgtaatcaagatatagaacatttccatcaccccaaaaagctcttttgtacacctttgcaggtagtttcccacacccctctccagcctcagacaatgactgattcattggtttcctgttactttagattcattttgcctgttctggaattatacagaaacagaatcatacagtgtgttctcttttgtggtagatttctattttaaaagaaaatctcttctacctttgttctttggaacatgtacttttctcagttagcaagcaggtgaatgtgccaatgtttgagcagcagttagtgaattataggcttctcagttcccatctggccttagtcctgagttaatcgacttgaatttaaacctcataaccatttctcaatatatatatatgtatttataaagtgctgtaaaaacctatgcagtatttattccaacctcgaggccttgttttgaaggtcaaagatgagccagactctcctcctgtggcgctgggcatggtagaccgctcacggattcttctgtgtgtcctcaccttcctgtgcctctcctttaaccccctgacttccctgctgcagtggggaggggcccacgactctgaccagcacccacactcaggctctggccgcagtgtcctgtcattcgagtcaggtaggtggaggccccttgccccacctgggcatggctggaccactatggcaggagaaggaccctgtgtacaaacttcttggcttggctaccaggtcccaaagggcttttatagtgggcccccacctgcttgcttctgatagggactggcataagttccattttagaagtaacaaggcaagcccaagttcagtcagaatgagcaaaacaaatcagggacccacactactctaaataccctggggtggaggggtggtacctatttgaaggaggatatcgtgttttttatctgaggttgcaaaaccaatgcctcaaccctttcaaaacaaagatttttatggcactcagctccataatgagaagggctacagtcattagccctgtttagattatagaattatttgccctttcttctgaaaatgaggtagaagactctttcctgtgatagtgctggggtctgtcaggtgcctggctgctccgcaaggcctttcctagcagactctgctgagacgctccttcttaggttctgggggctggtttgactggatgatgcctactcttctcttatggctggtaaatggtgtgattgtcctgagcgtctttgtgaagctgctggttcatggggagccagtgatccggccacactcgcgctcctcggtcaccttctggaggcaccggaaacaggcagatctggatctcgccagagtgagttctgtgtccgcccttccccatcctcccccagacttgacaaataattcagcaactcgtgtcaaagaaagtcctatgatagatgcttgtggtgagaggaaaaagggaccctgctgctgaatagtcacagggcagtggagtgggcgcctctgcatagataattaattccagggacatgagatgatctatgtctccggtatgacaggaataatgaagttgagttctgagggaggggttctagggcttgagcggggctgccaagagtaggaaggaagggcagaggtggcagaaggaccttccaacccgaacacatgaatggacaggctgtttggagactggcaggttccagggtgtgttgagtgtaggttatgtcagagagagttgaaggcaaaggctggtagtgtgtctaggcccaaattggagagggctttcactaggaactgatttggggctttattcccaattctctatagaaccaggaaaggtttttgagcaggaaaactagctgaaagttttcatttgaaatcaacagggagtttacggaaaaaaatctggggcaactcacagcattgaggaagagttaaacatccacatttcaagaggaacaagaaccagaacactcctcagcagcagtgagccatgggcctgccctccccacctctgcaagctgcagggccattagtgagaatctgattggccatcctggatctgtcagccttgctggggctatgggtctcagaatatagatgtgattttgagaggcctgttccttgagtataacatcccaagatgtatatcctagaggcaggttcaggtgtgtgttttacaagcatcattatggtggctgtgaaggataggtaggagggagatgtgaaatgcatggaacatggcaacaagttagggtgctcttttttaagtaaagacaaggtctcactgtgttgcctggctggtcctgaactcctaggctcaagtgatcctctcaccttgacgtcccaaagtgttaggattacaggcatgagccaccacgcctggctgagtcagggggctctatgaaatagactgagtaagagatgatggcaaggacctggaattaaaaggaaaggtttgaactgaataagtatttgaaatgtaatatttggaagggaagtgattagtgacgttgactcaaggataagagaggctccaagatggagtggactccatctaggccatgttgcctggaaaagctggaagaggcccctgtagagtgagcagtgattgagaggcaggccatggggactgagcaggggcggggccagagtgtttgggaagcatgtctgtcagcagagggttcttagggagaattggactggggagtcaggaggggtaagagccaaagactgggacttgggaatagcccatctttgagggaaaggcaggggaggagccagggaacacctgcctcctttggaatctgcaaatgcaggtccttctggctggaaagatagaggcaccttagagactgttgctgtgaggacatcttttcttttcccttgtccagtcctgtaatgatgtgggaaacaaagcacagatagtgtaccagctgcccaatagaggaaaataggagaatttactttcatttcccaagactatatagcctgtcctctagtttccagcagtgagagagagaaagcgagcggtctccagtacagtgccgtagactctccattagaccctctcaggttgacaaagattagttcatctgaatcctagagtagggtagtttagctgtgagtttgcctaaaaccatggttctcaaacttcagcaggcatgaagccgggtgctgtggctcacactgaggtggggggattgcttgagcccaggagttcaagaccagcctgggcaacatagcaaaacccccatctctaaaaatgaaaagaaacgctttagcagacatggcatgagaatcacctagagggctgcaataccagagattctgattcagtagccctggggtaaggtccaagtgcttgcatttctaacaagctcctaagagctgatgctactggcctctgggggccacactttgagaccctgaaagcctaaaggatcatgcagttcatctaaatctgtgtcaccaccttatgtctaaaagctactgctggccgggcatggtggctcacgcctgtaatcccaacactttggaaggccgaggcaggtagatcacttgaggtcaggagttcgagaccagcctgaccaacatggtgaaaccctgtctctactaaaaatacaaaaaaaaaaaaaaaaaaagtgctactctgagggaactctgaccagcatttgctcatagaacaaacgcacgcagtacaatctcaatcgagtaaaaagtctgtaaggaaatacctcagaatgtcagcagggattcttcctgggggatgagattataggtggttttgttttactttcttgtagctttctgaagtttccctcgtttttatgagtgtgcactaattcctctgataattgggggcagggggagtagaagtctatatcaaaacaaaaagccggagcaaggccagtgaccattaacaccttttgatactttgtagggagattttgcagctgctgccggcaacctacaaacctgcctggcagttttgggccgggcactgcccacctcccgcctggacctggcctgcagcctctcctggaacgtgatccgctacagcctgcagaagctacgcctggtgcgctggctgctcaagaaagtcttccagtgccggcgggccacgccagccactgaggcaggctttgaagacgaagctaagaccagcgcccgggatgcggctctggcctatcaccggctgcaccagctgcacatcacaggtgagggggcagctgctgctgcctggcttgctgcaaggcatctcatgctacctctcctccttagcttgatttgccagttctgcaccctagctgaagtccctttaacgctactcttttagagtggctagaccaagcttctacctgttttcacagctgtaaggttggctctttgctttagctcatcagttctcagatgcacatgttttcacaataacatcactatactcaggatgtgtcctataaacagtggcacattgtagataagttggcagtgtttttctttagtgatacttaaattaatggtgagacttaaaattgctgacatcttagagtcaatgaaatatgatcatctgtttcattcagtaagctcctgctataataggcagagaggtcaacaaatgaatgacagttcagcgtgagtatgttagacttagcagaaggaacatgttttcgttgggagggagtgggtacccgtttggagggtttcaagaaaggttttctggggaagtagagtcttggctttgcatggaaggatgcatagaggtcaccagctctgcaggagatgagcctctgggcagagggatgttcccaaggaggagccccacctggggtggctcttgagaataagccttcagtggtcctagagggagccagggcacaaaggcagtactcagaccatgaaggatttggatgccaggctgaggatcttgtagtgtatcagtaggattcagtgaagagcattaggaaaatagtgatatgatcaggtttgtgcttctcaagtttagaagagtcaggctgggcatggtagctggctcacacctgtagtcccagcactttgggagactgaggcaggaggatcacttgcactcaggagttcgagaccagcctggacaacgtggcaaaaccccatttctacaaaaaatacaaaaattagccaggcttggtgatgcacacctgtaatcccagctacccaggaggctgatgtgggagaatcactggagcctgggagatcaaggctccagtgagccaagattgcaccatagcactccaaaaaaaaaagtttagaagattcactctgatggcagataaggagtggatcccagaggatcaaggctagagctagagaggccaaatagaagctgatgcagattaaagatgagagttgctgaaaggacagatgagaggaaattagaaggtggaattgactggactggggactcattggactgatggatggggacagtagtcagctaagacggttccctggttcttccttgggagtttgggtgagcgatggtgccaccaacaaaggtaaagaaaatagaaggaagagcaactttccaggaaaagggtggtgagttcccttttggacacttgcctgtgagatgtggaggtgagctggacatgcaggatctacagcccaaagaagactacaggtgagagtgaaaagcaagggagcctatgagagtggataggtgaaaaggagaccctcagggccattcagaagaacaccctcatctaaagaacagataggccatcgcggtggctcacacctgtaatcccagcactttgggaggccaaggcaggtggatcacctgaggtcaggagttcgagacctgcctggccaacatggcaaaaccctgtctctactaaaaatacaaaaattagccgggtgtggtggcacgtgcctataatcccagttactcgagaggctaaggcaggagaatcacttgaacccaggaggtggaggttgcagtgagccaagatggcaccactgcattccagcctgggcaacaagagcaaaactccatctcaaaaagaaaggataaaggctggcacagcagttcacatctgtaatctcagaactttgggaggtcaaggaaggaaggtcgcttgagcccaggagtttcccatcagcctgggaaacacggggagactccatctctccaaaaaaaattcaaaaaattagctggtttttgtggtgtgtgtctgtggttccagctacttgagaggccaaggtgggaggatcacttgagcctgggaggtagatcgaggctgcagcgagctgtgattgtgccactgcacatgcatgcagagatgaacagatagaggatggggagtcaggggcagaggctgcctgagaggagcagttggagaggtctgaggagacactgagatgctaagtgttggaggagcaaggtcagagagttgaggaggggagattgttgctgggacacccagtaagatgagggccaggaataacagtaggatgtggtaactggaaggtgttagataccttgatggcagtaaggagcttcagccaaaagtggaacagagccaggcaagtgatgtaggagtgaccaggagatgagacagtggggccattgtgcagctttaatatgtgggctcatggtagaattttagcagaaggtccctatctgcaaatttgccccgctgttatcttgtctgttcctcagtgtgcccttgggacagaataagcccatactcaggtctctgatcaggctgtgtcctccttgctgccaaattctggagaattccagctgagaagctttacgtcactcattccttccatactcactggcattccctgtgtgaggcactgaggggacagaggtaactacagtatggttgccacactgccctctcacctcccttcctgtgtctcctgcaggaggaacacctgaggccagtacagaatggagtgtggaggctgagatctccctaggctgataaaaagacagggaggcaaggcagcccaggagggggaacacagggctggatgagcacgggaagcctggctttgccactgtctgcaccttgacatgggcacttcctcccctgaggcaaggagactgcttgcccttgtagtgaggaccaaagccagcaacagtatgaaagcctcacgagagctgtgatgggcccttgtgcctgtgcaaggatactttgttccctgattaggggatcagccccagatgggccactgtgcacctctcataggggagggtgtggtaagccttcctggcctcccacccactaacccaacatgtgttcagctgtccttgctcagtttacgtcacttccccctcaaacgggtatgtgtttgtgtattgtgaaggcgggtttttttttggcttttttgggggacagagtctcgctctgttgcccaggctggagtgcagtggtgcgatctcagctcactgcaacctccgcatcgcaggctcaagcaattcttctgcctcagccttccaagtagctgcaattacaggcgtgtgccaccacgtccagctaattttttctatttttagtagagatggggtttcactgtgtttgccaggctggtctcgaactcctgatcttaagtgatccgccggccttggcctcccaaagtgctgggattacaggtgtgagccactggcacccagccacattgtgaaggttttttaatgaaaataaattcaaatcagttcatctaaaaaaaatttcattacctctgttgaatgtttggaaacacacagtgtggctgtgctgctgacattgttatgttgcactgtgcgcctctgagtcctatacaacaacctgcaattgtgacagctctgggtgtgacagaaatgggtgccatgttcccagctaccctgtgaggtagacaggaacacacagccagtatatcacagagcctggcatcccatcctgtgatcaggcctgtctgatcacaaagttcacctcgcttctcccctggttcctctcttactttgatcgtgctggagagagcaggaaaaagtttggttttggggctccatcaacaatagtgtctgtttctgcccaccctagggaagcttcctgcaggatccgcctgttccgatgtacacatggcgttgtgtgccgtgaacctggctgaatgtgcagaggagaagatcccaccgagcacactggttgagatccatctgactgctgccatggggctcaagacccggtgtggaggcaagctgggcttcctggccgtgagtacccttcggttcccttctgtaaacctcccctgagcacttacctagccaggagttaagatgcagaagcagttatgaacccccttccccatcaggtgctgcccacctggaggggtaggcaggcattcattcagtcgctcatttcaccaggactcccagcaaccgataaaacagaccaaaattcctccccttgtggccttaataccataagccttgtaggcaggacattttggtcccctgaggtaatatgaggtaatatgaagattggttcagcaatagcagagctactgtacttgggggttaatatgcaacttttctgttcttcaagtggtcataaaaattcttagaatcccctggttatgtctcatggttctttcatttactcagaaggtatttattgggcatcttgtattgatcacagcactgtgaatccagaaataaaagccagtgcctttgccaagctacagagttaaagaaaagaaaaatgaaatgaataaaagtaaaagaaaacctgtgcctgtctacaaggagctcaggtcagacgagggcagggattgtggctatcaagcacctcccatatgcctagctaggagccaggcttgggaactctcaaatgggtaattcccggtccttgttatcagctagctcacaacatgctgacctcaggctttctcttactctagcagaaacaggtatgttttactttgtgtcccactatggatagactgctgaatacatcaggtatgttcaagcattaccacatctctatttgtttccgtatctcagtaacagcagagatgagctgagaatgaatcagaacgtgccctgtagtgacattgatatatttcctgaggtacatcacgatagtctaggggacaaagggcgcagggaagcccagtgtactctttatgtctacacttgatcttagccagaaggctgagaagtgatactttttatgtcttacctctgtttctggtgactacagataagagactcatcccttgattcactcattcagcaaatatgactgagcaccgtctctaagcaggacatttgccttgtcctcagggagcatagttggcaaggaatctagacagcagcccttcttgagcttgacattgatcttctcatgaggaggactgggctccaggtggggaaagaaccccatcctcacttgtgggctagacgacctgggagtccacagacactgaagacacatcattcttcctattcatttcaaccttccctcgacagatcttcctgggaccaggtcttcaggacagtgtgagctagggtgagctcctgagctggtcttgggggaagtcagggtgggctttctggggaaggtgaatctaggctgacagcaggaggcattgatgagatctctctccttttcagtttattgaagtgctctgggctgatgtcattacatttgtaacttccatgccccccaaaaatgttttgaagacattcattttatcaaaatacaacatacatgcagaaaaatgcccacattttaacttacggcttgaagtgaagttacccatgcaacacccacccacatcaagaagtagaacattcccagcacccccagaagccttcttgaggccctccctgctcttcctgccccaaccaaggtaaccactcttctgaattctgtcactggagtttaatctgtctattgttcatcatttcagtaaacttatcaaagtacatgcttagaagtctggctgggagggccgggcacggtggcttacccctgtaatcccggcactttgggaggccaaggcgagcagatcacctgaggtcaggagttcaagaccagcctgaccaatatgatgaaaccctgtctctactaaaaatacaaaaattagccaggcgtggtggcatgtgcctataatctcagctacttgggaggctgagacaggagaatcacttgaacccaggaggtggagggtgcattgagcggagatcacgccattgcactccagcctgggcaacagagcaagactccatctcaaaataaatacatacgtacatacaaacaaaaattagctggatgtggtggtgcacacctgtaatcccagctacttgggaggctgaggcaggagaatcgcctgaacctgggaagtggaggttgtaatgagccaagattgcaccactgcactccagcctgggtgacagagtgagtgagactccgtctcaagaaaaaaaaaaaagattacaatatgcatgtcaaaaagtatacaaatcataaatacacagttcagtgactccacagagtaaacacacccttatagccagcagacagatcaaagtacagaaccaagaccccagaaacttctcttgggccctttgcaatcactaacctgccccttcccccaagccttccagccttccaagggtaaccaccatcctagtcacctcagatgctttgcctctgtttaaactatattaatataaggagagtcttgcagtatacactgttttgtgtctgacttattttgctcaatatcatgtgtaagaatcattatgttgttatgtagaattatagattgttcgttctcatatttatagtgttccattgtatgactagattattgcagatgaactttttagttgttttctggctttggttattatgaagggtgctgctgtgaacctccttgtacacacatctttcaggaaacgtgactgcatttttaggaatggcatcgctgggtcagaggttgtgcgtatttccaaattgttggccattctccactccatcagcagtgaacaagacttctagttctacatccttaccgaacacatataatgtcaatttttttaagcccttctagtgtatctcattgtagttttcatttgtacttcccaggtgattaatgagattgagcacctcttcttacatttattggcaatttggatagtctgtttcgttacattcaattcaagtcttacctctttttcatttggactatctgtcgtctcattgattagaggaattctttattctggagattacccctttattggatatatgcttttcagataccttctcccactctggggcttgcctgttctgtcttaatggtgtctagtgagagcacaagctcttaatttcagtgaaatccagattattagtcttttcctttacagttagacattttaagtcctgttcaataaatctttgtcctacctcaaagtcatgaagatattctcctatgttgtctgctagacgctttattttttactctttacacatatgtacctaatccacctggaattaatttttataagagttggaggtaggagtgcaagatctgtttttctccataaggatatctacctgacgcagaacctgttattttaaaaactatccttcccctgctgcaccaagtggcacctttttttcataaatcaaggatccgtgtaccgtgggtctgcctccagatctagtctgttccactgcaccatcaccacccaaccctaacggctgagttttctcttacgtcttgatgtctggaagtgttggtcttccagatttagtgactaacgatgaatcttgggtgtttctttgtagcctcttcattctacagaggtacttgatgctgctgatggacatttgggttgtttccagtatttgccgttataaacagtgctttagggaacatttttgtccattgtcttcatgcacctccataagagtttcctcagaccaaatctgtagagatggtgatgctgtgtcaaaggatataaatatttgaaacttaatagtattaccaaatttgcatattcagtaagatggaaaaaggagaactgtcatctttaaagtaactgctcttctctgtttacttctcttgagagaggataaagagactcagacagtactttcttataaaggaagaagctttgaatttggtgagatatatttagctacaaatgagccagttgttgggggcaagtggagggctggcctctgtgaaaatggtttagactagaggttcccaaacttgctcaactcatgactcaagattcccaaacattctctactcactatgtctcagtaaatttttcatggcatcccttagccaaaagaaatacctaacggttctggttttcgttttttgaaacagtgtcttgctctgttgcccaggctggagtgcagtggtgcaatcacggcacactctagcctcaacctctctgggctcaagtgatcatcccacctcaccctcccgagtagctgggactgcaggtatacaccaccacaccgagcttatttttgtattttttgtaaagtcagggttttgctatgttgctcaggctggtctcgaactcctgggcttaagcgatctgcccacctcagcctctcaaagtgctgggattataggcatgcaccaccgcgcctggcctctgttaagtagttaagtttgaacatcctaataggtatttaaattgtcttaacagcttagtggtcatttgaaaaaatcatatgtcaagttgaaagaagaaataatattttttgctaggagtggtagcacacacctgtggtcccagctcctcaggagactgaggtaggagaatctcctgaaaccacgagtttgaggctgcagttagctatggtcacacctgtgaatagagccactccactccagcctggacaacatagtgagaccatgtctctattaaaaaaaaaaaaaaagaggttgggcacggtggctcatacctgtaatcccagcacttaaggaggctgaggcgggtggatcacctaaggtcaggagtttgagaccagcctggccaacatgatgaaactccgtgtctactaaaaatacaaaaattagccagggatcgtagcacgcacctgtaatcccagctactcggaaggctgagacagaatcacttgaacccaggagtcagaggttgccgtgagccgagattgtgccactgcactctgggtgacagagcaagactctgtctcaaaagaaagaaagagagagaatattttggattcttaataatttcttagaaatcatggttattaagaatccaaaatattcttttatttatttatttattttttgagatacagcctcactctgttgcccaggctggagtggaatggctcttcacaagcatggtgtcactgtttcttaccaatacatgaacctgtcaagcactgcacacctcaagctttggaatcagactagcaaccatcactctctctcttttccacattgattttcacacagtactatgacagatatcacatctccaaaggaagctagtgtggtctcaatgctgaggctgcatgctctccccatctagtcacttacagtgcccagctgatgttgagcatcactgttttcctcgaaagtttaaaatagccagtggctcccttgatcacttgctgtggcacctcagactgccttggcacacgatttgagagccatggggttagaccgatgttaggggacacaacctggggttgggactggcccagggatactgagtggctctcaggatctaaacagttgtggggttcttgccacagcctctttcacatcaggcaattagcagatgagttacagggggaggctcctaggccccagttggggaagattctggtgtctataaaatttaggaaaacttaaaaaaaaatttttttttttttggcttgggattacaagccaagccaccagcgtggccaagatggtgaaaccctgtctctactaaaaatataaaaattagctgggtgcggtggcgggtgcctataatcccagctacttgggaggctgaggcaggagaattgctagaacccaggaggcggaggttgcagtgagccaagatcacaccactgcactccagcctgggtgacagagcaagactctgtctttaaaaaaaaaaagaaaagaaaagaattaagcttaaaatacatttttacttagtgatttccacatttgcctttctggttcctcttgccgtatgacctggactaggctttgcttctacttgtaacatttgggccctcgtgagggaccagttggtcctcagtttctcctggagcagccaccaggctcccttgctgattggacatgtggaattggctgttcttggaaagagagttggagtcaaccgttcaaatgttctgggacctccgaagcccaggaatcacgccaccaccccccaatctccctccctgctcagctcctcaactgctattctcccaccattgcagttatcagctcagattcagtgagtgctttgtggaaggttggcagagggtcgcgagggtcctctacatttgttctccagtatccagtatcaacactggttaccaaagaggaaggacggactattggtgcccctggtcccagtgattagaaatgtaagtgaaacaccccacctcatctcataagctgctttgagattatgagtatgtgtctatagaacaggttgttttctctcagactcaggcagtgtctccaggttccccctggagagagatagtcttctctgtctgtgtcctcgagtggcactctgacagtgctatttctgaccctggcattcaagtcttctgaagccgttacattcgctgatggctacttagagcccagtaaaggtcagaaccatcagactgaaccagaccatgaaacagcgctgctcctgtgggggcgagggctggggtgtggaagcgatgtctgcgggcctcggcctggcagccccgcccctgggctccctgggctttctatcttatgcttctccctccctcctgtcttctgtcctcagttcctcactcaccctggcctgtttcggggagtggttatgggttggaagtcatgggtgttagtgtgaaaataccctcactcaaaaagtgacagaactgaaaacgtggtagatggtattgtccctgcagttcttgtcagtggggtcctggaatgatgttatcccggcaagtggaggaggggcccagtgaccggggccctggctctttgaattgtcccacaaagaggctttccaggttccccctctgttctttctcgcaggctggtgttcacatcaggggctcatgcaggggtgccatggggtttctgtagggggccgcccttgcagggccagctttgtggggggagtctctcaaccacctgcacacagatacttgcctgtacagggcctgggctgtcctcccagctgccccttcactccagtgccatctgatgtgaccctgacggctggccatgtgccgagcactgttctaaactttacacgcaaagtaaaagtaaaagaaaaattagtcaaagcagaataattttgcctaaaatagtctaaaagatatgtaattaaaatgacatgatgggccaggcacggtggctcacgcctgtaatcccagcactttgggaggccgagacgggcggatcacgaggtcaagagatcgagaccatcctggctaacacggtgaaaccccgtctctactaaaaatacaaaaattagccgggcatggtggcgcgcgcctgtagtcccagctacacgggaggctgaggcaggagaatggcgtgaacccgggaggcagagcttgcagtgagtcgagatcgcgccactgcactccagcctgggcgacagagcgaaactccgtctcaaaaaaaaaaaaaaaaaaaaatgacatgataaaaagtcccaggatagaaggggctgcctggcttggcactctcggggccgaggggaaagtacagcagccagggggcccctgagacccctccttgggaaaccgccttcctagtttaccctgcaggttgaatgccagtaggatcaggcagccccagcaggacaggatgcagcaggggccccacgcgtgccttgtggctgctccctgccctcctgctgggatgtggacctagtcagcaagtccagcacactctactggtgggcttgccctagtttccatggtgggctttactttcaggtacctgtgggagtcctatccctgtgctgatctttcccagtctcccccaaagcccacctccaccatggtgctttctgcaccccacagtggctgcagccagcattctgccaccttggtgttacccctggtccttgtccttccacagagctacttcctcagccgagcccagagcctgtgtggccccgagcacagtgctgttcctgactccctgcgctggctctgccaccccctgggccagaagtttttcatggagcggagctggtctgtgaagtcagctgccaaggagagtctatactgtgcccagaggaacccaggtgagaataccttggagccattcagaattggagaaagccatgcaaaccgccggtactacagagtcactgcaccagacacgcggagacacgggttgtctcttaatcttgttgagtccgtttgtttgtttgtttgtttgtttgtttgaaccaaagctcagggaggttgagtaacttgcttaaggtcacaagcctgatcagaaattgtcagtggctaagctgggtgtgcagctctgctctctctaacattcagagcccatggtccttacatcacacagcaataaattgtgattaagctccaagggtactcttagcccttgttttgggcactttggagacacaaaggatgtgtgaggcttgctttccctggcctccaggtctctcccattgggagagcagacagacataaatggagagtttgggaacaataggtggcaggcagtcatcaactgctcagagtggtgacagggacgaggcttcaggcattggaaggaggtgctggctttctgtccctggcatttgatagtgattggagttgactcgcccggccttggagcagtagaggctggtcaggattgacttagaccttgagtgctcagtggctgtctgctttctgctgtacttttcctcccctctcagaattggagtctgtggggagagtaaggttctacaggtataggggtgtgtgtcacacattgggggagttcactgtccttttcttttttaaataataactgtattgctcaacgtgagaattgtgtgcaacaccaaaatataaaggatgaaagcaaaagcaatcctaaatctttctaccccacccctgctggctaaacatggacttctcagtggctttgtcatctctggcagtctctggctccaggccttgttacttggaatgtgttcataagtgtccctcctcctggtcattagatcgaggcccacatatctgccacatgtgaggagagagaaggggctggtgatttgaggcctgccagtaaagaaacttgctggtgacagtcagctatccaagcattgcaaggccccgtgtctagccagttcagacaggtcactgctgatggcacgttccatgacaaggctctggaaaaaccggagcatgttcttcgttgtcatgagcgtggcagcagctaccacctttttttccttgcctggtggttctccttagccacatggagaagagaaatcctctgagacattccattttctgttttctgatccaactccacctgacagctcccaaccttagagtactgagcactgtgccaggagacacagcaccctcccccacaccccctccccaccggagctcatccagaactagtcttgagctcttcaggctgggagtgaacactctcccccatcctccaactgtttagcacagtagttctgggctttggtggagaaggggcatctgatccccattcacaaggcatggctgtgtttggagtttctctccgtaaagacaaagtgggctcataaatgagctccatttaaccccccttgcctgtctcttttccagctgaccccattgcgcaggtccaccaggccttctgcaagaacctgctggagcgagctatagagtccttggtgaaacctcaggccaagaagaaggctggagaccaggaagaagagagctggtaaagtccccagaccagtccccctgccttaggacctgtccacgcaggcaactccaggacagcctgaaggcctgcactcctggagggaaacaagcctggcatcgggttggcagggcaatcaaatggttcctttgtatttaatttctcaaaaatgagagccctatgttaactctgacctggcctttcctcctagaccaagtgcgttttttttttttttttggagacggagtctcgctctgtcactcaggttggagtgcagtggcgcaatcttggcacactgcaagctctgcctcctgggttcacgccattcttctgtgtcagcctcctgagtagctgggactacaggcgcctgccaccatgcccggctaattttttgtatttttagtagagacgaggtttcaccatgttagccaggatggtctcgacctcgtgatccgcctgcctcagcctcccaaagtgctgggattacaggcgtgagccaccatgcccaggcctttttttttttttttttttttgagatggagtttcgctcttgttgcccaggctggagtgcaatggaccagtctcagctcactgcaacctctgcctcccgggttcaagtgattcttctgccttagcctcccaagtagctgggattacaggcgcccaccaccatgcctggctaatttttgtacttttagtagagatgaggtttcaccatgtcattcaggctggtcttgaactcctgatctcgggcaatccgcctgcctcggcctcccaaagtgctgggattacaggcatgagccaccacgcctggcaggtgcacccatttttatgtatccctttaccaagcggagtcagtacttggaccaagtcagggatttcattagcttgctctgctttttggggtagggagcaggggcctgttgaaaggggatgggggctgggtgcagtggctcacgtctgtaatcccagcactttgggtgggaggccaaggtgggcagatcacgaggtcaggagatcgagaccatcctggctaacacggtgaaaccccgtctactaaaaatacaaaaaattagccaggcgtggtggcgggcgcctgtggtcccagctattccggaggctgaggcaggagaatggcatgaatccgggaggcggagcttgcagtgagccaagattgcgccactgcactccagcctgggtgacagagctagactctgtctcaaaaaaaaaaaaagaaaggggatgggaatgaaatgtgacgagctcagcagaaggcagacacatctggcctggacatcttggggacccagcccctcatggaatgtgccgggcaatttttctctctgacatacttactgagcacagtccttctttcacagagtaagacctgagaggcagataggtgccaaagtcacttttgttttttgttatttttgtttgttttttggggggttttttgagacagtgtctcactctgtcacccaggctggaatgtagtggtacagtcttggctcactgcaacctctgcctcctgggttcaagcggttctcctgcctcagcctcccaagtagctggaattacaggcacgcgccaccatgcccgactcatttttgtatttcttggtagaggcagagtttcaccattggtcaggctggtctggaactcctgacctcaagtgatctgcctgccttggcctcccaaagtgctgggattacaggcgtgagccaccgtgcccggccccaaagtcactttcctacaaggcccagatcctgattagggtgcacctgaggagagggggagggggcagttctgcctgggagataagaaaacttttgggaggagatgacactggacttggggcttaaggagaggagtgagggtaggctgtgggggatgctagggaaaggcccccagtagagggaagagtgtcagtgacagcccagagacacggaggaaggatgcctgaggaatacaaagggtacacatagacagcgcttgcgtgtgcctgggatgacaggaaagggacagaaatggccattgggtcttagagctggagagctgaacagctaggccatgaggtgggccttgtgtatatgttttgatgtacatgggaccctttcttttcttcctagtgaattctccagtgctctggagtacttgaaattacttcattcttttgtggactctgtgggggttatgagccccccactctccaggagctccgtgctcaagtccgccctgggtaagcacctgcgggtggcccacagtctcagggtgctcagttcaggtcttcacagtgcttttgccccaggggtccagggcgttaggagtgtagatgccagcatcttctctggatcccaggttcatacctgtggctccagttcacagtcaccccctcccaaacagcactcagaggcaggaaactatggttttcagagaagtagggcaatgagtaattgaatgtcttcctcaagccctagctgtgtgacccaggtgaggacccttcttaatgcccagaagaacaagcaatgagtggcccaggcaccagggatggtggggagtcacctttcagatgcacagtggcccctgaggcagctcttgggccttatgctctttgctgaagagacttttcatctgggcctctctaccactcctcagcccctcatcacatcagtgtcacagcacagcccactgactggattgacatcatgacatttctttgcttctgtccctaaactgccatcaggatgatagcacatcagctgccaactcttgggcttctgtggccaccctggaagatgggggtaccaagctaccgctggtcactctccctagggagggagggatcccagaaaatcagccaccctatcatgatccctgacctgtggcctctgttttcaagtttagggaagcatgaccatccccgctggttttgtgggatcactactgtcatcattttgcagttgagaaaactaaggctgagagaggagaagacttaaaatattctaacaggagcctgttccagatactttgaagataccattctttatggctattgaaagcttaggttgtatccatctttttatttaaaaacaacactgcagtcaaatatgtgttaaacttttttctctctaagccagtttcattatgacagactgccaaaaatgggattactagcttaacgggagtgaacttttttattttttttgagacggagtcttactcttgttgcccaggctggagtgcaatggcacgatctcggctcactgcaacctccgcccgcaccgaggttcaagcgattctcttgcctcagcctccctagtagctgggattacagtcacccgccaccatgcccagctaatttttttgtgtatttttagtagagagggggtttcaccatgttggccaggctggtctcaaactcctgacctcaggtgatccacctgcctcagcctcccaaaatgctgggattacaggcgtgagccaccgcggccaaccaggaatgaacatttttaaggctc

SEQ ID NO: 1404 - DNA, 532 bp, Homo sapiens
cttgcccagagaaaaggggcacaaccagacaagggctagcatgggccctgggaagcacggagttcagggtggggcaggcttgctgtgtcctggcctggcaacatacctgcactgtgttgtggtagaagaacacaaagctgggaggcagagaactggttctaatcctagctgtaccctgacaagctgtgtgaccttggccaagttactttcctctcctggacttcatatatggtttttccattctttgcatccctgaagctccatgacttaggggccatcaacttggttgtccctgagtgtttccaagaataccaacagtgcccagggttttactcagcttggagaggaggcctagagcctccctgtggtgaggaggaaagaggttagagcaagtttgggtctgcagtgctaggattagaggtggcctcacaagccaaaaccgctatactcacagccttaggacagtgactccctactcgctgcctcagtgtttccagctgtaaaaaaggacccttggtaccttcgacagaac

SEQ ID NO: 1405 - DNA, 1824 bp, Homo sapiens
caaaaagttgactggcacttctaggaaccatcaacatgcagttgcttttagcccacagagcttgtttttgttttgttttattaatttacatttattgtccattcttacaagttgggacatttcacataattaagttgctaacatctcttaaaaagcaagatttggcaacaatggacctcattcccagaaggtaacaacctgctagagccaagttgtccctgccctctccagccaggtgtggggtctacaggtatcactgccacagcctcatttcttatatttgtacaacctgactgtgaatttgcaacccatacactgcgtgaatctaaattctactgaggcagagaccatggctgttttaacttttattctagttaccagcttagcatatggtagtagtgatagtagtaactgtgatcatcatcactaaaactggagtgctcactacatgctattctctgttctaagcacattccatttacttacttagtcctcatatctactttatgaattaggtactgtctttctttgatggtaatgatccttttataaaattaaattagtgctaagagactttcagcaatgttatatattgcctgtccattaaagattgttgccaaatggagtgagttgtccccagtaaggattcactatcaatgcagaagaaatgcacggataatctactttgcataaagaatggggctaggttgcatctgcatggtatcccaaataaataaaatgtgccactacccttgcaccaaaattattttatgatgggtaaagttagacccttgagaggttttttttttaaaaaaaaaaaaaaaaaaaaactttcccaaaatgcctctctgtaaagccaggatcagaatataggtgtcctaacttcctatctaagagttacgaatttctgactcagtctttgagagaaggtgtttatcctgaaccagaaactcaatgatgtatacctgtttaggtattaaatagttgtgtttatatgcccaaaaatttgactttaggtatatgtgatatgctttggttccgatcaagcaggaggtcataagtttactcagaagtatccaaaatatgacattcaagatttaacttgcatatgtgtgtatatgcatatatttatacatgtatatgtagattgaatgtgacattatgtatttctaacataatatttggcctgccagcttataaatatgtatttaagcttttcattgattgacattactgtaaaaaatgaattatgattgagaagttctggatatttgctgtttttttcattttatattcttactaaattattgaatttgttaaattaaaatgtgctatcactgtattgccaaattatggcaatacactatgcagtattatttcaatactttaagaggcatctattacttcattgaacacataagcagctagcctcctttcctctgtaaataaggactttttggcatcctgatgttcctcgctgttcatttggtatcatcctggagttccatcaagactgaggattttctccatggccaataaactattgtcagcatcagctcacgtttggctgtatgacagggatatgtgagaagcccagaaataaatcacaaaaataataaggcatcttctgagtctctctgaagaagccagtgatccaaaaactaacttcatatctgagtgagtcttggtattcttgatttgcttgaagaggctgtgacatattacaaggtgtgtaatttcccaggcatatcacactgcttctgtttcatgaattgatcaaattgtccagaagtaaacatttacaagattgagatttgaaccaaa

SEQ ID NO: 1406 - DNA, 32221 bp, Homo sapiens
cagctgatgccttaacttcggtcttgacaaaaattaatcgaatagatatagtgacactgctagaaggaccaatatttgattatggaaatatttcaggcaccagaagttttgcagatgagaacaatgttttccatgaccctgttgatggtaatcgaatttagtgttcatatttatttaatcatttgataaaatttgaaagtgcagtcagacaaggcagtcacttaaaagcaactaaactgtgatttgcttgacttagtttctcattttctctgccagagtctgcaaataaacactctgatatcagagcaaacttggtaaatacctctgtttatatacaatataaatatacaatataaatcatgacgtatgaacgcctaaggtatctgaaagagttggtatttctaatatttcataaaagttaaatatctagagaatgcattgcttttgtcacttttaatttttatattaaccctcctaaactagttacctcttttattcgtatataggtaaaacaaacgatgagccatttttatcaaataagcaaggtattgagtaaagtgtaagcatatagtatacaaattgtaaggtaaaatggcaatttactgtgtggcaccaggtatttaaatgtgcactgaaaaaatttaatgtatcattcaagtatgtgctttagttatttagcgttcgttgttattttaacttcatgaatatgctgccatttattctttggaaaaactgcttgatctattgtatatcaaaggcagcataatttctaattcagtcggcatacatgttactaacaacaattcctctttcacattagcttaatttatataatgatcttgtcattttttcctcattatgtaaattgtgctttcttcactgaaatattaagaaaaacataataaatatcttcctatgtttttcaaaatagtcctgtcttaggctcacaaatgaaaatttattcctacaatgaatttttgttctgtttttgagacgaagtctcgctctgtcgcctaagctggagtgcaatggcacgatctcggctcactgcaacctctgcctcctgggttcaagccattctcctgtctcagcctcctgagtagctgggattacaggcatgcaccaccgtgcccagcaaattttttgtatttttagtaaagatgggggtttcaccacgttggccaggctggtctcgaactcttgacctcaagtgatccacccacctctgcctcccaaagtgctggaattacaggcatgagccaccccacccagcctctataatgaattttgagtagaaaatttgatgatggtgtggaggcaggaataagaactaaggatatttttctagtattccatttttaaactggcaaagttagattaacaagagtcacaaacttctaattaacttctaattctgcatatattttgtggaaaaaatcttaaaattcttagaaagttcctgcttattaaaaagtttaagtctggccaagcactgtctgtctcttaaaaaaaaaaaaagtttaagtcaacaaaagatttaaagcatacttgttatacatgtaacaaacacaatgggtaatgaagtaaaaagcggttctttttaagtttataaagaccatagaaccttggaaaaacgctccctttgaggccttgtcttatatgcaaggccatatattagtaaccacatgctttttgcactagataaatatagatcatcttatcaaattttaaattattgataagttatagtttatacattcttctaatattctttattggaaaaaatagttgttaagtaactctaataaaaaagatcaccagaacacaacagaagtagttgtgttgaaagcttcatttaatttgaacattttaaaattggaatatccttaaaatacagtcaaaaatgaaatggctttttgttgctgtatcttaatatttttaaattcctttttcaaaatttcttagggaaatttagaaacatgtatatgaagtaatttcacttaggcagattataaacctcagctaatcttagccagcttttcaacaagagtctggtttatagatgaccataactgaaaaatgttcacttacctatagcaatttgagtttacaacagcagctaagttggtatttacctgggactgatggaaaaattagacttttattttgtagaccaacaattcagaaactgtggtttgttgcttttttcctgtctctcctcttcgttgaacttttatgaaacttcctttcctcaccatgaccagaccattgttgacttttctctctgctgaggcagaaaaatgcttccatagtccatgcagcaatgtttaaaacaagggattcgttcccccctccccttttgtgtaggctggttaataaactctatgtttcatagcattgtcgtgaatattcagagtgctccctgcgaatggttttcctactatctctgttgtgtatcatttctgtttatttgattcgtggttctgagtggaccctaccactgacttcaccaagaccttcatgtactccacaaccctttcatcttggtcatatctgtttttgtacaacaccctaaaactacatggagtcttttaaacttggtctgttttttcaatccttttcttaacatcgtttaaaatttttttcccagtgccactgctctaaaatctaacaaacaatcatttctttccaaagattaaatccgtttttctgtgctataatttcatgtgaaagaagaactaggttgctttgctcatatgtacagttcttaaaataagttgtaggtaattaatataaaagttgtaggtaattaatgataaaaattggtttcttgtggcttgctgtattcagtccaccacagtatgaacttcgcatgctaaatatagaaagataataagtatctcatgtaatgacaactaactttatattggtctttatataaacttaaatatataaactttatatatttagtctgcatactttggattagtgtgcatatttacttattgtatcataatttccaaaacagaaacaattgatatcttaattagtattctattttattggagtttgcactaggctttttatttcattgtgttacatttaattgaactaaaccgataaatttattgacattaatctgtaattcatcatacatttttcatgcctgatataattttagtcattccatgtgtttttgtttgatgtattctaattcattccagtcagtccaaatgtactgtcttccataggttatccttcccttcaagtggaactggaaacccccacagggttgcactacacaccacctacccctttccagcaagatgattattttagtgatatctctagcatagaatctccccttagaacccctagtagactgagtgatgggctagtgccttcccaggggaacatagagcattccgcagatggacctccagtcgtaactgcagaagacgcttccttagaagacagcaaactggaagactcagtgcctttaacagaaatgcctgaagcagtggatgtagatgagagccagttggagaatgtatgtctgagtgagtatcctcaataccttggaaatttggctgggtccccaaaagatgttaaaccagcagagcctagaaaactaggagtaagctctgagcagcaggagaaaggaaaatctggtcctgatgaggagatgatggaagagaaactcaaatctctatttgaggacattcaacttgaagaaggagtagagtctgaggagatgacagaagaaaaagtacaggctattcttaagcgtgttcagcaagcagaactggaaatgtcttcaattacaggttggcagaatgagacatcaagtggaaacctagagtcctgcgctcaagctcgaagagtaactggtgggttactagatcgactggatgacaggtatggctgtttcaaaaaaaggaaagtgaacacaggttacttgttaatagtttatcttaaatacatgctttttagtggtgacttcttctaaattaccattctagttctgggataaaacctgctttaaagaccagttcattatgctaatctggaaaggaaagtgaatttaaatttaaatttaattctcaaaactgttgaaataaaatacaagaaaatttacatacatgcccaagatttatacgttgtctttactttagaatactattcttttctactttattacttgtatgattcttttcatatagccagtaattattgttcctttaaaataatgaggtgggtggatcacctgaggtcaggagttcaagaccagcctggccaacatggtgaaacctcatctttactaaaaatacaaaaatcagctgggtgtggtgtcacgcacctgtaatcccagctactcaggaggctgaggcaggagaactgcttgaacacatgagggtggaggttgcagtgagctgagatcacaccactgcactccagcctgggtgacagagtgagactctgtctcaaaaacataagaagaataatgaatgaaagtccatgttatttagaaatataaacattactgtttttttcctaactgcaaacataaatatgctcattattaaaacttaaaatgcagattaaacaaatcaatacaccccatcatctaccaataacattttggtggattttcttctacgcatgattttttaaatgtcttaatgtaaaaagtgcagagtagcaaaaagaaaagccatccattctcctaccatactaggaaaaactgattttacatatccttctatttttccacgagtcttatttttcataatttgaaagatacacagttttttacaccaaataatattgccatgatgaacatttgtctttacccaaaataatttcctggtcacatttgtctttacccaaaataatttcctggtcatgaatttggttaattcttatactggccttgctctagaaaggtgaaagtctagaatctgagacatagtttcaaatcccaccaccattaggaatgtagtttgtgatttgggatgaatctctaagctctaagaatgtcactctaattatctttaaatataagaatactactaccttccttaaacagatttatagatagaaaaagagaggatgtatcatgtctaccaaatgactgacacaaatagtaatttctcagtagcactaggcattatttttatttacatacacattagactaaaatatattttacttcagtgccagctagtgattaaattggacacaagagaacttatttcataaccatattttatatttttatgtcattaataagcttcttgctcaataaaaattcccaaagagggagtttacaaaactacttttgaaaaattgcaggcatgaatgaactttatctacagcctacaaaagagacagttgcaaagaagacaaacagtactaattttgatgtctatgttcagatatagtcacacaatttatagttacatatcagggaatagatataggaaaggtgttcatcattattaaaccgctgaaattccttgttttatataggctctgccagtgaattatatagaaaaaacactagtgaatcccctggttccatagaaggaggaaaatgccagtcactttgctcctgttatcagaatatgcagggtaggagaacgccggcaagcaatgtggactggggaatagaaaattaaaccaaagtcataaagctatatgttacaggatcttcacagtatgcttggattgtttatccttacacataaagaatagagtgtgctatggatgtcttttaaaaataagtatgttcagataatcagaatctgatttaaaggaatacacacacatatataagtatatattatacatataaagcattgtactagttattgccttctagcggtaataaacaaagatgctcaaaataatacgcaagctacaaaaaaagtgaaaaatagtctatactgaaacttgtaaaaaacttagaagtcaatttaaaagaaagcattggaaaggaaagagttttaatagttaagggaaaaacagttctctcagtaggtagaaaagggtgtgcaaccctcaaatcactagtgagattagcagaggtcaagagtagagaaaaatgagattcaagtaaaggtattagagttggaaaagtaacggcaggattcatgactgaaaacatatacaaagaattggaatttggggtacttgggggaataccacagtcttgaccacaggaatttgttttgttcttttttggagacagggcgcaattttttgtacagtagctcaatccttgctcactgcaacctctgcctcccaggctcaagcgatcctcccacctcagcctcccaagtagctgggactacaggcatgcaccactgtgcccactaatttttgtagttttttggtagagacatggttttaccacatcacccaggccgaactcaaattcctgggctcaagggatccttctgcctcagcctcccaaaatgctgggaatataggcaagaaccactgagtccggccagcagtttattttttactggtgatagagaagcgttctgaaatctcttctcctttaagattggtgggcttggaactctaggtatgtccatgagcctttcaggatcactcatcaagatgatagaattcaagtagctgtagaactgcagtttgtttatttagacgagagcatagctaggcaatttggcaactgagatatgggggatgtctagaagctgtgtagcacctcctgacaccgcacccatgagagccctttacattttatttatttattttgagacagagtctcactctgtcacccaggctgaaatacagtggcacaatctcagctcactgcaacctccacctcccgggttcaagcaatcctcctgcctcaggttcctgagtagctgggattacaggcacgtgccatcacgcctggctaattttagtatttttagtagagatggggttttgccacgttggccaggctggtctcgaactcctgacctcaggtgatctcccgcctcagcctcccaaggtgctgggattacaggcatgagccactgcgcccagctacattttaaatccagtggccacacttttcacacttttctattttatgccttcagaagtaggcaaaagacacagttcttaaaactttagagtttctgcaacctatattcagtcatagtttgccattgtgaatttgcaaattttctgttgcagccctgaccagtgtagagattccattacctcatatctcaaaggagaagctggcaaatttgaagcaaatggaagccatacagaaatcactccagaagcaaagacaaaatcttactttccagaatcccaaaatgatgtaggaaaacagagtaccaaggaaactctgaaaccaaaaatacatggatctggtcatgttgaagaaccagcatcaccactagcagcatatcagaaatctctagaagaaaccagcaagcttataatagaagagactaaaccctgtgtgcctgtcagtatgaaaaagatgagtaggacttctccagcagatggcaagccaaggcttagcctccatgaagaagaggggtccagtgggtctgagcaaaaggtacgtcatctggtcatccggtagcagtcattgaaatggaaagtatcggtgctttacttctttggattgatcttgcagccgggggcccaaggttttttacgatttctaaattataaatgtgtgaaattgtagcactaatggtggaggtaaagaaagtactgagttaaacacataggtaaaaaaaaaagttccaagtaaaatgtatgccatttcgttataccttcattcatggtgcaggaaaagggaataagtatctgtttagccatttttaggagggacaagaaccagagagacgttaagtaactagtttaagacccagtattttatctgggatttaggtttcctaactcccactccgtgttcttccttatgggaggaggataatcattctgatcctttctggctccttggcataaacagtctatagcatctgacccatctaagttctgttctgtatggtctgttgtctgaaagcgtgttttaaaaattaaagagatgaaattccaagcctaaaatgaggtgagttgacagcagttagttagaaatttaaaattagaagtataatttttataatttatataagttgatgatgattgtcttaacatgtatttctaatcactttaaaacctcactgtgatagatttgcttgttctttgtacttttgtggtacaatctaatagatttttttctttgaggtttactctatttttagatattaaaagtattttaaactgaaatgatgactcatacgtggatataagaaaataaaaagcagctctgtttcctacattttttactgctttttactctcccaatttttatgtcttttcatcaattctgcaatagacagagattaatagtagcacttgcagttttcgctgagacatatccagttcactgaagacccactttagtgttttgggaggaaaaaacaagtcttttctgaaataatgagttcaagattgatttgaggtttaggaagacttttagcaaactcaatcgctcaggagctgattctcagcttatcagtaatcacatcctttcctattcccttctgcagacaatatctgactattttcaggcttgttagaagggagagtaagaggaagtttagttctagatcatctatttttttttccctgtaagtaagttgctttgatataagatttggtggtggtaatcagttgcttaaatgatatcctaaaataatctccagctcatttaataactgccttcactaaatttttattaatggttttgttttagttttaagctcttttaagtctttttcaggccttctttaactccgtcctgacaagtgtggttttgaatactgatttctgtctttgacttgacttttagtatatttaagtggtgtgagttttggataagtttccttttaaaatgatcccacaaaatatagagagaagcaataacatagtggtatttttcctgtgaatatttattctgcaaaagcctgttaaagttctaaaggcaaatttctatacaaacacatataaacaccgctgtgtgtgtacatgtgcatatgtatgggccactggaaaatcatattggccattggcataaagacggttgaaaatttagttttaaaccttgagtggaaacttagctgagtttgtcagtaatggaaaataatttaccattagaaaacattttcaggatttcttgtaaatgagtttgtgcctctgatattggtttcgagtcctattataatgcagaaagacttcatgacctaaaaaatccataatggagttaaagcttctaggagacatgaacctgacctcacaagaaaaccaaagatgtttaggatgtatcgtttgtggctataccatagtataatagcaaccaactaggtcatctgatgtatgatctcagaaaacagccccctttttatcccctaaaaaatcaggtcaaaagtccgggtgcggctcctacacggatgactgcctgctgttataaggtaaaattctgctattttccacctgtttccatgcagcaacccatggcaaagagtactgagaaaattccatttggtttccttgttttcccctttaccaattcctagataattcactaaaaggaatcctgagcctgagattcttcctccattttcactttaaggttagcagagattccagggaaaaagtggaaactgaaacaatgaccaaatggccactttttctttatgtaaggggttggcctcacatgatttttttgtaggattatgctataatcacctctaggtttgttgtttgtgtttgctttaacatagatgctcttctacttttgaattcacccaagtgaaaacctttcctcaacttatgattccatgtacagataattcagattcagttttcccttttgcctcatccaacccattaatcctggaatgctaataattcttttctttcgtcaacacagattccttttacctctttctgacttcttgagcctttgcaaagcttccttccacaatacttaaatcattctaagtctcctaaatttactgtcctttactgaaaaatttaaaataataatagcaaacttagttcaagttcttactccttgtaaggatagtggctatgattttcttttaaaaccatattattcagtggggtggtttgttgaggtgaaatttcctgtaaagtcaaggctgatagtactgtttaacattttaaaatacttgtcaagtttactgttgatgaaaaagatggcctagtttattatctatacaactaacatttcataaagcattttatctaacacctgtacctcctatagcagttttatttttttttttaaacaaatactggaattcatttttccagcggatgttaactaaattctgtctctgggactattagatttgaggtaatgaattaacttcaaagataaagtaccagaattattttcatagttccaccattaaaatttagaaatttaaccactcagtaaatactcttccccatggcatctaagtgaaagctaaagatattttccccttcaaattatgaactatttgccccttggtagtttttccagattcccacctttattgcctaaaaattaatattttgtgcagcaactatattcttgtctgtgaaaggtattctattttatattctaatttcattatcagttctttaaaaaaagatttcaagctttcatacatttattccttcattaaattctttctcagtaccagttatgtgttaggtacaaattatgctgatattaatctcttgaatataaatatatgtgccaaaatatgctaatataaattctttacttgttgttgttgttgttgttgagacggagtcttgccctattgcccaggctggagtgcagtggcgcgatttcagctcactgcaacctctgcctcccaggttcaagcaattctcctgcctcagcctcctaaggagctattttttgtattttagtagagacagggtttcaccgtgttggtcaggctggtctcgaactcctgacctcaagtgatccacccgccttggcctcccaaagtgctgggattacaggtgtgagccaccgtgcccagctagattctttactttttaataaagttcaaaatagcttttaataaggttgtcaaatttgaccaaaatttcatagaagtccaaaatattatgcctctttctgtagatcaaatgaaatatggcccaatttacaagggtatacaccttcatggtagatgaatatagattttaaactagttttaaaaggaatatgaatgatttaattgtagtttctgctgccaaaaagtctccataattattttttaataacttataactaccttgatctttacctgtacacacacacacacacacacatgcacagagtaatttcacttagaatcctggtcaaaaattttcttccacttaaattttttttaagactctcacaaatatacatcatggttttctttagtcggcaaaaaaaaaaaaaaaaaaagaagaaaacatcaagtaagtgtaattctttcttgatttcccttctcagaatgtcttttattttaagtgtgatggtaaaattatactaaaaatgcatttgtcaggacttgaaagacagtgagagtgattcaagctcagaggaagagcggagagtcactacccgagttattcgccggcgtttgattataaaggtatcctgtagctggatcattatgtggcattgctctactattagaaactccttccttgtggttgtagaaactccttccttgtggttgtgaaatttcagcatgcttgataatgaaatggctttgtgtaatttttttgcacccttgaaagcttgtaaaaacaacaaccaaaaagaaaagaagccatgttgcatggtattctgtataggcctatttgatatgtggcggttgtagttttatttgagaattcttggcatttgtatcctgctttccttgaagaagtgttatgtgaatgagcaaagattctgtcttggtgacacagtagttcatatcaaatgaaatgtttaattgaaaccttagaaactgtaacaaggtatgaggcacgataaagaagaaagagaatgaaagaattaaaaggcttccttctcagtctcaaattcctactgccttaagaatttttaaattaaaaccagttcttcataagcaatcagtggctgagaatttgaggttataacctggcatggatatatgtgacacaatgcaagtcaagtaaaaaaaaaaaaaaatctgaaataggtgtttgtttaactttactaacacacaagaaaaaaatcaagctgcatttttaagtataggagtcaatttaaaaaaaaaaggaaaatagaattcttccctattacggcacaattgaaaacactattaataaatattctgtctttccttcacaaaggtctgttgaagcacttaccttttgcgtagtaaggttccacagaatgcttcttgtagtctcccccttgtcttcattacttcgtcatcagatctttctaagggttagaataattgagttcagagaactagaaagccattttcaatgcgcagacttttgaatatgatccaaataacttgaggcttcttggttactgccctagagagaaagaggaagagaatatctattgaaaaccatttatcaaacttaaccaatcccaaagtgtcaagagacccaacagaaagcacagaagttggcacaggtgtccaaaatttcttaatcctggtgcttttcacttttcatgaagaaactccaccaaatctgccctaatacagtttttctaagactctggaaacattagggaagaaaataaatcgttgtctaaattttgagttatcctgcaaatcaattgtaagctcaatagggttcctttaaaaaccatgaatcacttctttgaaaattccatgtatataagcaagccaaattacttattgctgtctagcacatttgcaagtatttaacctgctatcaataaaatcctcataatcagtcacctcacacatgttctctgggttggggtgggggaatgcttgattctgtttttctgagtttttgctattctcataatcagtgtcttcaagatatgatattttaaagtgaaaggtctagaaaaagcacatagtgcttcgaacttgtcttttatgcttaacatatcacatactaatgttacatctaaatccaccacattcctttataatagctgcccatgatagaagttgactttcttctatccaggacaaaagaaaacaaatatagccatgcaaaaaaagtggaaggcggggataaagaagtttttctctgagaaaacaaaaacaataacttcaaaacctctcaaatcaataagggctatttcctttggtctcctagaattctagatatgcaccagcaagttagctattaagtaattttcttagagtaagttatctttgtttttcagcttaaaatatgattataacatattaacatatttattaagaacttaggtttaaaagacaaaaatccactataatgttgtaggtttcataaaaacaggggagtccgtattctccccaaatactttttttttgagacagagtcttgctctgtggccaggctggagtgcagtggtgtaatctcggctcactgcaacctccacctccccagttcaagcaattctcctgccccagcctcccaagtagctgagactacaggcgtgcgacaccacacccggctaatttttgtatttttaatagagatggggtttcaccatgttggccatgatggtctcgatctcttgaccttgtgatctgcccaccttggcctcccacagtgctgggattacaggcgtgagccactgcgcccagacccattacttcttgaagttaatgtaattttagagagattgagtgaagtcatcagagaataggttttataactgaggaaggcattgtataaacaataggatcattcacaaacaagctttgagagatatctttcatatgagatggaaaaaccaaaggctaaaaaatagttataatcatcattggaagctataggtataacaaaaacactttataaattatttttctgttcagatttttggggcaattgcaaagagtcacacttctgttgcttttctctttactccatatgttgctatctatctttctaatggaaaagagcttgaggactataatagtatatggtgaatatgacatgggaaccatctcttgtcaaaaacataaaatgggaatgtagtacctaaatgggtcattgagactaaaattactgtgtttccaagatctcagaactgaagattggagataaatttatttactcaaaatcacacagccagacagcagcagctctgggactagaacctaatccctagccctctagtgaagtgctttttcctcaatactatacaattggacctccatatctgggcattccacatgcacaaactcaaccaaccttgagaaaataaaacaataaacagtagaagtaagaagcaatatagtataacaattacttacatagcatttacattatattaggtattataagttatctagaggtgatttaaagtatatgggagaatatgtgtagcttatatgcaaatactgcaccattttatatctgggacttgagcatctgcagattttgctatctgcaggggtcctggaaccaatccctgtggatactaaggaacaagtgtattctcttccagaacaaatgaaaaagtattcctttttgctaggctaaatcaggtatttgaccattcagatcttttcagcagcacagaagagggcagcattgggctgtcattcctgggaaccatttgatggggctggaatgctgggaatttgacttacctcatggatgctgtccaaacctggactgaaccagcatagttaacactgtttgccatagtaagccccctagcacttagtatcccagttctgaaaactagtctggggtggttccatccctcccagagctagctctggctgggaagtatctcccagaggaagcagtatgtatgctaagcattggattgccaaaagtctgggcaaatctgtcttcttagaattccatttgtataataaatgaggtgacggcgatttttctctttactttcaaagtggatccattctttttctatgaagttttaaccttttttttacatttaatgttttcaaactcctatagaatgagtcaagtcaacaaaatctcccatttgtcatgggacttaaatgaatgtgctgataaaattctgatctctatacaatttgataatatacagtggtttcaaatgcttagaagcaatttatgttactaaccagtcgtgagtttaccttattagcttagcaaatccagtaactgcaaaggtaaaaaactgtaaaccaacacacaaccaaactattgtgaaatttcataaaattcaaataactgaatttttactatatagtacaactgtatttttatttcaatttttcaacatttttactggttttctaaataagagcttacatgtatgtttctgctaactcaggcagttcaaacgtatggtaagttctatccgttcattccatttcccagaggtaaccactcttcacaagcttcagattgtttttacatacatatacaaatatgtgtgtaaaatatgtaggtttcgtactattcatattgcttagtatttgctttttgtaaaatatatcgcatcaatcctatttttggacaattcaagttttaacgtatccatcaaagcaaattggtacatttcatattgtcactcttccattttattcaaaaattctaagagaaataaaagttataaaatgcagtgcttctagcaggagtccagagggaagtacagttaattttcattaataccgtcaccagaggtgaaaatgtaacaccacatgtgctataattttcctttataatggttggggggaagggaagggaggttgccagaaatgatgttgtcaacaagaccacggggacaattttgtttacttaaaaatactaagtgttttcaagaactttaaaaacctcattgaggccgggcgcggtggctcaggcctgtaatcccagcactttgggagcccgaggcgggtggatcacgaggtcaggagatcaaaaccatcctggctaacacggtgaaaccccgtctctcctaaaaaatacaaaaaattagccaggcatggtggcgggcgcctgtagtcccagctactcaggaggctgaggcaggagaatggcatgaacccgggaggcggagcttgcagtgagccaagatcgcgccactgcactccagctggggcaacagagcgagactccatctcaaaaaaaaaaaaaaaattgagattactttctcccattgaagagaggccttagagctctctcttaggtaacatttggtctctaatatagttgacagaattaaagatggataaattttttaaaaatgtattttatgactccctgctgtctttcctatctatttaatcaactcctatctaatctattcctcctattcattttggcttattatttataaataggttttgctttttgtaaggctattaatctaagtcaatgaatctaagtcaatgaatacatacttgtatgtattcactatgcttatacatatgcttacttcatagtcctttcagagattgtccaaacaattcaaaaattaactgacatcttttcccacaaaaagattcattcagtacctgcccaataggataccattttagggattttcctgggttctttaattgtctatcactcaaagatgtgtacatttccaaaagttagctcaaaaatatttgtcattcgtgtttaagctataaggaaaactttcattactttttattggctttttttgctgtccttatgactttacttttaaaataaaattttgggttttctccaaacatttgaaaccaccaaccatagaaaatacaaataacactgccattaaaaacgtgttgcaaattttagtgtatttacacaagacctctacatttttccagtttttctcccctctcttcactgcgctgattcaaacttgtcataagcaagattggagatgcactaaacaagatcaagcaacaccttgttttattttcattccacctataccacagtgaggaaaaacaagttaaatgtcccgcccattgtcatgaactatgcacccacaaactgtaagaacacaaagtcactttgtaataagaaaaaaaaaaaatgagaacaaaactttgctagcaaaacaatagtgttctagtctttattctgttattttgaaccagaactgcctttctactgattgtgacatatggtcacatgacatatggcaatcatagaatgttctcaccattggctggcactgaccaaattatcagagccactatcttttccatgccagtaacacaaagagttagaatctcacttttccaggaaggcagctgtttttgtgattggccattttccctaaaacaaaacaaaaccacatctgtacactgccaagcagcattatccatttcaccttttcagtaagaagtttgactgacagatcaataggaccctggaatactagtccatccttaagatctttatccttgttctcccgaactataagtggcacaaatcttaagttaaacacaaatgaaggtaatgtattgcagatatggtcctacttctgctgagtagtttgtcgtgttatacaatcatagagctagtggagagatactatggagccatctaaatccaccaagctgtctatgacaggaaaataggcgcccaccctggagagttaagaatgtattctatttttaaaactcatagtgagacctttcagagtttcccctccaaaattagataacaaatcagaaagccagattctaactctgtattactggaatgtaaaagatagtgactctgataattttgtcaatgccagccaatggtgagcacattctatgactgccatatgttacagccaatagagatgcagcagttctggtttaaaaatgacagaataaagactaaaacactattgttttgttctcatttttttttattacgaaacaactttgtgttcttatagattgtgggtgcatagatcagaagatatcatcttaaattcccttggtattgattttatctatttttttgcctatggcaatgaagatacttcagtgtataaactatgtactatatccgacacaattattctcacttaagagctatgaaagattcagtcttcaagattctctctgtaccctcaacttttctcataatctttcaaaaaatgtgtgtattatctttagtgaatgaatttttaaataaaccagagtgataaatatcatgcccaaactaaggtactatcttagttcaagttagataaaactcaatccacaaaaatctctagagattcggtagaactaatgaagaaacagtgcttaaagtgagacgatctaatcagagctctaatccttggctaaaatttgtctcaacatatgaagcctttcggtttacagtgtgtaactgcatcctataattatgtattttcaaattcttccttctggaatctgttgctaaccatcacgcttatacatacttgaggtttaatgcttgaatgttgttgactgctaaataactgtcagtgaagtcagcctttttcccttgcactggagtagcaagtagaatttacaacttatttctctaaaattccagagcatgtgtgtggtgtttggagtagtgtggagatttctccatctagtatgttgctaatctttatgccacatcctttagggagaggaagcaaaaaacattcctggtgaatctgtcacagaagaacaatttactgatgaagaaggcaacctcatcaccagaaaagtaatcatcattcagatttcatgcttctcttggaatttagattttctgcattaaaaactctgctacttttgtgctgtagtgtcatctcctaaaacagaaaaatctctacttttcaccattacttcctacagatcactcggaaagtattaagacgaattgttatcccacaagagagaaaacgtgatgatgtggtaatggagagggattgccaaagagaatgtagaggacaaaagctttgtgcactccctagaaattgctgctaacaggctggcatctgcagtgtggcagcttgaagtgtttgctgcttttgacatcttatgcatttgatcagggtcaaagaaaaatacttttcttcctaacattctttgttacatactttttttttttaactgtcttcagagttttcacaaagataaggtcatttataggggacagaatgtgccagtttgagggagaaagaagataaaaccttcaccattcaccaccaaacctcagagcagtgcttcagccccacccagggcttggccttcagcagagtgtctgttgggacaggggcggagagcactccaaaagcacaggctttaaaagttagaatggcaaaaggctcagttcaagatctgcacatcggatccatacattttctctttccagtatgttctgcagggaaatctgaattcctccatcttcgtctgaggagggggttcccctctttgggtttataacagcccatttccaatgtgccagttaaagaatccctccagtcaacccctttctctcagagaaaacatctctggttatttttcacttgtttctcagatctctacccttttcaatttaaaaatagaaacttcaatagacaatgtttacattagaaaaagtaaactgaaaatttatcagaagtacaaatcacaaaattgaaaaggcttcatttgttttctgttaaaaattgggtaaaaactgagtatttgtgccacaaccttgctctcggggaactgtattcctgatgctcagtgaagagaggatttgtttatgcaaaatagatgccttcttggtctgacagtaagaggaagtcattggcaattccactaacttaaaaaagtccctcagatcaacagcatttccatggattagtacttaactaagaagtctgaatctcattgcaacagattgtttacaattctgctgccttgtgagctgtggtgctgatttcttttagcttactataggaaatggataggctgctcgttattttgatttatcactaacttactgaattattgtcaagtacaattatgttgtattcattttgacagtgctctctagcttgcttgatgatgctaaactgtgtggttaagctaaagattgtacgtatttttggacatgaagtgacaaaatgctttaaactgtttcgcttgtcctaatccagcctccaaggatcagaatggactgctttataactaacactgtttcactgtgaaatcttaatatgtacactcctttcaaagcagggagaaggttttaaggtgaaaacgaagaaagaaatccggcatgtggaaaagaagagccactcgtaacagcgaacggtcagtcaaggtgaggtgtgttcatatcaacaacagtaggacttaaattcctgtgaaacttatatttttcactaaataagtgattctgattttccccgtcctttccttttcactgaatttcagctttgaaaatcaaatacgaagttgttcaagttctgttgatgtttgcatatatacacacaatgaaacttgacttcggtttcacagtccattaactttctcctcacaaattaggcagcaatttaattgtaaattatgtttgcagaagcaagtataaatagtgataagagtaaaggctcactatgaaatacaatagccttatacaatctaacaggaagactatttggcaacgaatacttcttacagttatactcagagttttattgatccagactttcaccattttagcagaacggcatctgaggatatcattttggttgaaataagtgactttccaagtctaaattaaatgactgacatatctatctggtgttttatagaaacaaaaggaaaaaataggaggttaatggcactgttgtttgttttttaagttaaatgtttagtaagtgagctttgtttacatttgcctggacttttctttacagatcacgttattttccttttacattgtcctatttatttctacttagctacaattaggccatatggggtgaaaaagaaagtcctctatagtctgtaaagtaaagcaaaatcacttcctttagttcaccaccagtcttcttagccccacaggttaaagtagtaagaaagagcaaacagattctagttttcattttcatgcatctgctgttccctgcttgccagaatactggtatgcagagtgctgagggaaggaactgggaagtaatctagtttcactgcctgtaattttatgtgtgagctaactaaggcccaggtaagttctcaattctccctccccgcaagccttatcatttgtttattcagtataacatttacttcatttctttctgtgagactttctcacatgaccatttaatggcattgagaagaccactcagaactgcagagcattctggaaagaatgtttactacacatcctcttcccagtgtttcatgcgtgctcttcaggcaatcctcacagccaaccctcttggataaggccttcatcatccccatttgatagatgaggaaacaggcccaaagtggttaaataaattgcccacgctcacataagtaaaaagtggcagaactaggatacaaacccgaacaagctgcctccagtgtccacttgtttgccagagacttaacctgggtcggaggtgacggggaaggtttccttgagaatatgatgtttgagctgaattttaaagaatgagtagcagtcagtcatccctgtaaggattctgggctgtacccgaaaagcagtgggaaaccactaagggattttaggcaagagtgtggtatgatccagtttatatgttctgcatcactcgctctaaatgcagggtagttgttaatgaattggaaggggcactggtggatgaacagaaaacctgttgagagactattgcagaagctagcttggcagtgaggatggctaaataaaaaaatttcaacacaacttggtttttattggatgagaaggatccaagatgagaaaatgaaggatgacatcaatgtagcagtagctagaatgaacccactcctatgcatgtcctactgctgaacctggtgaaagacttctccctatagcagatccacaaaatactaagcatgagtttgttatcttgaattcgtctatttatgcaattctaagtgaaaaatgaaacgaaagtagaaaagaggtcagtcatctgtagtatgcccctaaagtttagcagcttgttcaatcatattctcaggctcctagtggaaaagaaccaaaagggttacctacaccagctgagccattttctacaatgacatattcctaatacctgtgaataaatgacaccaaaaaatatgacagtgctatgcttccagggtcctttagactgtgttgatttaaaaacagcttgctcactaaatataaagaaagttttaaaattttaaataatcatcctataaagaagttgtcagactcacttgctgcaccactcaaaggagagagaacgttgggtagattcatatgaatgtgaaaataacttcagctaaagcaaacaatgtgtcagattgaaagaacagtgacttgacaagcctaattttactttccaggtagtgtttaccttccgtaagtgaacttagggaatgagtccaagaatactgcctggaattccaggagactgaatgtatgtgctccggaaaaatcaatttgcaaatatattgagagtttttatagtcatgctggctgcctctttaaaaaaaaaaaaagaaaactaagcaagtagaatgctgccaaatatgactgagtcttagatggtaacatcaaaatttgtatttcccattttagaagcagttgaattttgagctatctgaactctgcccctgcttttctttaatattgagtcatagccatcctatttttaaagagaaaagccaatgactttcaagatttgtacatagtatatagtgatttatagtttacaaagtacttttacatttttgtcttatttaatccttccaacaagccttaaggcaagtcaggcaattttgcttgtgaccttttacagatgaggatattaaggctcggacagctcaaatgatgtttctgccttcacacagtttatgactggtatagctaagacttgaagtcaagattattgattctcagcctaatgttctgttacactaagctatctctctaaaattatttacaaagaataataacaatcatcttctgtgaaatgattgctatgtggcaggcactaggtaaataattatatatataaccttaggaaatccccaaaacaatgctataaggtaaatacaactatcccccaaccccttttttaaaaaaatagggaaactgaggttcagaaaacttaaatgatttactcaaggtactacagctagggagcaaaagaataaaatttgaacttatctagaacatagatcttaactactacttatattaataaatagtatttgatcattaaagacccaaaagcaaattctgaatcaaatacaagcacaaaagcaacctgtcgtaaatttcttcttactctacacagtgaaaggactcatagttttttattcttttttcttaaacaaagcaagacttcatttctaaatctctagatttttacttcaaataccaaaaaagggggctgatttgtgaggtcatggcaagggaagatccccagataaaaggtcatttaagccatggcaaagacttgcatgacacatactgtattctaaacctcctctaggaaaatgctcaggttctcacagccatgtgtaagccaagagtggcaagagtgcccatgcttgtcaaggcagccctttacctgaggccaaaaagttaacccatttcatttatttcttcaaagaatatttggccatctgcctggcttaaagtggaaggactagatatacaatagtgaataaatgcttcatggtccctgtctttctggatctcccagtctgcaatgggaaaaagaaatgggacaaatgtttaaacactgaaaatacaaagtccaggatccaatgaaagaatgtaagaatgtacttagactttggggctagggaaggtctctctgaaatcatgacatttaagctaagacctcatcagtggcaccaattatgaaaataatggagaagaagaggaccccaagcaaagggtacaacatgtgcaagcaccctgaggtgggaaaaggcctaacatagttgaagaaatgatagatcagtgcatgatctttcatttcttcaaatatgtaagattggtgtgtgatctttcatttcttcaaatatgttaggtgagctggtggtaggtaagataggcacaagataacattaaaacacacacacacacaccatcattcagagccctgtaggccagaggaaaggatttagatttcattctaaagggaatttaaattccttatagatgctcgatgttagacttttgtcagatacatagtttgcaaatattttctcccattatgtaggttatctctttattctgttgatagtttcttttgctgtgtagaagctccttaattaggtccagtttgtcaatttttgctttttacaagcaaaaaaccacccaccccattaacaagtgggcaaagaacatgaacagacactttttgtttcttcttttatttttgagacagtctcacctgttgcccaggctggagtgcagtagcacaatatcggctcattgcaacctctgcctcctgggttcaagcaattctcatgccccaaccttctgagtaactgggattacaggcacatgctaccatgccccgctaatttttgtatttttagtagagacggggtttcaccatgttggccagggtggtctcaaactcctgacctcaagtgatccactcaccttggcctcccaaagtgcttgaattacgggcgtgagccactgtgcccagccacgcacagacacttttcaaaagaagacaggcatgtggccaacaagcatatgaataaaagttcagcatcactgttcattagagaattgcacattaaaaccacaatgagataccatgtcacaccagtcagaatggctattattaaaaactcaaaaaataacaggtgctggcaaggttgtggagaaaaggaaacatttatacactattggtgggagtgcaaattagttcaaccattatggaaagtggtgtggcaattcctcaaagagctaaaaacagaacgaccgttcaacccagcaatcccattattgggtgtataaaccaaaggaatataaattgttctatcacaaaggcacttgcacatgtatgttcactgcagcactattcacaatagcaaagaatggaatcaacctaaatgcccatcaatggtagactggataaagaaaatgtacacacacatacaccatggaatactatgcaggtataaaaaaaagagtgagagcatgtcctttgcaggaacggaacatagatagagaccattatccttagcaaactaacataggaacagaaaaccaaataccatatgttctcatttagtggaagctaaatgatgagaacacatggacacaaaaagggaaaaaacagacactgggatctacttgagggtgagaggggagaggagaggaaaaagtaactattgggtactaggcttagtacctgggtggcaaaataatgtgtaacaaacctgcacatgtacccttgaacttaataaaataattgtttgtgtgcatgtttagaggaattcgaagcctctgaaggattttaagcaaggacctaacttggtcttttttccctctttaaaaaaaacacaagagcacggactatctagagaatggatagggggacaagaataaaatgaaggtaaccagttaggaacttattgcttcagttcaactaagccataatggtggcttcagctgggaagattgacagcacttgatagattagcatggtgggtagagtggagaagaatcattgagtcaaaaatgactcctagatttctggcataagcaactggatgatagagaaagaagcagaagtggaagaggaatgagttttaagaagaatgacaggcattcaggcttggacttgggtttgaaatgctatgagacatccaagtatttatgttacatatgcaagtccgaagctctgaggaaaagttggggctgtgcatataaaaatgtgggaatcatcacaaaagaaatgggtattgaataccagtgaacagatgtgattacctagggagaaaactgaagtaagccaagaaggggctcaaaagttgagtcctcaaaagcaacatttcagagtttaaaaaaatttcctcagccagatgcagtggctcacgcctgtattcccagcactttaggaggccgaggcaggcagatcacgaagtcaggagatgtagaccatcctggctaacacggtgaaaccctgtctctagtaaaaatacaaaaagactagccaggtgtggtggcgggcacctgtagtcccaggtacttgggaggctgaggcaggagaatggcgtgaacctgggaggtggagctttcagtgagcctagatcttgccactgcactccagcctgggcgacagagcaagactccgtctcaaaaaaaaaaaaaaaaaaaaaaaaaaaaaaattgcctctgacctctctcttccgcagagctccaaccatgaccctccttagtaagcactcaataagcgtcagctattgctactagtattaaaaaaaccaagaatagaaccttgaagagctttggattacagaggctggtggactaagcagcagcagccagtgatggctagaatataacagtgggagaagtgagaacagcagtgtctgaaatcctctgcatgtgatggtggtttacacttcagaaaagtttccactatttcacatcacttgtttttcacagtagccctaggaagttagtacaacaggtatccttattcctctttactaagcaatgaacagtgacaaagagagagcaaaatctctaaggctgagtgcagttaatgacaggtctggatttcctgattctgattctcagaagtcagagctatgggctgaattgcttcactacaaattcaggaccctgccctccagaatattttaccggaattcatatagagtaaatatgtttttatattatgtattttttatttttcttaaaaatatataatattttttattttaagaaataaaattagcccagctaattttgtatttttagtagcgatggggtttctccatgttggtcaggctggtctcaaactcccgacctcaggtaatctgcctgcctcagcatcccaaagtgctgggattataggtgtgagccaccgcaccccgccttttttttcttacccttaaaaaattcctgttaacaaaagccttggcttcaagataagagctagaggcaggtggcttgatttccagttctggctccactatatattagctgtgtaaccttgagctcactatttaaaagctttgtggctctctttttggccgggcgcagtggctcacacctgtaatcccagcacttcgggaggccaaggcaggtggatcacctgaggtcagaagttagagaccagcctggccaacatggtgaaaccccacccatttctactaaaaagataaaaattagccaggcatggtggcacatgcctgtggtcccagctactcaggaggctgaggcaggagaatcgcttgaacctaggaggcagaggttgcagcaagccaagatcgtaccactgtactccagcctgggcgacagagcaagactccatctggaaagaactaaattaattaaaaaataaataagaaaatagagccacaaagcttttatttatctacaaaatggaaaaaataatagtacctcagggttattcggattaaattagctaatccactttagaacagtttagaataaatatctttacctaataaaaataataacagtaataaaattttattactgttaggtttttctttcactgctaaaacacgaatgaacagttttccagtatttttttccagccctttgacttaagatactttttaatcacaagtgaacagaaaagaacaatcaaaaaagccctacttattggtattagtgaagaaacaaagctacctgaattgggaattactttaaaactgcactgtagtgtattttagttacataaagtaattaaaattaatgtttagaaaaaagtcttagtccatgatttctgtaactacagagaaggaaaaagagaaaagaagggaaagagagaggtgggtagggagagaaacaaagaactagagtaaagacctctttgtcctcagtgggctcaggctttccttaagccatgacacagctaagtcttaaagatgagtaagagttgaactacaaaggtggatttcattagggaaagaaatctgaactttcaaggaggtggcatttgaaacaaatttgaagggtagaagaggaattagccacagatgataatcagagaaggcaagtataggtggatacaaaatcatgagcaaagacaatgaagttggaaaacaatttgtagttgatacctggcatgtaatctagatcctcaaagtgaagtctgtggaccacagtatcagcatgcctaaaagtctgttagaaacacagaatttcaggctgggcatggtgacacgcctgtaatcccagcactttgggaggttgaggcgggcagatcacctgcggtcaggagttcaagaccaccctggccagcgtggtgaaaccccatctgtaccaaaaatgcaaaaaattagccaggcatggtggtgggcgcctttaatcccagctactcaggaagctgaggcaggggaatcactggagcccgggaggtggaggttgcagtgagccaagatcatgcctttgcattccagcatgggcgacagagcaagactctgtctcaaaaaaaaaaaaaaaaaaccaaaaaacaaaacaaaaaaaaaaacaaaaacagaatttcagacacactgacctactgaatcagaatctatactcaaagactcctgtgtaatgcagattaaactttgagaagcactgttccagaacatttgactggctctcaaattatcgagttttaaaaaatttttgatgctggccccatcccgaaaacttctatataaactggtatgggatgtggcctggatattgttgttgttttaatcttcccaggtaagtctaatgtgcaaccaagtttgagaaccactggagattgcaaaacagcttttcagtgagggacagtgggaattaagcctaaaaaaggttcattgggctggaccagagagcttcagatgccaaactaaagataggagaccctttttaaagctaggcattagggtctaaaatccacaggtatgtccatttgcctataaaaaacaagtcagttctgtaccagagcatgctgctgacttgaagatgtgatgtatgcagtacatatttaactgtaaagtatcagctgccatgaaaatccaatgaattgctgtttccaagtttttttttttttttttttttttttgagactgagtctcgctatgttgtccaggctggagtgtgatggcccgatttcagctcactgcaacctccgcctcctgggttcaagcaattctcctgcctcagcctcctgagtagttgggattataggtgcctgccacctcacccggccaatttttgtatttttagtagaggctgggtttcaccatgttgtccaggctggtcttgaactcctgatctcaggtgatccgcccccctcccctgcccccggcttggcctcccaaagtgctgggattacagacgtgagccaccgtgcgtggccctgttttcgtatattttaaaatgtttcttaacaatacagtggaatggctaaaaggaatgattggttttctgatttagtttctcccacctttaggtttgaaaggcatacaaaacccaaagcaagacagattcctaagtgcaactgcatctatctcatatccattatctaaaccagaaaagggagatgagtcaaaattctatttctgaaatgtcatcttgatggcttctgccctcacaccttcccatcagatggcgctgtcatcacagtttataccaagtgtcaatatttttatagcaagtacacagtcacttagccaaggttctcatgctttttatgcaacattgtacttggtgtaaagtcttttgtccaatgaatgaccttcctgtacccagtgtggttggggccaacaggctctgattgcataaccaagaaaagaaaaagttataagaggaactaactcccacttaaaaaaaatcacccaaaacatcctcactggaatataagtgggcataattcacagcatttttttaaatgatagaaacatatccaatatatccagaaagataacatttgcttggattgaggtgagaagagaaaggccttgctactcattacgaaattaacctgggaagttggattggtttttaggagacatggagaaaagtagtgatgatcacacatctacataaatattaaaaattatcaagccaggccaggcgcagtggctcatgtctataatcccagcactttgggaggccgaggcaggtggatcacttgaggtcaggagtacaagactagcctggccaacatggtgaaactccatctctactaaaaatacaaaaaattagccagacttggtggcacacacctataatcccagctactcgggagactgagacaggagaattgcttgaacccgggaggcggaggttgcagttagccgtgatcatgccattccattccattccagcctgggcgacagagtgagacttcgtctcaaaaaaaaaaaaaaaaaaaaaaaaagaagctgtgtatttataatagctgaagtatgatatacaaattatatatcaagcttcaaaaagtcagggggaggggtttagagaaagcagggagtgagactgtagtaacattatcataggaccatctaagaagcctggtgcctacaagattaggattaaatgataaaaacaggtgagaaaatcctgatcatcatcttctgatttgcccaccctctgcaagatgatctacccaagtgagtcactttccttctttggaacctcagcagagtcacaggggaggggtgttgaaatcacataggaggaattgatactttcatgttcttggctccaagcattagtgacctggggcatggaggtcagtagcacttttaatactaaaaaggaagccaggtcctgtaggggggcagagagaggaagtgctctaccaacatgtttccataagccaggctgtcctaggtgacccatctaaagaggaagatacttgtctgaggtaagtaaacatcttcaaggtcactggaactcctgggccccaagagaagtcgaattctaaaggttgtcctagatctgcaaatatagtctgttgtttatatgggagtgagcagggttattcttaaaattgttcttgccttactcaggatttctataggagctgtatcttgttctcaggcaggtaggcatgcaagtttgtcagcttttcacactaaacaaggaggagagacaatatatgggaagaactttgttttatggaaaaggcaaattcataccacaatagcacacaaaagtatgaaaacctctgccaaagaatgatttattttgacacagtaagactggttataaaacacagatgctttatgcaggaatcttccagcaagacaagacattctcagtggagcctccactaaaaagctcaaatacaattaattcatcccattatgactgacatggacaggaaaagcgaaagttctttgcagtggtagaagtttgtctctaattttaatttggttatggaaaagaaatttcattgtaatgaagtaatgacgcttttcttccttttgaaagattagttgaatttttggagaagtgagagacttacttacaaagcattcagaaatagctgagatgctctatcctgactccttatctctggccctttctgctc

SEQ ID NO: 1407 - DNA, 707 bp, Homo sapiens
aatgacctaaaaacaacaaaaaaaaataacctatacggtagttgctttagggggtggggggatgctatctgttagtgcttaaaagggggtaaatgcttgccgctttagaggtggatggtgctcataaaaggccccagtcgggggtatttaaaaaggactgaacagaaatccttagctagtagaatggcagcacgctgtaaaattattactgtattgtgtactggctataagatgtagacacctttcagtaagccaatcatttgtaaccattctagcagtgtcatattaggttaataaggctgctgtgttttaaagggcatttttatttgggttttggtgaaattctttaatttgttgattatattcacataaaatcagcattcattgacacatagctctaatgacatatgtatgaaaaaccatacactggatgacctagtcgattatttaagcataaaataaattgtgttaaactcttcacctatctgtgctctacagtctccttgtgttttctggcaaaaggtagttgtctaatcccttgtcatatgagtcctggccaatccaccccattggtcctctttgtgcctctgtggtcactgaagagataatctctaacattcatatgtgccctgcaagctcccagcttataaattctgtgcatttcatgggggagccaagaattaaagattaattgacaagtaagcttt

SEQ ID NO: 1408 - DNA, 114 bp, Homo sapiens
tttttttgagatggagtttcactcttgtcacccaggctggagtgcaatggtgtgatctcggctcactgcaacctccgcctcctgggttcaagcgattttcctgcctcagcctcc

SEQ ID NO: 1409 - DNA, 114 bp, Homo sapiens; identical to SEQ ID NO: 1408

SEQ ID NO: 1410 - DNA, 3257 bp, Homo sapiens
ggagctttttttttttttttttggctatattattaggatggtttcaaatttcaaatacagattcatgtgtccaagtatttattatacaaactatttggatcatctttactactataatcaaaggctgtcaccttcactctacatttcttttctaaaaaaaaaaattatctggaccctaaaagagaacatcaaagcaagaagtcagaaacaggcaccactagtgtctatttggtgaggagcccttgtccttcatcagctttgcttcctgaaggtgatcatcaaccccatgaagagaaaccagtgtgaggacagagccaggggcccagcgccccaggcaggcacagccaggggcctgtggaaagagctgatggcatggcacaaacctccacgaggcagcagagcccagcttggacccacacaggtccttggagcctcccccaacccctccattttttttttttttttttttttgagacagagtcttgctctgttgcccaggctggagggcaatggcatgatctcggctcagggcaacctctgccgcctcccaggttcaagtgattctgatgcctcagcctcccaagtagctgggacaacaggtgtgcaccactacacccagctaattttttgtatttttagtagagatggggtttcaccatgttgcccaggttggcctcgaaatcctcagctcaggcaatccacctgcctcatcctcccaaagtgctaggactacaggcatgagccaccatgcctggccgttcactttatataagaataagcttgcctggaagacatcactgcagggggcagaacctcagatcacacactccagttcaatgaatcaaccttgtctcaatacatacattttaaacacattttcctaaacataaaagtaattcgtgtttactttagaaaatgtgtgaaaacaccaagtacacagaagaaaattaaaacctcctgtaattttgctcactgatcacagataataacagacagcacattggtgtttatactttcagacttttaaaaaagtggacacgtaacataagtacaaagcattcactgggttcacacaataagcctgtggcctatggttttcactttataaactctgaacatttttcttattaaatatacttctaacactatttaatatccagtctatgaattatcaggacttacctatccagtttcctagtcttgtacatttagacttttcagtttttactattctaaatcatgttaagatgaacttctttcaacataaatcattctgtatgtaccttaatcttcttagggtaagtctctgaatgtgaacctgatggactgagactatgtggcttttggttttaccacccagtgctctccagaaaggtgttccctggaccgcttgctgagagggaaccaccaatcttcccacactctcactcaatagataccaatcactttagtctctgtcaatttcatgggtaaaaatcactgttgttacttccatttccctctctttgtgtggttaggcgtttttaaaatacttgctggcatctttttttaccttactgtctatttgtacccttcgtgcttttccctatgccaggagcatgactcactctaaggcagcactgccctctgcttgctctccaccccatccccgatccacccagcccaggcaacccttactaaccccccggtgtgcggccttccacacctccaccatgcccatgtcacacacaaagccctgtgtacacgtatacacacacacacacacacacacacacacaggctgtttctttgtttggctttttttttaggatggagtctcgctctgtcgcctaggctggagtgcagtggcacaatctcggctcactgcaacctccacctccccagttcaagcaattcgcatgcctcagcctcccgagaggctgggactacaggcgtgtgtcactacgcccggctaatttttgcatttttggtagaaatggatggggtttcatcatgttggccaggctggtctcgaactccccacttcaagtgatctgcccacctgagcttcccaaagtgctggcatcacaggcgtgggccaccacgcctgacctgcactttgcttttcttacacaataccttctggaaaaactctccaactgttagaaccctgatttactaccttcaatggctatacgatattccatagcaggaattccgcttgattcttcagccatccccctttgatagactttgtcttggtatccagttttctaccaccataaccgatgctgcaataaaagaagtctgtgcacagacaagcttatgtgatgacattttatttctgcaggatagaatgccagggttgaagaatacgctttttttttttttttttgagatgaggtcaccctctgtcacccaggctagagtgcagtggcatgatcctggctcatggcaacctccacctcccaagctaaagcaatcctcctacctcagcctctcaagtagctgggactactcttggtacaatatagatactatttcacatctcaagaaattgttttacaaacatattgttttcccagttatcttgtttatgatcagcgcctcaagagtcaggtcaacagaaattttccaaactgaagcacaaaatgaaaaaaaaaataagaatagagcatgagacatgtcaaacagcagcaaaaattctaacttatgtttacatggagaccccaaaaaagaagacagaagatgaggcagaaaaaaataaatgaagagataatggtggagatttttccaaaattaaaaaaaaaaaaccatcaaggccaaggtgggcagatcacctgagatcagaagtttgagaccagcctggccaagatggtgaaaccccgtctctactaaaaatacaaaaaattagccgggcgtggtggtggtcacctgtagtcccagctactcgggaggctgaggcaggagaatggtgtgaacccaggaggcggagcttgcagtgagccgagatcgcatcactgcactccagcctgggcgacagagcgagactccgtctcaaaaaaaaaaaaaaaaaaaaatgtaggcaaaacacatttcatagtttgacacagcagactcacactagtaaatataaacataaagttgtcaggttgaagggaaatgatcctacatgaaaacacagaatgcaagaaaaagggaaagacctcaaaaaaggcaaataatatgtggggaaacataaaaaagactatttattttacttcataaaaaaagactcg

SEQ ID NO: 1411 - DNA, 3257 bp, Homo sapiens; identical to SEQ ID NO: 1410

SEQ ID NO: 1412 - DNA, 2219 bp, Homo sapiens
tacacgcaagaaaagaagtatttattaacaggtaaaaagacagatgttttataaaaaataaggtcaattaatctagaaaacaaaacctatactaaatatatacacccaataacagggactcaaaatatacaaagcaaaaagtgatagaaccaaaaggaaaaatagatatatctacaatcatagtggagaatttttagtaactgatagaagatggcaaaaaaaatcagaaaagatatagagatttcaacaatactaataacacatttgatcttcatgacatttatagaatgctacactcaacaactgcagaatacatagtctttgcaagtactcatggaacactcaccaacatattccatatgattagaacataaagcaagcctgaataaatttcaaaagactgaaattatagaggatgttatgttctctaaccaatgtaatcaaagcaaaattaaataagaaaaagtaaaatttccaatatgtttagaaattggtcaacatactttcaaatagcccagaaaacttctaatttccattgaatatattagaaaatattttgaagaatgaaaatgcatttaaatatgtgaggtacagctacagcagtgattagaggaaagtcatagctttaaagactattaaagaaaggtttaaaatcaattatctaagcttccctctcagatgttataaaaattaacccaaatacaacagaatgaaataaagacaaaagcagaaatcaatgaaatagaaaaacagagaaatcaacacagataaaattggttctttataaaaataaaattgataaaaccctaagaaaagattgatcaagtgtgaaaaaaagagataaaacacaaattaccattataagacatctcttctataatggagggtggtattaacaggatgaacacaagtattactgaaatactaccatgaccagtcagcaaaattgaaataacaaaataccatttctaacccatgagactgaccaaaacttaaaagtctgatactgtcaagtgttagtaagcactattgtgggctactgacagacctgtgaactcgtaaagtcattgtggggaacaactgatcattatccagtaaaactgaaacttgcaatcccttgcaccctgcaatgccattactggagcacagaggcatggagacggatggtcactacagcattgtttgaaatagaaaaaactagaaacaatttaagtgtccaacaaaaagggaataagtaaaatggggtatatgcctactgtgtagcagtgagactgcaacaggcccatacacatatctacaaataggatactttacactttcagagaaggaacacactacaggagtaccctacagtggcaggattgaaccagcattacacacataacaaggacaacttccccaaaggtaaagttatatgaagaggcaagctacaggtgacactgacagtatgacaccactatggaaactctaaaaagcccacacaaacaatatcatatgtcattcaagtatatctatataagccatagaggtataaaaatggtgcagtggcacaaaacagactcatgattcacagtagtgtttgcctctagagagagaagaggaggaataggactgagactggggaacaaactttatctagagtgtcgctttttcttttttaagagatgaagtctcagtttattggccgtgctggaatgcagtggctattcacaggcacaatcataatacaccacatcctcaaactcccggccccaagtgattctcctgcttcagcctcctgagtagctgaactacagacacacccgacagtattttttacatatacatatatatatacacacacacacacacatatatgtatatacacacacatatatatagcttaatgtacactgtttaatgtacttgatgtttacaatatcattctggaaatgtcctaatatttgttaaatttctcaaaagaaaaataagatgtccacggaattaaaacattttatgaataattaaagaaattaacgaaagattctgactataaataaaattcctatatataaaaagccaaatgaaagctcattggaatgaaagagaaaaaaagaaaacattaaaattgacataacagatacggaaatgcttgatttttaaaaacagtatctattattcagttggtgacttttacataatcaacagtctttacaatttgaggggtattttttactgct

SEQ ID NO: 1413 - DNA, 2219 bp, Homo sapiens; identical to SEQ ID NO: 1412

SEQ ID NO: 1414 - DNA, 21732 bp, Homo sapiens
gtagagatagtatctcgctgtgttgcccagggtggtcttgaactcctgagctcaaggaatcatcccacctcagcctctcaaagtgttgggattacagaggtaagccactgcacccagcctatatttcaataaaatttaataaaaatcaaaacaatacaaaaaaaaattatggacatgtatctactgatgtggaagttttttcacaatattgagaaaaacttataaagcaatgcatatagtatgatcctgtaattacaaaaaataacatatatgcataaaacaggatacacaatgacattcactcatttaaaaatatttattgagcatgtgcgatggaccaacacataatttatttggaagacgtctacacaactgtactatcccatgcagagtcccatcgcatacatcaccaccttagctcgcacgctgagccagggcagtgttccctacacgccactggcacagccctgtgcaatcctacgtcccacacgagtggatgagcgacggcagtaagggcaccactaacataggaggtggggacagtcactgtcacagggtacacgggctgatatgcgtgcgtcctaggagtgtagacctagacctagcttaggaacatggagctccgacccagccacgggtcggcactgtgggcaccacgggtgaacacctggaaacacagcctacttctagagggcagacactgggcagcgggggtggccacggcagctcctgccgagcccaagcgtgtttgtctgtgaaggaccctgacgtcacctgccaggctagggaggggtcaatgtggagtgaatgttcaccgactttcgcaggagtgtgcagaagccaggtgcaacttggtttgcttgtgttcatcacccctcaagatatgcacactgctttccaaataaagcatcaactgtcatctccagatggggaagactttttctccaacctgaaaaagataaatgacaacaggtcaatcagatgataaatcatttgattaacatactacatttcctaatggtttaatattggacaagagaacagtattcaggtgcagaatttttttaaatgacaaacttttaacaaaaacttatcacaaagcaaagcacaaaacaaatataaaaaatgaaggaaaaccatttatttttattttctttgccacattaatcctgagcccaaagaagaacattccattttcagcagcctctgagacaggaagcccaagtgagctgggcgagctacacatgaattcacacacggatccgaaggctgccagtcagaacacgcatcacagacgacacgcctagactaactgctgcctgggaagccacagaggcctgtgtaaagggagcgccaaggcacagctcaggcttctgtccatctgggggaccctctggacatggcacaaggggcctcaggctgatgtgggtctctgctctccctcacttaccgtgtcacctgagggaatgacttccctgacttcccttccagagccctccacttcccgtgctgtcagatgggaaatgaagccaatgacaacaggcgctttctgtgtaaggattaaatcactcctgcacaaaaggcgtggaccccagtgtgggccagcatctgccatcactaccaccacccaggcctgtctccctgaggaccggcacccacaggacagaatcttacaactacgtatcttactttttgagatgtggggtcttgtctggaagtgacagcccagctcagagccacagacatgtgccttctccacactgggtttctctgcaacacaactgaacccgtgaccacgtctcctgtatggacagggactgggtcgtccatcatgaacagcgtctgcttccagtgtgtggtgctgcaagacaggggtgcgtgtgacctggaggctgagctagggcagtctccacatggccctcggggcgctgactcaggctcgcactggctctcgcccccaacagcacccacacagccggcagtccaccctgagggcctggggacacaaagcttggcttttcaggctaactcagggaacatatacacccccagccctgtgatctaaagggactctatgggatacactgggatcaaagttacgctagtgagacagatcctgccaatgccaaacacaagcttgctcctgagaccactcagattccaggaggtgtggacggctcaccctgggtggcccagaggatgcgggagctcaggggacacacagctgcactaaaggtcccgtgtggtgtcgactccccggcccgccaggaggacggctgtgcaaccccttcctgcacccttgcctaagctgcagaggctggtgatctagctcctgctgttaaactgtggtgtacacagacagaatcaggtccaaggagtcgcttctgtgaaggttacaaggtgaggacaactgtcacatttggggggaaatagtaaaacgctatgattctgcactgggttgcgttggaaacatctctaagttcctcaggctctgtcttccctcaaactcccactgtccacggtggggccagcagtgaagtggggggctcctcaggtctccagtttttccctgactctggtcacacccctcaccccagcctgtgccccaggtcactgccccctccacgcccccagactcggggatgggtataactggcctccaagctgcccacctccacccggtgatggcactggaggggccaccacaggactcttgtgatggggaccacatgccaggccaggccatcaaccccgcacctctgcgacctccctggagccggggtcccctcgcggggccaccacgctgggaagtcagcggggcaggtgccagagcggggtagccaaccccacccaaagggaaggcctgcagggccctgaaggcagctccactgccacacatgcccagggtgctggcggggaaatgtgtcccaaaaaacaggcacctccaaaaacgtcaggtgaaccccgacgccccgtggaggcgctttgggtcagaccatgaagagctgtggtgctcctcgcggggtggaagacagggagctcctcccgttggggctgttgtcggagggacgcccaggctgggcccagagtggtggcgagacccggaagggggcacacaggctgcggtgtctacaccacccgtgcccccatgcgcgccgcccccaccccactgcccgcgcccccacgtgccccacccccccacgaccgccacgccgcgtcccaccccctcctgcgcgccccatccccgcaccccgcctactcccctgccccccaccccgcaccccgtgcccgcgccccgcacactcacgggtggaagggcccggtgctgagcactgcggcggctgcccctcctgcaggctctggaagtggacgctaaaccaggccgtgaagccgtgcagggtccccgccttcctgatgtcgaagcgcagctcgcccctcagggtctgggtcaagcagatgacaaggcacgcgtgggcaccgcgtggcaccgcagggcccgggttggggcggccccctccacgcgccccgcgcagacgctgaatgcgtcaggaaccgtagaaaagccccccagcctggggaaaccacccccaaaacccgcatcgtgagttcagaggcttcagtcagaaacgtttcaagcatctgagcttcttgcgcccaattttctaccccagattctgcggaatcttttcggcgctcagctcttccagttaaggagttggagagctccaggctgggcctttccacagcagaacgaactaaaaaccaaagcgcgccggcgccaccgcgcccgccccatctccagacgcggcgccagctggggcgccaggcagggcgggggcgcggggaaaccgcccagagcccacgagcgccaccgcgcggccacagacagggattcacggagggaattctaacgattctgtcatgaagagtggcttaaaatacttgaaaaaaactgtaatgcaaataccataatgaaacgaaatataatttatttgattttgaagatgctgagaatattaaacataaatctaaaatgaagacgctggagacataaaatggtgtacaatatgaaagaatcaaaatagaacgtaaaaaagaaaaaagactggaaaaaatcagtagcaaacgttttataaattcacttatttgcataataaaataattagttattcactcacacccccagcactcactgaaggtttttgataagccaggctctggtctgagtgtttcgtggtcactgattatcgaatgtaaggagcaattcatctttttctcacctctagatcagaaatttgcacggttctcatgtccaactgcaatatagtgcacggttcagagagacagtcttctggtttcaaaatgtggttatacttgggctttgaaaaaaactccttaactgctaaagatctaggggaaaaggtcaaagcgactgttgagagtcattgcaaacatcttaggcttcaaaacacacacgtgggaccgcggtgagtgctctcccttctgtgtcaccaggatgctaagccactatctggggccctggaaccccagagcagccctcaggcctccacaggccctgggtgcctcccgctctgagaagacccagactctacccaggcatccagagacttcctgagcctgacctggaggcattaaggagcctgccagtcactgggcgcttccctgtgaggtctcattcatgggatctgagcacacggaaaccaacgctcacccctcataacccagaggacaaggggagttgcagcgtgtcttgcctagttttagaatgtatttgatttcaaaatcttttgtggatcttctattaacagtaaatgaacgcggtattcctgctgtaggttactctataataaacgaaaggaactagaagggctgaggtggcctgagtgagtctgagtttcaggagaaatacttgctctgttgctacacaaattcaacacagaaacagacactagacgccgcatggcccctgcatgtcaccgtttgccaacccccatcactggctgcactaggcttgtaagtcaccgattatttaccacagaaatgttgtaaaaaataagcaaagcagtaacttctgaaatagcaaataaaagtgaatgttttaataaagattccactatatttacacatttatttttctgataaaaaattacaaatttaaaaattggaaactatggacaagtataaagaaaagcttaaattccccatatgcctgtcttagcattgtgatatacttatttttatcccccagacatatttatataaatttatttatgcaagcaaacatccattctgtatacacggtttattctgccaagctttactgtctcttaaaccctttctaaatatcattacatatccctaaaaacctatggtttcttttttaacagacacacagcagtgctccaccagatggatatacagcaattcaatcacgttcctctggacggccactggcttccagtgccgggaggaacactcaggtgggaggctctggcagtgactggggtgggcagcctgatgccaacctctaaggccctggcagccacacctccctgccactgccaggcaagcctgggctactattttaatttactctttgcttgtctggtagggaaaacagcatgtattttaattcgcattttaactactaacaacattataatttttcatatatttattggtaattttatttattttttgcggtttgcctgttcacatgattgggctgcaattccatctggctagtcatctctttctaattgattccaagacctgacagcacgtgatttctctaattacttgtttgcttttacaatcgtgtttttgctgatttctgccacatagactgccagattctatctagcccagggtccattccatccattgttgctgctcatttctccacctaagatggtgcacacaggcccccatggatgtctgtcgctgacgctgattccatgcagaattaagttttcacgtatggcgtgagagaacaagggctaatcaactgctccagaataatttgctgacttggccctcactccctcctaatcgtaatgccacctttttcacatacgaaaatttttgttccttgcattctaccctgctctgcccatctgtcttgttatagcaccatactgctttaattactccaatgctacaacagattgtcctatctgggtgcacaggtaccctcatttatccaaccgtcgtatgggatctcccagggccttggcccacctgcagactgtggaccaggaggccccacaagacggtgccagtcccagctgtggacacttacttcagagcgctgaggttgaactcgtacgcgttgtcccagaagagcaccttgctacgataatccttatcagcactgcagggcacaaggtgcaacgcagccatggtgggccaaatgaccccgtcctccttcagccaggcatcccgggcatacaggatggactcgatcatgaactcaaactgcataggagtgaaagacacacaggagacacatcacaggccccgcggctgcacaggcctctcaccaccacattcgtaacactagtctgacagttctacagttttagcctcaagaatattcctgcctaggccagtgtaccatgcaagagaacatctcgagggtttattttatgcccacacgtcactgatgcatctcacagcctgggtttaagtcacataatttcccattagaactatgaactggagcagagctaaaagcaaggacaaatcttcactcttgtcccatctcagtcacggaagagctcgtagctaccagattttgaaagagccctgaagtgttgccgggtcccaactgttacataaaatatatttggtccgtagcattctcagaattttcacaccctttaagtggactgaaatcactgcttaagaaaccgaaagccacgcaggcatgccctggccattcacgggtcctttggtccaccttgcatccctcagaaggtcccaagtcaagggaagcacatcacatctatgactgaggaagtggggacccaacgccctcaaaggccaggctttctgtctgaaccagaacttgcttcaaacacagaaaggagtagagggagcaccagcgaggtggggccaaggcctgtggcccctgcaaaccacccagggagcctgcacttcatcctgtagttgatgagaaacaacagaagtgttttgcttccttaaataatctcaagctgcttttattacagaagtaatacatgttttgtacggaaaatgtagaaaacttagaaaagctcaaacaaacataaaaatcacatattaacccagtacctagaaggaaccactgttatcactctgcagtttaccttcaagtatttttctacacacgcacacaaaaaatatatacatcttatttttcaatcttattttttcagttatgtagtgaaacagcttttctggcgtacagcctacgaacttgagcgcttgtgtggattttgtcctcacaaccacagccagcatacacacagctctgccacccaaaacactcttcacccttttctctggtggtcatgccctccccgaccccagcctctccagccaccgatctggtctccatccccatggtcttgtgtctttttgagaatatcatacaaatggaaccaaacagtacataacctttcaagacaagtttctttcactcactgtaccgtttctggggttcctccaaattacctgtttcaataactggctcctcttcactgctcagtggtattccactgtgtggacgcaccagtttatccttaaggattatccagatgaaggacacttgggttgtttccaggttttgttttttttttttttgcaattataaagagagctagtataatcattcacatacaggtttttgtgtgaacacagcttgcatatctctgggttgaacacacaggagagggactcctgggcataaggtgagtgcacatacaagtctataagaaagcacccacctgtttccacagtggcatgttccctccagcaatgcatgactttcagctgttcctcatcctcgatgacagttggtattactatcagattttttttttattgtagtcatttttcaatgggtgtaagtgatatctcactgtggctttaatgtgcatttccctgatggctatgctgaacatcttttcatgtgtgtatttgatatctgtatatccactttggtaaagtgtctgttcaagtattttgcccattttcaattggcttgttttcttcctgttgagttttgagatttctctgtatattcagaacacacactggatatgttctttgcaatattttctcctaatcttagcttgtcttttttattctcttagcatcatccttttgcagagcagtcatttttagttttgatgaaattcaatttatcaacattttctgctatggatcacgcttttagagtaaaaagtctttgcccaagtccaggtgatgaagattttctatgattttttcaaggaggtttatagttttacatttcacacacttagatctatgatcaattttaagttcagctgtgtatgagatgtgaggttgaggtgttgttttttagatatggatgacaactattccagtaacatttgctgaaaagactgtcttttctccattaaattgatttttgtacctttgttaaaaaaaacccattgaccatatttgtagaaatctctcgtctccattccattgacttacgtgtctgtcccttcaccacattgtcctgattactgtagcttcaaaatcaagtagtatagttcctccaactttacccttcttttaaaaaattctatcagctactctagttctcttagtccatttttgtgttgccaaaaaggaatatctgaggctgggtaatttataaagaaatgaggtttatttggctcatggttctgctggttgggaaagttcaggattgggcatccagtgagggcttcaggctatttcccctcacggtggaaagcaaaggggagctggcacgtgcagagaccacagggtgggagcagaggcaagtgggcgtgccaggctctttttcacaaccagctcttgttgggacctgaaagagctagaactcacttatctacccacgaggaagggcattcatctattcatgagggatccacacccatgacccaaacacctcccactaggccccacctcccaacaccaccacactgaggatcaaatttcaacatgagatttggtggggacaaaccatagcactagttcctttacattccatatacatttcataatgagcttatctataagaacaaatcctgcttggattctaattggaattttattaagtctacagatcaatttaaaaagaacatacgtctttactaggttgagccttcttatctctccatttatttaggttttctggggtttctttcattatcatctcatcattttcagcatccagatcacattttgttagatttctaagcctttcatatttttgaagctactgtgatattctttaatttctaattgtacattgctaagatataaaaatgacttctgtatgatgaccttgcactctgtgatcttgttaaactcacttactagttttaggaaattttctcatagactccttaggattttctgtaggtttttttgtagatgtcctatgtcatgttaaatttccttccctttctagtttgctgagaattttatcatgaactgatgttgaattttgtcaatttttttctgtattgatataatcatgatttttcttcttcagactgttaatatggtagattacactgattgattttcaaatattgaaccagccttgcattccaaggatagtttctttttttgttatggtgtattattattccttttatatcctgctggtttaaatttgctaatgttttcttgaggatttttacatttatgttcatgagggttattggtctgtaggtttcatattttgtgttaacattggttttggtattagggcaatgcttacctcatataatgagtgaggaagtgttccctcttcttttctgaaagttgtttagaactggagttttttcttcattaaatgtgttgatagaattcaccagtgaaatcatttagggtagagatttacctttcagaaggtttttaaactattaattcaatatctttactagttattggaccattcaggttatctatttcatgttagatgaactgtggtaatttgcagttttcaaaagaattggtccatttcatggaccttctttgcttctcactctatgtatgtacactctatgtacatacatagagggagaagaaagaaaatgataactcaagactgtttcaggaatacagttgtttcttggtgtctatggggaacttgttccaggacccccgtggatattcaaatccttggatgctaaagtcccccatataaaataacgtggtttttacatacaggctacacacatcctccgacagactttaaatcatctctagattacttctacctaatacaatgtcagtgttatgtaagtagctgctatactgtattggtgtgttatttgtattgatgtttattgttgtattgttatttttattttctgatattttcaatacatgtaggttgtatctacagatgtggagcccacagatacttgaccgtacttcaaattcttgtcttcttcaccagtcgattgctactatgtctttgttccagagtcctcaaatagtttctccctgtctactctccaggatttatagctgcattcagtgggagacatgaaaggagtatgccttctccatcttatctggaactgaagctaggttaccactatgtctaatttttaaacacaaaattggaatcatactgtacatactctgtactttttttaaaaactagcaacatgtcaccaactttttccaaagactgttaaaaatctttctaaaacataatttttaatgatcatatgtattgctacaattctgttgtttccaattttctccccattttaaacggtgctgccatgaacattttttaacataaatttctgtacaaatttgattatttccttaggataatttcatcaaaaaaatttggtgcctggtctctgggtccagctgctgggaaggaggacactgcagtctcagcacccaccagctcctcctccttcctcctcccccgaggtgaatgtgccctcagaagtgcaagctgctgattaactatgctgcattttttatgacgtgaaagttcggaaatgctccacgccaaaaaaaaaaaaaaacaagaaaagaaaaaaggctgtcattttttgtcccagtgcagacaaagtgcattgttgtagaaggaggtgaagagaccttggttggagatgtctaagtgtagccataagcggtccttcaagcatgtggtggcaatgtttcctgaaaaagatgtctctgtactttgtatgaggcaagctttaaaaccaaggaatccagaagagttgatggttttgtgtgtgtgcgtgtgggcaccagaactagcacctctgaaaagtaaaatgatctacatgagctccagggaatgcaaccaaaaagaaatatcaaggcataaaacatgaacatcaagcaaaggggccagaagtcctcccttaggcctgtcccactgggaagccaggcggccttggttgtggcctctgcagggtgccctgtgtagatcgtccttcagtgccacaaactgaaagtgcccgtgtttacgcttatcctcttgttgtgtaaataaagcaaatacatttaggccagagtcttgctgagggggagctgtcccatcatctacaccacacattctataaatatgtgcaaacagccttaaatacatccgaagtctgaagtgttattggtatgaaattaaattcttactggccacgtgcctgttttcatgagctgacttataaagactttcgttaagctcaggatttgtgataatacagtcaataaaacagtacaaggctgtgtgaagagaattattacatctttgttaacctcagcagttactttgtttcttttgcttagaaaattcgtcataatgtggttgtaattttggtccaaattctttattcttccttgagctaaagagaataacggaatataatatgtcctcatcacatattgacagcacgaatacactaacaacagtaagactgagtctggcagtcttttaattctaccaaatgtgcaatggagatcctcagtgaccttgcaaagcgtcctgaaaggtccaggaggcagcccctgcacctgcagtgccactggctagtgggagactgctgagtgtgcaacctgcttctcggaaatcgtggcgtggcctcaggagaacaagcaagatcctgtaacaactaatgataacgcaaattagggctcaattgtcacctgctttgttaacaaaaatgattaaatggtctgttgacaatctaggacacctgtggtatctttacttgcgtctccttcagaactttgctgcttctggaaaaacaaaaaaattttaatgctctttgacttattctgccctattttccttcaaaaggctttaccaatttacactgccaaaaaaagggcatggcggtgcacacttccccacaacctcagcatcgggagcatcagatattagaggattgctcagccaacttcccaggtcaaaactattacagttactttcaaattgttggtggcattgaacaacgttcaagctcctggcctctggcatttctctgcctttctagtccctgctcaccttccatgaggttacctttatcttatgcttttcttattgcaactctttacgtcacacaattctttagctgcaattctttagttgcatttaccatttaatagtttttagctgtgctaatgtatgaaggggaattttttgtcaagtattttatttgacagcttcattatgaacttggttcttagaaaaacctttcccatcctaacaacaaataaacttgtagcaatttttttgtttcctccttttcttaaatatttaactcttgagcccatctgaggtttattttagcagatggtgtgaagaagggcctcttttctccaaatcagtcgttccagcaccatctctgaacaactacatgcccttgctgcactgactgaaagctgcccctcctatgctaaacgcacatgcactcttctctgtcttcagacttttactacatgtcagcgtcagagtaggaagatgggccaggagagatgaaggcctgagggctgaggggctctgagaacaggcagacagcaggcaaggaggacatgaagagggacagacgcacaggtgcaggggagaggcagacagcaggccaggaggacgtgaagagggccagacgcacaggtgcaggggagaatgcggcagctcaggagaggcgcagcctggggacggaaagtgaaggtgggtacaaccgcaccaacgactcccagattcataccctccctccctcaaatccgaccaaccctgtgccccaacaactatcgccataggaactcttgcagccccgtctgccctgttctgggcctccttggcctgagtaatgatggtggtggtccctcagtctccctgggggggagtctgaagtcggaactgcctcaagccctcacctgcaaagctccgccttccccctccactgcctgcactggagaaaaccaccacatggtcctgtctgactcaccccagcactcctccaaatgtcctgctcagggtggcccctccaggccatcgcccaccgagaccccaggccatgtccccactgcccaaccaatagctggccctgcacatcggatgggcatcctatgttcaagacccacacagatgtccaccctccccagggccctccctaccccggcccccagccagtcctggtggcccactccctgcggctcagggctgggaggcaccgtcctgctcacgccaggcccccatcagcacatcctgcctgctggccctgctctgcatcccccacacctgccccatgccaagccctggctcctgcatcctgacaataaagccatggtcagtcctggaagtctgtgcacctcccacacagaggggcctcccctcacacagaatgtcccaggcctctctgcatgctggggctggaccacagccagtccctggcctccagtcccggccacacatacccaggggcctccaaaacacagcccacctcttactccatcactcacacaccagtggcactcccttcggtgtccaggacgtggcacaaagtcctcagacacacagttccctacatctggcctctgcctccctgatgcaacacagtctggccaatccggccactgggcagccctggaacacggcaacacggtgaacacagtggctactcctctcccctccctctgccccacgtccctcctgtgtccctctcacccaatccagggcacagccggacactccagcagccaggcttccccgtatcaccgcccacacaaccttggcctcaccacagcctcactcctgctctgtcctctttttgtccccgtggccggggcaccagctgtcaacagatacttattgaatgggcgctgctgttcagggcaaaggcaaatgccccttcagggggtaggagtggagcccgtttctcctgtgtgtcatcttatggctccacagatgttattaataagccaagtcacagcatggacattgagtctatttacatttatcttctgacaacaaaatttcaacaggactaaaagcccaatgccatctgttaccaggggaaaccgtttcctggaaagcagcagccatactccacactccttcacccagaccccatctttctgggtctctacactgagacaaagtttcaggttgggatgctccactacaatgtcctgtgtcccaggatgctgagcccaggaagacagcgcgggcagacagcatccagccacactcccgtcaacttccctccaagcagacagcgtttgtgcagggcatattcacaggcaaccagaaaacagtccacttccacccacatgtgaaactcagggtgagcaaccctgacaggacaggcatatgctggccctacagatgcccaagtggcttcacagcatcactggggccagtctaaggcgaggagaccctggccagggacgaaggccctactggcattaaagaaacagccttacctgttaggcacaggatttttacagatccccgaggagaacacagttcatgtaaatcactcatgaaaatgttacatgaactttgacttaaatttctcataaaggcattttttaaatcaggtgaaaattcaagacactgagccaatgtccacacaagaaattaattagacctcacattagggaaaacatcaaaatgaatcacgcacgacccttgagatcctgaggttggcccagccgagcccgtgctcagaagccccccagctccggcccccagctgcccgcacgcccgccctcaccagcaggcaggtccccatccactcagacaccagcacgtccaccttctcgggcagcaccacatcctccaccttctgctggtacacggtgatgatgtcagcaaagccgttctgcaggaccagctgccccgtgtgctgtgccatctcactggcctccaccgcgtacacctgcagcagcagaggcaccgtcagcgtacatccggccggcacacggcccgtcatctactctcctgagtcacaaccagcatcacgagaaatggtcaatgacacaagagggaagcagcattccagacagcagaggcagcgaggactggccacacctgcccctccaggggcacccagaaaggagccgcctctaaccctcccaactgcccccacctcccggacaagacacagacgcagggctgcaagtggatggaagactcgcatgcccgagccggctgccacacgcacagcaatcttaatccatgaccagcacagcaacttcttagcacccaagtgacaatgctggtctgtgccacatctgaggcctgtcagacaatttcaaacccaggttctcagggaagggtctggtgggaagcacccaagcgctgggtcctgggtcctgcagagcctggacttgggtggacactgtgctgcgaccccacccactgtgtaaggagtctccaaggctgcagctcggctcagctcagcacagtatagacggcctaagaggggtggggagggggcccagcgtgtgcatccctcccaaccccatgagaccaaccacacccaaggcccagcacagacatgtgggtgcacgtgtttctctactcaactgaaataaacgtctcacagaacataccccgccccacgcaattcacgggatattgtctattctgccctactcccgtctgtgctgtctgcgactcattgtacgcgggcgccacggcctctagcacgcggtctccacgcactgctattttaccgaccctgagccccacgtgcagggtgctcaacaagaccatggagtcaccggtgagcccccaacagctcagggtcacaagtcagcacactcagaggccacctcggacgtcaccagcctcggcacaaacacccgggatgcgctcgagaccccactcaccgctctaggccgcgcatagtgtgcacagaagagactgatgatcccagtcccacagcccacgtccaggatgactttatccgtcagggattctttattctgcaggatgacactgtggtatttagttgttcgtggctggtctgccaacatctccaagtggagtttctggaagaaatgcacattcagaatcactgcctgtgacctagagccatgctgaggtctggactgagatggagggtcagagccacagctgatgacccctgaccccaacacccctatggaagactatggaaggcctggacatcactgtcaaccaagttaatctcattggtatttagagaacacttcacccacccccttataacagtaataatacacaaaaaatacctaggaacaaatttaacaagaaaggtgcacaaccatgtatgacaaagagatattgtccttatcttaaaatactaagagatattaaacaaagcttaagtaatcagagactgagagtcaatgttataaagatgtcagctctcccaaaattaacataaacattccatgcagtacctactaaaggagaaagcacaacaaaatgataataaaattagtttcaaaacagtaagtgcccaaggctaatgaggaaaatgctttaaaaaaaaaagaactgctggagacctagctcttgcagatcctacaaaggtgcagtgatggaaatgacgaagcactgggaactgcagtaaacagaccagtgaaacaacaggaattctacagcagacccctgaaatccagagcaggacaaacgcaccgtttcacatcaacgcgaagggaactgtccagtaactgaggctggggtcgctggagatttgtgggcatacattagggcggaattttacattatattttttacaacaaataatttctagattttttattatttaaaatctcattgtttaaaatagaatcagaaggccaggcagggtgcctcacccctgtaatcccagtactttgggaagctaaggtgaaggtcccttaaacccaggagtttgaggatacagtgcactatgactgcaccaccgcactccagccactcatacgacagagtgtgacaccatctctaaaaaacataaaaaacaaaaataaaataacacagaatcataacagttctgaaaacaaaagtgtgggtatttataatcttatagtgaggaaggtttttcacaaagaaaagaaaaagaagtcacaaagaaaagaaaaccatattaggctatacaaagaaaaaagttgtacgtgggaaaaaatttcacaaagtcacaaaacttcacaaattcaggctaaattacttaacacacgaatcaacaaaaatcaaaaggggcaaataatatgaaagtttacaaaaaaagaaaaaatacaaaaggcccataaacacataaaagataatcaatcttacttaaaaaatggaaatcaaaactaaaagatgccatatttaacttttaagatcaaagtcctttttcactttgatttgtggtagggaaatgagctttcacacaccatcatgccacggtctgaaatgtctccaaaaatccatgtactgaaacttaatcgtcagtgtgatggcattaagaggccacctttggaggttactatgaaagggtttgtggtgaaagaggtgctcccagccctcccgccttcaccacgtgaggacagccatgaggcgccatcttggacaccaatgccaatgccttcccagcctccagaactgcgagaaacaaagctttgttcttcataattcactcagtctaaggtattttgttacagcagcacaaacagaccaagtgtataattagcaaatctttctggagggcgaactggcaagatccacttaaggaaaccacatgtacacactacacacacacaccccgtaggaatttaccctatagaaattctaaacagcatttaacaggattatacaggactccattacagcattatttatcatgataaaaagctattaaataaccactgtccaaatatcaacaggacccttttaaagtaacacaacgctctgcagctgttataaagagtgacaggtgccaatatgagagatcttcaaaatactacagctacgtgaaaagagcaaggtgaagacctgagtggtggaacaatgccttttctatacattaaaaacgtaaaatacattaggtgtcacttggacttcataagcacagaggaatctggtgggcagtggttctttgagctgagaggcggcagaggtgggaggctggaattggcttttcattatgtatctttccttaacggatagaaatcactaaccatgtacagacatgaatagtttttaacacttttaattgtgaaatatggcatacctgcgaaaaagtgcaataaaaagtatctgcagagttagtcaagtattgttatatagcaaacacctctatacctatatccaaccccagaacactgccagcatgtcagaactcctgactcagccacgctggtcccagagcctcccctaccagcaggtaacctccattcaaccaacaggggagccactcctgccctcagtcagtctcagcacccatgcacactcacaaacagtaccttccggccgggcgcaatggttcatgcctgtaatcccagccctttgggaggctgagacaggaggatcacttgaggccaggagttcaagaccagtctggccaacatggcaaaaccccctcattaaaaatacaaaaattagccaggcatggtggcacgcacctgtagtcccaggtacacaggaggctgtggcaggagaattgcttgaacccgggaggcagaggctgcagtgaactaggatcctgccaccacactccagtctgggtgacagagcaagactacgtctcaaaaaaaaaaaaacaaaaacaaacaaaaaaccttctaatatggcctcttaactttatataattgagtcaaacgttatagattctttgccctattccttctttcaactaacatcatttttataacattcatcctgcaagtaactgttttcatctagttttaaaatgtaaccagagattgttgcctggaccatcgggttataggcatttctccatggtggggaaaaaatttcggtaagctatttagaagctgggcttttattatttttttagggacagagtctggttcaatcacccaggctggagtgcagtagcgcaatcatagctcaccacagacttgaactcctggcttcaagtgatgctctgacctcagcttcccaaagtcctgtgattacaggcatgagccaccacacctgacctaagtagtattattcatagatttatagaattttttctattttttttttttttgagacaggctctcgctctgtagcccaggctgaagtgcaacagcgccatcatggctcactgcagccttggcctccaaggcttgagcaatcctcccacttcagcctctcgagtagctgggactacaggcgtgcaccaccatgcccagctaattatatttttttttaattttttttttgtagagacgaattatattttttattttttctcactatgttgtcaggctggtcttgaacacttggtctcaagccaagtgtcctcttgccttggcctcccaaagtgtagggattacaggtgtcagccaccacactcagcctaatttcatttttaaagtaaaatttactgctttttttttaaatactgagggagcacgcacataatctcattgctcaaatcatatctctaagccaggggtcggcaaactaagccatgggccaaatctagcccaccacctgtttttggatggcctccaaactaacagtgggttttacatttttaaatgatttttttaaatcaaaagaaaatactttgtgacacatgaaaactgtacagtataaattcaaatttcaagatccataaataaagttttattggaacacaacagtgcacactttgtgtgtcatccacagtggcttccacacaaccatgtcagagctgagtggctacaacagaggagctctggcctgtaagactatgggcctgctctgaacgttgcagtagaactaaagctagagagaacccaccgcctggccagctgaacagggaatttagaaagcaataccagagttccatagctgccgaagtactcttcatcctgccacgtgtcctcggggtcgtactcatccacgtgcttccccacatggtttgccggaatgtacccacagcagcccgcacgctcaccccaccaccaatctgcagtggtttgtctcaggataagaattttttctcctctcaaaaaactgagctggaaaaaaaaaagttaaaattcaataagaaaaccagtcattggtatttcaaatgtggctcagtgataaatcccatcaatggtgacaaaatcacagagatttcaaacaggagtcagtgggtaatgacagcaactgagaatgtttgcaagtgacaccatgacttagcgatgcctctggaacatctacctgaaaggagggcacagcttaacagatattttttaaaagaaggagtaaacattttcaaatggcttaggagagaatttctcaacagcctcttcattgtaactcaactatgccaactgagttactggaggctgactctaagaaattcctgtcacaaagtaaacaaagctatgtccaagcagatatagcttgatatatttggtagccttacttttcattaactgggtgggttctacattccaagtagaaaccagaacaggtgcttctgcccctggctgagggtccccactccatgcctcgtatctttacatcatgcttgaggcagaactggctgggctgtgagcttcacacacaggtcttgtgtggccctacgcatctgaatacctcttcatttaactttggtgtgacgtctgcaaaatttatctccttttgacactgaacatgctgaaagccataaagcattaaccaccacgtgtggctacctgggtctcatcggtggcagcgtagtccgcgatggccacaaactcctctggctgtactccctcctgcaggagaccggcctcactgcactcagcaggctcttctccctgctcaaagccaaggaaagcgtg

SEQ ID NO: 1415 - DNA, 6383 bp, Homo sapiens
caatgtccacacaagaaattaattagacctcacattagggaaaacatcaaaatgaatcacgcacgacccttgagatcctgaggttggcccagccgagcccgtgctcagaagccccccagctccggcccccagctgcccgcacgcccgccctcaccagcaggcaggtccccatccactcagacaccagcacgtccaccttctcgggcagcaccacatcctccaccttctgctggtacacggtgatgatgtcagcaaagccgttctgcaggaccagctgccccgtgtgctgtgccatctcactggcctccaccgcgtacacctgcagcagcagaggcaccgtcagcgtacatccggccggcacacggcccgtcatctactctcctgagtcacaaccagcatcacgagaaatggtcaatgacacaagagggaagcagcattccagacagcagaggcagcgaggactggccacacctgcccctccaggggcacccagaaaggagccgcctctaaccctcccaactgcccccacctcccggacaagacacagacgcagggctgcaagtggatggaagactcgcatgcccgagccggctgccacacgcacagcaatcttaatccatgaccagcacagcaacttcttagcacccaagtgacaatgctggtctgtgccacatctgaggcctgtcagacaatttcaaacccaggttctcagggaagggtctggtgggaagcacccaagcgctgggtcctgggtcctgcagagcctggacttgggtggacactgtgctgcgaccccacccactgtgtaaggagtctccaaggctgcagctcggctcagctcagcacagtatagacggcctaagaggggtggggagggggcccagcgtgtgcatccctcccaaccccatgagaccaaccacacccaaggcccagcacagacatgtgggtgcacgtgtttctctactcaactgaaataaacgtctcacagaacataccccgccccacgcaattcacgggatattgtctattctgccctactcccgtctgtgctgtctgcgactcattgtacgcgggcgccacggcctctagcacgcggtctccacgcactgctattttaccgaccctgagccccacgtgcagggtgctcaacaagaccatggagtcaccggtgagcccccaacagctcagggtcacaagtcagcacactcagaggccacctcggacgtcaccagcctcggcacaaacacccgggatgcgctcgagaccccactcaccgctctaggccgcgcatagtgtgcacagaagagactgatgatcccagtcccacagcccacgtccaggatgactttatccgtcagggattctttattctgcaggatgacactgtggtatttagttgttcgtggctggtctgccaacatctccaagtggagtttctggaagaaatgcacattcagaatcactgcctgtgacctagagccatgctgaggtctggactgagatggagggtcagagccacagctgatgacccctgaccccaacacccctatggaagactatggaaggcctggacatcactgtcaaccaagttaatctcattggtatttagagaacacttcacccacccccttataacagtaataatacacaaaaaatacctaggaacaaatttaacaagaaaggtgcacaaccatgtatgacaaagagatattgtccttatcttaaaatactaagagatattaaacaaagcttaagtaatcagagactgagagtcaatgttataaagatgtcagctctcccaaaattaacataaacattccatgcagtacctactaaaggagaaagcacaacaaaatgataataaaattagtttcaaaacagtaagtgcccaaggctaatgaggaaaatgctttaaaaaaaaaagaactgctggagacctagctcttgcagatcctacaaaggtgcagtgatggaaatgacgaagcactgggaactgcagtaaacagaccagtgaaacaacaggaattctacagcagacccctgaaatccagagcaggacaaacgcaccgtttcacatcaacgcgaagggaactgtccagtaactgaggctggggtcgctggagatttgtgggcatacattagggcggaattttacattatattttttacaacaaataatttctagattttttattatttaaaatctcattgtttaaaatagaatcagaaggccaggcagggtgcctcacccctgtaatcccagtactttgggaagctaaggtgaaggtcccttaaacccaggagtttgaggatacagtgcactatgactgcaccaccgcactccagccactcatacgacagagtgtgacaccatctctaaaaaacataaaaaacaaaaataaaataacacagaatcataacagttctgaaaacaaaagtgtgggtatttataatcttatagtgaggaaggtttttcacaaagaaaagaaaaagaagtcacaaagaaaagaaaaccatattaggctatacaaagaaaaaagttgtacgtgggaaaaaatttcacaaagtcacaaaacttcacaaattcaggctaaattacttaacacacgaatcaacaaaaatcaaaaggggcaaataatatgaaagtttacaaaaaaagaaaaaatacaaaaggcccataaacacataaaagataatcaatcttacttaaaaaatggaaatcaaaactaaaagatgccatatttaacttttaagatcaaagtcctttttcactttgatttgtggtagggaaatgagctttcacacaccatcatgccacggtctgaaatgtctccaaaaatccatgtactgaaacttaatcgtcagtgtgatggcattaagaggccacctttggaggttactatgaaagggtttgtggtgaaagaggtgctcccagccctcccgccttcaccacgtgaggacagccatgaggcgccatcttggacaccaatgccaatgccttcccagcctccagaactgcgagaaacaaagctttgttcttcataattcactcagtctaaggtattttgttacagcagcacaaacagaccaagtgtataattagcaaatctttctggagggcgaactggcaagatccacttaaggaaaccacatgtacacactacacacacacaccccgtaggaatttaccctatagaaattctaaacagcatttaacaggattatacaggactccattacagcattatttatcatgataaaaagctattaaataaccactgtccaaatatcaacaggacccttttaaagtaacacaacgctctgcagctgttataaagagtgacaggtgccaatatgagagatcttcaaaatactacagctacgtgaaaagagcaaggtgaagacctgagtggtggaacaatgccttttctatacattaaaaacgtaaaatacattaggtgtcacttggacttcataagcacagaggaatctggtgggcagtggttctttgagctgagaggcggcagaggtgggaggctggaattggcttttcattatgtatctttccttaacggatagaaatcactaaccatgtacagacatgaatagtttttaacacttttaattgtgaaatatggcatacctgcgaaaaagtgcaataaaaagtatctgcagagttagtcaagtattgttatatagcaaacacctctatacctatatccaaccccagaacactgccagcatgtcagaactcctgactcagccacgctggtcccagagcctcccctaccagcaggtaacctccattcaaccaacaggggagccactcctgccctcagtcagtctcagcacccatgcacactcacaaacagtaccttccggccgggcgcaatggttcatgcctgtaatcccagccctttgggaggctgagacaggaggatcacttgaggccaggagttcaagaccagtctggccaacatggcaaaaccccctcattaaaaatacaaaaattagccaggcatggtggcacgcacctgtagtcccaggtacacaggaggctgtggcaggagaattgcttgaacccgggaggcagaggctgcagtgaactaggatcctgccaccacactccagtctgggtgacagagcaagactacgtctcaaaaaaaaaaaaacaaaaacaaacaaaaaaccttctaatatggcctcttaactttatataattgagtcaaacgttatagattctttgccctattccttctttcaactaacatcatttttataacattcatcctgcaagtaactgttttcatctagttttaaaatgtaaccagagattgttgcctggaccatcgggttataggcatttctccatggtggggaaaaaatttcggtaagctatttagaagctgggcttttattatttttttagggacagagtctggttcaatcacccaggctggagtgcagtagcgcaatcatagctcaccacagacttgaactcctggcttcaagtgatgctctgacctcagcttcccaaagtcctgtgattacaggcatgagccaccacacctgacctaagtagtattattcatagatttatagaattttttctattttttttttttttgagacaggctctcgctctgtagcccaggctgaagtgcaacagcgccatcatggctcactgcagccttggcctccaaggcttgagcaatcctcccacttcagcctctcgagtagctgggactacaggcgtgcaccaccatgcccagctaattatatttttttttaattttttttttgtagagacgaattatattttttattttttctcactatgttgtcaggctggtcttgaacacttggtctcaagccaagtgtcctcttgccttggcctcccaaagtgtagggattacaggtgtcagccaccacactcagcctaatttcatttttaaagtaaaatttactgctttttttttaaatactgagggagcacgcacataatctcattgctcaaatcatatctctaagccaggggtcggcaaactaagccatgggccaaatctagcccaccacctgtttttggatggcctccaaactaacagtgggttttacatttttaaatgatttttttaaatcaaaagaaaatactttgtgacacatgaaaactgtacagtataaattcaaatttcaagatccataaataaagttttattggaacacaacagtgcacactttgtgtgtcatccacagtggcttccacacaaccatgtcagagctgagtggctacaacagaggagctctggcctgtaagactatgggcctgctctgaacgttgcagtagaactaaagctagagagaacccaccgcctggccagctgaacagggaatttagaaagcaataccagagttccatagctgccgaagtactcttcatcctgccacgtgtcctcggggtcgtactcatccacgtgcttccccacatggtttgccggaatgtacccacagcagcccgcacgctcaccccaccaccaatctgcagtggtttgtctcaggataagaattttttctcctctcaaaaaactgagctggaaaaaaaaaagttaaaattcaataagaaaaccagtcattggtatttcaaatgtggctcagtgataaatcccatcaatggtgacaaaatcacagagatttcaaacaggagtcagtgggtaatgacagcaactgagaatgtttgcaagtgacaccatgacttagcgatgcctctggaacatctacctgaaaggagggcacagcttaacagatattttttaaaagaaggagtaaacattttcaaatggcttaggagagaatttctcaacagcctcttcattgtaactcaactatgccaactgagttactggaggctgactctaagaaattcctgtcacaaagtaaacaaagctatgtccaagcagatatagcttgatatatttggtagccttacttttcattaactgggtgggttctacattccaagtagaaaccagaacaggtgcttctgcccctggctgagggtccccactccatgcctcgtatctttacatcatgcttgaggcagaactggctgggctgtgagcttcacacacaggtcttgtgtggccctacgcatctgaatacctcttcatttaactttggtgtgacgtctgcaaaatttatctccttttgacactgaacatgctgaaagccataaagcattaaccaccacgtgtggctacctgggtctcatcggtggcagcgtagtccgcgatggccacaaactcctctggctgtactccctcctgcaggagaccggcctcactgcactcagcaggctcttctccctgctcaaagccaaggaaagcgtg

SEQ ID NO: 1416 - DNA, 32192 bp, Homo sapiens
ttgagatggagtcttgctctgtcgcccaggctggagtgcagtggcgcgatcttgggtcactgcaacctccgcctcccaggttcaagcaattctcctgcctcagccttctgagtagctgggactacaggcacgtgccaccacgcctggctaatttttgtatttttagtagagatggggtttcaccacgttggccaggctggtctcaaacttctgacctcatgatctgcctacctcggcctcacaaagtgctgggattacaggcatgtgccactgtgcccatccataattttctttaacttctctgctacttaaaaaaaaaaaaaaaaaaaaactagtatgtactttcataaaagcagcaaaactgcttgctttaaaaaaagtgtgggggggtccggtccatgtaaatctgggtcttggtatcgttggcagacctcttcagctcggatgcccggcagtgtcatacccccgcccctggtccgaggtgggcagcaggcgtcctcgaagctggggccacaggcgagctcacaggtcgtcatgcccccactcgtcaggggggctcaggtaagcagggctgtgcacatgggggagacctggcagcctcagcagtcgtctaccttgaaagtagggcccttcccagtccttgggggcaaggtgccctgtgccttccggtcccgctccattgttgatctcagtcagatttcttgttctccccaccctaccccaacagcaaatccacagcattaggcaacattccagcacagggccaccgcccctcctcctggccccccgggcgtcggtgcccagtgtgcagattcagggacagaggatcatccagcagggcctcatccgcgtcgccaatgttcccaacaccagcctgctcgtcaacatcccacaggtgagggctgcgccacactgtgccagggagagtgtgtgtcccacctgtgactgctccccttggacccaggttctggggcacagtagtgtttccctgggctgtgtggcatgacctgccttgctctttcagagccaggcaggggcttggacttgagctcctgggggccacagggctgtctgggtcgtgggcagaagttttgtgggcagacttgctatccagcacaggtgggcagctgacgagaggggcgatgcacggacctgagctgaaggtggggtctgcttaccagccccatggctgaggaaacagcatgtggcacacagcaggtttagggggatagtcgaggcccaggagaggccggtgatgggcccggagatgccttggggggcaccggagcccatgccgccctcccggcagtggcttcttccgattgcctcctcagcaaatgttctcatgtcaccaggtgcgcctattcttagccgcacgtcccttcacctctgtacagagcctctcagatggggagggtctgtccccacccactggaagtaggatgggaagagcagaaccaaggggcgggtgggctggaaacaggcgccttggctgacagataaaattaccaggtctgcaggggcttttgttggtgggcgtgttcgctctttcttccctctttggcacagtttgttcttgcccaccctcctcagacaagagcaaggctctgggcagtgtccctgcctgctttcgaaggtcaggttcgagtgcagagaagatggctagtcctggactgacccaggcaggtagtttcatacacctgttgactttttttcttttttggagacagtcttgctctgttgcccaggctggatggagtacagtggtgtgatcaaatatctttattttattatgagacaagagtctccctctgttacccaggctggagtgcagtggcatgatcttggctcactgcaacctccatctcccaggagatactcctgcgtcagcctcccaagtagctgggactacaggcgcctgccaccatgcccagctagttattgtatttttagtcaagacagtgttacaccatgttggccaggctggccctgaactcctgaccttaagtgatccgcccgacttggcctcccaaagtgctgggattacaggcgtgagccaccacatcctgcccacccgtgaacttttatccagtcctttctcttgtctttgtttcctgagggtgggcacaggcagtcagtggcagagaaggtggtctgctcctagcgtggctgggggaggctctgaggggaaggaggaggggaactggctggtcagaggtgagggaggcctgggtttggtcttggttgctgaggggacaacaaaccagcaggccggtctctgggaacctttcttggggggtgggaccctgggaaggcatcctgcacaccctgtgccccacagtgtggcatttgcaagtcattgggtgtgtccattttctgggggtggggtgcacagctttcatcatatttccagaggggtcctcagcccctaaaagcaataacattggcatgtgggcagttctgggtttcagggagagccctatccagcagttgtggggctggtggagacagtcaagggtctgctcctgggatccaggcaggactgtgaggtggcactggagcggtgaggactgggtggagggcaaggggaagaggttggcctaggagctgcttcccccatcgccccataaggactcggggactacctcaaacattagcatcccaggggagcacatgcagagaggctcatgggggtgctgcggtgagcaccctcttaccctgtgagaaggcagtaggccaggccacagccagaggacagtggccctgctgggcagtgtggtgaccaccagaacctggtgacagccacatgggtgccctcacattcacatggcggagcacagcaaactatagattttaagtgtgtgcggtttatctggtaaacctcggtgcacatgtgcagatgagcagccactacctagggtggtgtgtttctcgcgcctctccctgctgccctggcttctgagagcctgttatcatggctgggttcacttttgttaaggacgccatcgtcaagggtactggttagtgcagttgacaggacctcgggcttcggggcgctggggagccttcctctgggcaggcgcacggagcgccctgactgagtttttgtctcccaaagcccaccccagcatcactgaaggggacaacagccacctccgctcaggccaactccacccccactagtgtggcctctgtggtcacctctgccgagtctccagcaagccgacaggcggccgccaagctggcgctgcgcaaacagctggagaagacgctactcgagatccccccacccaagcccccagccccagagatgaacttcctgcccagcgccgccaacaacgagttcatctacctggtcggcctggaggaggtggtgcagaacctactggagacacaaggtgagtggcctggacccagccgggctgcttccgcctctggcctccaagggtgctgccccgtgggttctttccaacacacagcagaggctggggcagggctgcctagccaggatggtcctgggtgggcttggcagggacaccgtcagtgccactgtggagtctggacactgtcctccggttggggcctctgagagccaggccccgagaggctcagggtccagggggacgggcagtagtggcctccgtgacgttggcgtgtggtggggtagacgtgagggtgcacatctgtgggaggctgacagggttggcctccacgaagggctctcaggccaatgtggagttgtgacacacaggcagaaccttccagagcctcaagtgctcccagcttctgaggagggagagggacagcccaccccactgcccaggggcaggctcgcatgatcaccctcttcaggcagcgtgggagtgcactgtgtcctgggggatttaggaataaaaagacatctacggggtgatcacagcattggagacggctgggcgggtggatctgagtggccgagttggcccccagggagcccctgctccccagacatggagaccaaggacgtttctgcccacaggttgaggttggggtgacacgagtaggccaggaggctgagtcctctcctggtgactgcatcagactctcagagcagaggagtcggcaggactgtgaggggcccagggcaggggcagggcctggcagcctcagagccttcccagcacagacttgggagcagcggggtgggtgtgtgcagagaagcacctcccgcgcactgcccaggatacagagggaggagggcatgggggccaggtcgagctgtgcccccagcacctggggttgggaagatgctctccccactctcttagggtactttggtgcatcaactggtgcccccatgtggttgcacccagggtccccaagaggcagagctctccacacttgcgtggggctgggcctggcgcagcctcagagtggccctcaaatgtagagttgcttgtaacccactcccttgcccctcagtcgctctcgtaactcccggccacaggatggtaccgagactaactgcagcgtgccccaagggcatggcctccagctcccagctgcaggagggacctgggggagctatggggaggtgaggctctgacacagcccggctggtgcctttggtgcctccttttcgacaaggtgatgtcggcaaaagagccacctggggctgctgtaggaaatgaggattgggggccgagttgggaccagtgcctctccttgcccctgcctgtgcgggcatccgctctcccagaccagtctgtctctgccgttccctcatcagggctcagtctccctctcctgttgccaaggataggacctcactgtgggagagactttgagccctgctggaggcatctcctgacacctcccagagcccccagcctcgcaccatgtctggttctggcgccgctcacgctggccatgggttggacgtgtgcaaggagatgtgccgttgtcaccagagcatgtaagctgcaggtggcggtctcatgggtcaggggcttagaaggggccaggccagtccaggcaggagagggaaggccgagagtctcgccacatccatctccccaccccccagcccctgcagtcctctgacattgtctgtgatgaccaagagcaattaaggcccctaagtgctgaacacaaaaaaggtcggcacaaatacgcccagacctcacgcccgagcacatgcttcatgtacacttccccagctacctcttgcagcccccaaggagactatgcattctgtcccccagacaaggggaccaagcccttgctgcccctgtagcctgctgcccaccttgtgcagtgggtgcagcccaaggcctggggcctatcccgggtgtgagtcctgccctgccactgagtgacaatgtgatctacaggtcacttggtctctcttggcctcagtttcctcatcaggacatggcgcatttgggggttccccgtcctaagaatgaactgagtacctcagcacccacaaagcacttgctgggtgacttgcctgtcacccttattaactcgtacacaagcaagggtgcccaccacactgaggcagggcttggcatggtccctgctggtcctcagtggtgtcatgtccagcgatgggtgggacaggaggccgacgttttctgaagctgttcggcgttggccggccccatgtccacatgtcattggtgcccagtaggcatttgcagaacggacagactgtggcgactgagactccagcatcctgggctgggggcggccagggccctgactgtcgtcctggccctctgacgtgagccatgtgctgtctgcttgcagcaggcaggatgtcggccgccactgtgctgtcccgggagccctacatgtgtgcacagtgcaagacggacttcacgtgccgctggcgggaggagaagagcggcgccatcatgtgtgagaactgcatgacaaccaaccagaagaaggcgctcaaggtggagcacaccagccggctgaaggccgcctttgtgaaggcgctgcagcaggaacaggagattgagcagcggctcctgcagcagggcacggcccctgcacaggccaaggccgagcccaccgctgccccacaccccgtgctgaagcaggtgagcctggcctgctgccggcagtgccgtccctaggaggcagaggccgttccgcgatccaccccacgcctgcgctgcaccgcctgattgttaactgcacgtctaaattgcagttaatggtggtgttgggcggcaaaaacactaatttgcagtttctttagactttgtagctctcacttgcaggctgccggctgacaagtactgcttgtcttcaaggtcttttctgaaagccacgttgagataccaaaggggcgtttggaaaaatgttcttgctaaatttggagaggaacaagtttgaaatcaagttttttgttctcgtgttgttttattttaatgcttctccttcccaccctcttgtagactcgaagctcccttttggcaatttttgttttcttggaagttctttgcaattcactaaacgcattttctcaagatccccacttggcgcctaaagtccccaggggacgggcctgtcctgtggggctcaccctcggtcaccctgggccggccagcggaccgcactgactttgctttcaacccccgtttgtgtaggtcataaaaccccggcgtaagttggcgttccgctcaggagaggcccgcgactggagtaacggggctgtgctacaggtcagaaccgcactgggcgccgggagcctcgcgcccccaccgcagcccgtgaccacgtcagtcgccgactgtcacgctgcctcttctgtctgtctctccctgtttctgtttcactctctcccctcccccacccctctgtgtaacttacctggtctcctgattttggactttagggaccccatgtgggtgggaagaggtcagccagagcaaggagaggctgcgctgagtgtctcgcctgctgctgtcttttccctgcatgagccgtcacccccctttctccactgcaggcctccagccagctgtcccggggttcggccacgacgccccgaggtgtcctgcacacgttcagtccgtcacccaaactgcagaactcagcctcggccacagccctggtcagcaggaccggcagacattctgagagaaccgtgagcgccggcaagggcagcgccacctccaactggaagaagacgcccctcagcacaggtgggtgacctccacagggctccccaggggacctgcccattgtggggttcacccttccttaaccgaaacagaggcacatgtgcagcgggtgaacccccaggcccgcttcccaagctcagcctcctcggactctggctttccctcttgcccctaaccaggataccctgaagaagtgacagccccgagcagataggaaatagtaaccaccctcactctctgcacccaggctcagtctttgaccgacaaaacatgggccaggcctggctcagagggtgcccccacagccatccatgtggactcttgtcagcacacacccctatcttgcccactcagggtcccccttttctctttgtgccgcagcaaacatcttttttctgtcattgtgccatccatgctgcggtcacactgagtggtgcaaagtagaacagtaatgcggggcagggggtgtgcccagggcagcggctggctcacccggggcaggtagtggaggccttgccggagacggtgtttgaagaacaaccagtgggggtgaaggtcctccagtgggctctccggagtcaggtgcggccccaccgtccctggcatggtcccgatggcctgtttattttttcatgtatgtgttaacattagaacaaaagtgttatatttcttgtgtcaaaaatagggaaagaaaaggtggtcaggaagggccaagttaaggagatgggcaccctctgggagaggaagcaaagtgtcccacatgcaccctgaagcctgtggccctgcaggtaggagaggacaatcatgagacaggccccaggcagagtggtggggggagcctgagagcctgctgagcctgccgctgtcctaagtgaggggcgtgcccaggtgccaggctctgcaggggcacttcaggaaacagcagacgttcggctgcagaggaatccaggcagcctggacagttgagtgtgtttgtcatcaaaccagccagccagacgttctgctcagcaggtttaagacagctgaggactcacgggctggtcagaaattactcttgtgggaagtttgaaaggataagaaagaagtagaagtcgataagtgtgtgcatgtgggcacggtggtggaagtcatctggaagctgtgtgtgtgtgtgtgtgtgtgtgtgtgtttaaagtttgaaagggagcatgaaggcatcactagttgtgtgtctgatggtaggattagagggaaaataaatagttgaaagcaccatttcctaaaagagttaccacgggggttttgagagagcgcctggcaggacccagttgccaggtttctggagtgctgcccttgcacacagggttggttcctaagaacatttgacctgggaacgctttttccacaaaatgtattagccaccactaaaaatactcttagggccagacatgctggctctcacctgtaatcccagcactttgtgaggccgagatgggaggattgcttgagcctaggagtttgagaccagcctgggcaacatggtgagaccttgtgtctacaaaaaaataattagccaagcacatggcatgtgtctgtggtcccagctactcagccaggaggctgagggaggaggatcgcttgagcatgggaggttgaggctgcagtgagcactgattgtgccactgcactccagccttggcaagagtgagaccccatctcaaggggtctggggcagcccttacctccaactctggccaaaaattctgcgtgtgctgggtgggggcatttatttattttccaattataaaaatgatatttgtccatcatggaaatttggaaaatacagagagaaaagactgtggcaatggcttgtattttcctcccccaggtgaacaaatattacatttaagggttttccccagtgtctccccttcacttgagggtcctttgtggaaatgtgtgtcttgcgttggctactttgtgtgttaatgagagacccttactggacgcattaaaatttgagctgggcacagtggctcgtgcctataatcccagtgctttgacaggccgaggtaggaggattgcttgaggcctggagtttgagaccagtaaacaacaacaacaacacttgagggtaggagatagtttttttttcctttttttttttttttttcttcttttggagaagcttcttgctatgttgcccaggctggaatgcagtagcgcgatcatagctctcttgcagcctggatctcctaggcccaagcaatcctcccacctcagcctctggagtaactgggactacagggatgtgccaccatgtccagctgatattttttttagagatggggcctcactatgttgcccaggctggtctctatctcctggcctcaagcagtcttcccaccccccagcctctcaaagtgctgggattctaggctgagcctccgtgcccagctaagatagtttttcattgctgcatagtattccatcctgcattattgtcctgttgcacacatttgtttatggttttccactgttctaagcagcaccgtggtcagcaccttcatttctgtagaacgtaggtagctgctcaccctctgatgattgccccacacttgggattaccttggcagagcctggcaatgtcaaggccattgagttgctgcctaaatactcttcagctctgggggggcctgggatttgaaacgttgattgaggagtagtgtgggtgggtttgcaagggctcctgggtccttagtctgtattggggctggggtctaggcagctatggctgggctcctcccaggagccctcctgacgagggccttctcagctggtcgctctgttctgttgcaggcgggacccttgcgtttgtcagcccaagcctggcggtgcacaagagctcctcggccgtggaccgccagcgagagtacctcctggacatgatcccaccccgctccatcccccagtcagccacgtggaaatagtgcgagccaggccccgtggaagacgggctccctcctcccccacctggcccctggtctagaaggacccactgcaccaccctccgctggctcgggaagacaccgtgcccgccccaagagcaagcaccggccatgctgcagaggcaagacctcaattcttggctgcaaagtttcatcagggctagggggctggtgccgcctcataggcagacgaggatcatcgctgggggacctttcccgtgggctttcttcctttctctctttgcctttagtttgcccgacaccagcagaaaagtggaccttgggggctggttctgctcctggcccccttgttcagcccctgccggcacacgggcggctcaccctggacactgtgatgcgcatgggcaaggccagcgcccggggcttctgaaccgagcggggtgtttcatttttttgcttttccctgtcttaggctcccagtctttgactgccttcccatggcgatctataagttgaaagattttttttttttttaatcacctcatgatgatggagttaaaagtaaaccgtgcagaccctggggtccctgttgtacgctgcatcatcccgctggccctgtgccctggagggtgggcggctcatggtgccacagcccctggcagggacggccggcccgcccccgtgactgactgacagatgcagggatggccgaggcagccctcgctccagctgaacgcctccattgctgcttgttctggagacccccgcccccgcaccttccagacttagcagaagaacaaactgaagaacagacccagccagagaagcagggattccagaagctgcccattaagggagaaggagaggatccggtcggcagcagccctgagcagaaagctggaggggggactgtcgcggggtttttctgttgtggtttattttattaaattttttccttttttctattcatttcgatggacgcaatcttaagccaccctggccttgctcctgggaggtgagcgtgcacaggtgtgtgcaggtcaggaggtgccgtccaggtgtgcggcgagccgctgcgcacagatgtcaggatttccgtttgggtctagtttagaacctgtccttaaacctaggggttgctgtcaggatttgctttcagactttttttttttttgtaattccctttagagtctacaaaaatgtttttaaaaggatcaggtctgcttttagtttcatttttgtttctttcccgtcccactctttaaaaactggttccgtgaggaaaggcagaagccgttccgtgtctcttgcaggctgggccggcttcatgccagtgcgagggcgtcccgtgcccacgtacatacgtatgtctccatgagttctgggctccactggttccaattgagctccagccctggttttcctacccatgcagttagggactttaatttaattttttttttgtagggccaccgccttcaaacacaactgctacaacattctaataaaggctcatttaacccccaggctcctgtcgtgtgaatatcctcagtctgtaggaaactttttttgacacagcatagaagacctagttttggaaaacattatctaattttttgttgtgcaaatccccaaatttctcactaatttttgtttttttgtgcataacttggatgggctgaaggaggtgaggacagattggggaagggtggctttcattccaagatccagggatttggggaaaaggaaggaatttgatgttttttggggtgggaggggagggtgtgttttttacaccaaaaaaaaaaaaaaaaatcaagagtatgcaagcatttctattcctcgcatttttctgtgtgcctggcaaataaatacctgtctcctacgaccctgagctgttagccctctctgttccatgacaggggccagatcttccagctcctcccagaaggagcacccaggctggcttcttcccactgaaagccctccccagcgaaccaacctcagttctatgcagtggctggggatcaggcatccagaccgaagtcacctctgcctgctccagcttgggtcagctgggtctgaccagggggccagatccgagccgcacctgccggcccccagccccagctccagctcctgacctctcccagcctggcctggctgttcctccagggctgatggctgtcaacccatccttgtgagttcatatggactgctgcccctcgaaagggagagggtcggccccatgtccccagggagcattccatcagggacaacgtacatactgtgatgtaaactttttttttttccccccagggggcaaaagtgtgagatgccttaatctttccttcatttctgctgtctcgaacactctagcccattatttcctttcagttccttgcagcataacctctacgataagccccaagcgggttgttgtattatgacgtttatgatgttccaggtgaaggcattattaagtacctctctgggtgtggggtttggacgcaccaggatagctattgattaatgttaagggtgttctacccacagcaaagcacaccctcttaaaccaggcactgcctgggtcctggtcccgagagccctaccaggatcaggttcctgcaagccgtcagaatgtgggagcccccagcccaactgattgtaactgtcccctgttacctgtgacatgaacctccaacagcacctggaaacggttccctctgtcagctgctctgtagacagggctggggagatctcagagttcacacctcgcctgttgtaggggaggttgggggtagggtttggaatggccaagtgcccttggaacctcccacagctatggccgtcctgacctcatcccaggaactctacggtgaccaggaaccacccctctgacgaggtctgtagcggcccttctcagagtggaacagcccacagtgctagttgtgcctggtcttacctgtactccacggacctcggtgaagcaaaagcttcagggcagagggaatgaggcaacccagtggcagccccgctgggccccgtggctcctgctctcctattggacgtagaggcaggggagagacttctctatacaaatattctcatcacagaagggatgatccttgctgctctgccgtagggtttttgatgctgagctatgctgcacatgacgttaacctaaagaacttggactgagcttttaaaaaaggacagcaaacaattttataatccttaaagtgtaatagacggttacactagtgcagggtattggggaggctctttgggtgtggaggctgtcacttgtatttattgtgactctaaatctttgatagtaaaacaaatgtaaaaagaaatgtttgccaccagatgggaatagaagttccaataagcaggctggaatgggtggctatacgttgtatcacgaggaagttttagactctgaaggataataaatggatgatgtgtcaactggacttttcttttgtcccttctgccctggcttctctgtattgtttcgtcctagcttcccaggcaggttggagggagatggaggatgacccttagttaatgagagaagcaaagggcggggtgcatctgctgctggggcctcacttactgtggggatggagtccccacggcccctctcctctggagctttgtggcaaacttaccccatgggctgggagagaggaatgagaatctcagtgggggctgggtttggtggctcacatttgtaatcccagcactttgagaggctgaggtgggtggatcacctgaggtcaggagttcgataccagcctggccaacatggtgaaaccccatctctactaaaaatacaaaaattggccggatgtggtggtgggtgcctgtaccccagctacttgggaggctgaggcaggagaatcgcatgaacccgggaggcagaggttgcagtgagccaagattgcgccactgcactatagcctgggtaagagaccgtgactttctcaaaaaaaaaaaaaaattctcagtggaatttgcttgtgtttgctgcatcagccttcacgctagagtggtgggttttcctggagcaattttcaggctgggggcctcgatggtgtctttgctgcaggatgtgatattacagatgtgcaatctaagcacagagtcaccaacctggatccaaaatgaacgacgtcctggcaaaaatgttttcaagtgttgatagtttcaagttttattcttaaggtgagacctgggatcattttgctgaattttaatgtgcataaaacatgaccctgttttcctaggtgctatttatttgaggcagggtctcactctgttgcccaggctggaatgcagtggcttgatctcagctcactgcagcctcaacctccctaggctcaggtgatcctcacatctcagactcctcagtagctgggactatgggcatgcaccaccatgcccagctaattttcgtattttttgcaaagacacatttttgccatgttgcccatggctggtcttgaactcctggactcaagcagtcctctcaccttggcctcccaaagtgctgggattacaggtgtgagtcaccacgcttggccgtttcttgtctttgaagcatccttgcctccggcctgggagctcataccttccccacaactcccaagtgcctggtcttatgggcacagagctggtagagaacatggtagaaactgaacctcagcctgtccagtagcgcgatcttggctcattgcaacctccgcctcccaggttctagcgattcttctgcctcagcctcccgagtagctgggattacaggtgccgccaccagcacgcccagttaattttcagtagagatggggtttcacgtgttggccaggctggtctcaaactcctgatgtgatccaccggtctcagcctcccaaagtactgggatgacaggcgtgagccactgcacccagccacttttttttttttttttttttgagataggctctctgttgcccaagctagagtgcctagaggctctctgttgcccaggctcaggcgatcctcccacctcagcctaccgtgtagctggggccagaggcttgctacaggcatttcttgcttggcctgagaaacattcctatggggtgctgtctcctgggcttggctcttggttcctcgtgaggctctgcttccctggattgggcacaggcttgtcagtgcagttggggcagattcaaggggcgggtcctgggtcatggtctcaaatagcctctccagctgagaaaatgggacactcccctcgtccctgacatcttgtccccgacatctcatcctctctgaattgagccttgggtctgtggccacatggcaggcagagaccctgaccccatctgctcccacagattcgtcggtggacagatggcatgcactatgccctgggccccggagatgtggcaggagctatccagacagaaacatatagcaccttgagaggagggcatggggtgacattttaggcaaggcttgaagaggggaaaagtgccaggagtgtgcaaaggcttggagataggagccagcatggcaggtcaagaacaaaaagggcaatgtggtgggactgggtgggaagacggggcaagggcgtgggttttagctaagtgcagtgggagtctagggaaggtcctgggcccagtactcaagctacgcccactctgaagccatgcccactaccccaaggatggggttttgcccattttccaagtggggagtctgaggcatggccccagtcaggagcagcacccttcgaataaaccagaggggctaggggctaggttttattttatttatttattttttcttttgaggcagagtcttgctctgctgcccaggctggagtgcattggtgggatcttggctcactgcatcctccattttccgggttcaagtgattctcctgactcaggctccccagtagctaggactacaggtgcaagccacccatgcccgactaaattttgtatttttagtagagatggggttttaccatgttagccaggctggtctcaaacgcctgacctcaagtgatccgcctcccaaagtgctgggattacaggtgtgagccaccatgcccggccccaggagctgggttttctacctccactctgatgtggtccagccaagactggaggctaggcactgcccctcttttagcctcggtttcctcatctgcaaaactgaaggggacagggccatgtatctatttggagggatgaagatagagctggcactgcatcaccagggcaccagaaagccattgagactgagtgagcaggggctgggcatggggagacccaccagaggagcagctatgtagggctcatatgcaggtaggcacgattaggatttcctaatatacctaatacatttccccatataccccaaatgggaaccactcccaggctctgtggggtcctctctcaatttcctccttaccttgccatctcctttccctctctccctccttattccaggcaaataagcttactggccttactcaaacacgccagctcccctcttcctggggaacaacctggactgtttctcttaccttcagagtcccttgactttttttttttttttttttttctgagacagggtctcactctgtggtccaggctggagtgcagtggcacgatcatagctcactgcagccttgaactcccaggcccaagcgattctcccacctcaccctcccaagtaactgagacacaccaccatgcctggctaatttttaaattttttgtacagatggccgtctcgctgtgttgcccagattggtctttaactcctgggctcaagcgatccgcccacctcagcttcccaaagttctggaattataggcgtgagctgccacgccctgcccagagtccctccttgaacacctcccaactctacctggcatttagcacaacttacaattattttatttccatgtcattcttttattttacttgacttttcaattgtctcgttttcggcagggatgggcccaagtctcttcgccatgagctctggggcctggcagacagtaggtgctcaagaaatgcatgactacatgaaggaacagaggaaggaacgagctagtgagtccagctgaatctcgcccagccccgccctgactcccccaccccctcttcccgagaggaaagggacccacagcagggagggcttcccccacccccgcaacgtcactgttgctagatctgggttcaaattacagctgtgagccgggtgaagtggctcatgcctgtaactccagcactttggggaggtcgaggcaggtggatcgcctgaggtcaggagttcgagaccagcctggccaacatggtgaaaccccgtctctactaaaaatacaaaaattagccgggtggggggacacgcgcctgtagtcccagctacttgggaggctaaggcgggagaatcgcttgaacccgggaggcggaggttgcagtgagccgagatcgtgccactgcactccagcttgggcgacagagcgagactctgtctcaaaaaacaaacaaacaaacaaacaaacaaacaagagatgaggtctcggctgtgatgcccaggctgttttcgaactcctgacctcaagatatctgcccgcttcggactcgcagtgttggggttacaggcgtgagccaccgcgcctggcccttggctctgccttttggcaagtgacatccatgtgggcctcagtttccttatctataaactcctactttacgtggagacaggccaccctcgccccacccctggctgttccattcttaaaagatgtggacggcgaggcgctggggtccacttgcttcccagcccatcatcacagcgacatcacgacccggggacaacaaagctcctttgagtttgcccatactggggagctcaaaaggtccaggctcgaatcctcccgactcccttttgagtcttggagcaataacctcaacatgcgtgactctaaaatagggtacccgcgcctgccttccccggatggagcgatcgcttctccactagtccgcaaatgggggccaccgttagagccaggtgcgaggaacagcgagtttattgcaggttccaaccgggaacctggcacccacggctggttgggaagggacgccctccgcgcagaggctgagagttccgcgcaggcgcaatgcttccgtcccctctggtctcgccctctcggggcctggtcgcagggaatcgcggatgcgcatgcgcctccagctcccgggatcgcggggaacgtggattccgaacaagggcaactgcggactcccccgtgggaagaaagggagggaagcggaagggaaaaagcgcatgtgcagcagcacgcggcagcttcgcatattccctcgaagcgcgcctcttgcgcgtgcgccgccctggcccagtgcccttggctgcaggaatggctggaaccacccggcttctagccggagtccccggcgcgcagccagcagttgcgcgctacctggcccgcggagggcctggcggacgggctgaactgcagcagctcggcgatcagggccttgcagcgctcggacagctcgaggccttcgggatagagcacgccgcgtttctggcgccggggcaggccggcgatgtccgagtcgtcgaagggcatgcacccggtgaccatgacgtagagcacgacgcccatgctccacacatcgtacttcttggggtcgtaggggatgcccaggagcacctcgggtgacgcgtaggcggctgagccgcagtaggtggtgctcaggtctgggtagccatgggcctggcggccgaagccgaagtcggtgagcttgacgcggcgctcgtccgggctcagcagcacgttttcgcacttgaggtcgcggtgcaccaggtgatgatcgtgcaggtagcgcacggcgccggcgatctgcgcaaagaggtcgcgcgcctgaactccggggatgcgcccgttgcgctgcacggcttgcagcaggtcggtggcggccgcttccatcacgatgtacagtttcccgttgcacacctcgatgaactcgaagacgtgcacgatgtgcgggtgtcgcacgccccgcaggatggacagctctcgcggcaggaacttgttgacgaagtccgggggcgctcgccgccggtccaccaccttgatggccacggtacccttgtacttcttggatgtggccaccttcaccttggagtagctgccctctccaattgtgcggcccagcttataaccgagttcgctcagaagtttgtctcccgacatggtggcgcctagggcgcacggggggcaggaggcggctgctgtcggggggcggccggactccaatctcgggtctaagccatggcgcttggcacctacacccccgcacccccatgtgcccactgccagacattggccgctgttgtgccttttattgccccgtaacaatttttgccttgtgaagtgactgcgggcgtcactccgccttagggtgggggtccgggaccccgccccggggccaccctagcctccctgctttgtgactcataatcatcctgaatggtcagtttccgatgagaggccactagcaagggatacccatcaccaccagggagcagaatccgttccagggattggggtgagtccgacttcgagcagcagctgccccccaacatcatgtacccagcccgtgactacgtggagccctgggcttcgcgtagagtccctagacggggcgaaaacgggaaaaggggccttaactggggcacctggctcctttgagagctcggagtttctgactggcctgcgcaacaccccagaggcaaggtgaacgcgagggcctataatgcaagaaccaaggcgagtcacgccctgtctgggcaaaagaggagtaaagacccctcagctgcagcccggcagcgcattcctacccagggtccgccgccagagctttcccgcgcggtcggatagttacactactgtccgggacttcctagccgtgccgcggaccatctcaagtgcttccgccacactcatcatggcggtggcagtaagtcacttccgcccgggaccggaagtgtgggatactgcgagtatggcggcgtcaaaggtgaagcaggacatgcctccgccggggggctatgggcccatcgactacaaacggaacttgccgcgtcgaggactgtcgggtcagtatcactctgcgccggggtctcagagtctgggcactcggggctcgggggcggggttccggggacacaggcgggcctcagttttcccggcggtgtgaccggaggcggagcccggggatccatcatagcttctgtaataacgctaagtgctgcagtttgttgaggtctttcccagctcctcttccttctcgtaacagcccaggaaatcggtccctctagttatttacgttttacagtgggttaaactgagtcatagcctgtgctctggccctcagccacccttggatttctaagatggggaaactgaggcccaaagaaggccgcggctccccaaggcaaagctgaggccgcaacccggaacctggagggaatttacaagatgttctatgcagtggttccctgctggcagcccccgcctgcatggtgtcacaggaatccatattctttaaattttcaattttttttttttgagacggagttttgctcttgttgcccaggctggagtgcaatggcgccatctcggctcaccgcaacctccgcctcctgggttcaagcgattctcttgcctcagcctcctgagtagctgggattacaggcatgtgccacaacgcctggctaactttgtgtttttagtagagacggggtttctccatgttggtcagggtggtctcgaactcccaacctcggatgatccgcccacctcggcctcccaaagtgctgggattacaggcgtgagccaccatgcccggcgtaaagttttcaaatgtttaagtaacacgttaaattttgttatcgggctcagcacagaaaattgaaaaagagaacttaaaaggcgcccatactcagtccccaggttaacagacaaatagaaacttttaaacgtaatctaagagtgaatacatacatttctttttttttttttaagacggtatggttctgttgcctgggctggagtgatttcttggcaacctccgcctcctgggctcaagccatcctcccaccccagcctcctgagaagctgggattacaagcatgcgcccagctttctgtattttctatagagatgggatctcgccatcttgcccaggctggtctcgaagtcctgggctcaagtgatccacccacctcggcttcccaaagtgatgggactatcggcatgagctaccgtgctcggcagaatgcatgtctcttaacaaatcaaactttacatttaaattacatgttatgcacattattcctcaattttaacacacacacaaaaatgagcatggtaattaaaaacgtaataattcagacagtagaaaaatcagtgtgaggtgaaaagtcctccccagccccttcttggtttttttattttttatttctactttttgtagagacagggtgcagctatgttgaccaggctggtctcaaactcctgggctcaagtgatcctccagcctcagcctcccaaagtgctggaattacaggcatgagccaccgcggccaacctcctcttgtttttcttgtatcccagaactgagattggcagactttttctataaaagggacagatgacaagtattttgggtttggctggccagaaagtttcagttactgagacaaccatttacaaatggaaagtgttcttagcctgggggctctacaaaaacagattgcctgtgagccaggtggctcatgcctgtaatccccacactttgggaggctgaagcgggaggatggcttgagcccaggagtttgtgaccagcctgggcaacatagtgagacccccacctctaccaaaaattaaaaaaaaaaaaaagaggcttcaggctagatctggcccatgagtgctgtcccagaacacattggaggaatataatgcattctatttcctcatttttcttttttcttttctttctttcttttttattttttgagacagagtctcattctgtcacccaggctagagtgcagtggcccgatcttggctcactgcaacctccacctcctgggttcaagcaattctcctgtctcagcctcccgagtagctgggagtacagttggatgccaccacatccggctaatttttgtatttttagtagagatggggtttcaccatattggtcagactggtctcgaactcctgacctcaggttatccacccacctcggcctcccaaagtgctaatattgcaggcacgacccaccacgcctggcgttgtttgttttttggttgttgttttttgtgtgtgtgttttttttttttagaccaggtcttgctctgtcacccaggctggagtgcagtggcgtgatctcggctcactgcaacctgtgcctcccaggttcaagcgattctcctccctcggcctccctagtatctgggattacaggtgggcgccaccatgccctgcgatttttttttttttttttttttttttttttgagatggagttttcacttttattgcccaggctagagtgcaatggtgcaatcttggctcaccgcaacctctgcctcccaggtttaagcgattctcctgtctcagcctcccgaatagctaggattacaggcatgtgccaccatgcacagctaattttttgtatttttagtagagatggggtttctccatgttggtcaggctggtctcaaactcctgacctcagatgatctgcccgccttggtctcccaaagtggtgggattacaggtgtgagccactgggcccggcctatttttttttttttttttgtatttttagtagtgacagggtttcaccatgtaggccaggctggtctcgaactcctgacctcaggtggtccccctgcctcagccgcccaaagtgctggtattacaggcatgagccaccacgcctggccgagtctcattcttctccggtgtaacctgggctaccccaccccttcaggtgtgcagcacaaggtctgtttccaaatatgcacctgtgtgacctgcagccagaccaggccacagaaggacctcaggcctggaggctccctgagctccctgcttccagcatctcatttttgtataaataccctggtcctctcccagttcaccacagagcagtggccccccctgtgccagacagtgccctaaataccactgcctggggttgtgtctcctaatggtgtggacttttgttacagcacatacacacccaccccagcctttcccggtggaggagtgaggaggatacccctatgctggtgtgctctttgtttatggccctgctttcattgttgagtgagcacatggttccgggccctgtccccaagcgctcacagctgagctgaagagatacaacacatcatgccaggatttctagttgttggtgaggcctgggataacctgggcccacttaagccaggatgtgccaggaggacctctgagaagaagcctgctctgcagaaaaagagcaaacacacaggccctgcctcctctccctctgtcctcctctcctgcctctcctgagccatggtccacagtggccttcccaccagacctaccttctgtgctcctgtccaaggcctggtggccccaagcctggcacccactcccttctgtctgcctgggtcagccattcactcactgccagcgtcccaggacatgatgggctggctcaggctgctttttgttctctttttttttttttttttttttgagacagagtcttgttctgtcactcaggctggagtgcagtggcgcgatctcagctcactgcaaggatggtctcgatctcctgacctcatgatccacctacctcaacctcccaaagtgctgggattacaggcatgagccactgcgcccggctggctcaggccccttttaatccatgccgcttctgaagtgacttcaccccacctcctccactatctcccacacccagttctcctgtccccactccctcctgagcctagcaggcagccctttccttttcatcttgtgtctttaatatatttattgaggttccaataccataccacacaactcacccatttaaagtctgtccaatttaatggctgtgagcggtggctcatgcctgtaatctcagccctttgaggacaaagcggatggatcacctgagctcaggagttggagaccaacctggccaacatggcaaaaccctgtctctactaaaaatacaaaagttagtcgggtatggtggtgcacacctgtaatcccagctacttgggaggctcaagcaggagaatcgcttgaacctggaaggcggaggttgcagtgagccaagatcttgcctctgcactccagcctgggcaacagagtaagactccatctcaaaaaaaataataataatatagtgaagtgtgtccaatttattgattttttagtatattcacaaagttgtatggccattgccatgatcagaatttagaccactttcattacccaaaagaaaccccgtcttccctattagcaatcatcccacccctggcaaacactaatctgcttccttctctgtggatttgcctgttctggccatttcctatcagtgaagtcatagaccgtgtggccttttgtttctggcaaattaatatccagcaccaagtgttgtgttttcattttttgatgggcacttgggtcatccacctactctttggctgctgtgaataatgtgagtatggctgccatgaagattcatgctgtacaggtgtttgtatggatgtagattttcatttttcccttgtgaactttcccctaagagagaaaccactggatcatatggtaacttcgtgtttaacattttgaggaactgccaaattgttttccaaattggctgcaccattttgtgcttccacctgcaatgtatgagagtcccaatttctccacgtctcaacaacactgattattttccatttttttgatcatagccaccatcctagcgcatgtgaagcggtatttcattatggtggagttttttaaaattctttttgggtctttttttgctcagttttctggtcattgatcgttgatttgcatatcactgctggctgatgatgtcgaacattttttcatgtgttttattatttttattttttattatttttttcaagagatggggcctcagtgtttcccaggctggtgtcgaactcctgggctcaagctgtcctcccgcctcagcctctcaaagtgctgagattctaggagtgaaccaccacctttgcatgtgtttattggccatttgtatgtctgtctgtgagaaacgtctattcaaatcctttatatatttttagtagggttttttgtttgtttgttcgtttgtttgttttgagatggagtcttgctctgtcgcccgggctggagtgtagtggcacgatctctgctcactgcaagctccgcctcccgggttcacgccattctcctgcctcagcttcccgagtagctgggacttcaggcacctgccactgcgcccggctaattttttgcatttttagtagagacggggtttcactgtgttagccaggatcgtctcgatctcctgacctcgtgatccgcccgcctcggcctcccaaagtgctgggattacaggtgtgagccactgcgcccggcttagtagggttttttaaattattgaattattgagttgtaagattgtgtatacatatgttgtcttctcagctaattgatagtttcatttacagcacaaaagtttttaatttcaataaagtccgggctgggcacggtggctcatgcctgtaattccagcactttggggggcagaggcaggtggatcacttgaggtcaggagtttgagaccagcctggccaatatggcaaaaccccatctctactaaaaatacaaaaattagctgggcgcggtggcgggcacctgtagtcccagctactcaggaggctgaggcaggagaatggcgtgaacccgggaggcggagcttgcagtgagccgagattgtgccactgcacttcagcctgggccacagagtgagactccatctcaaaaatacatgtataataataatttcaatgaagtccaatttctgtatttttccttttgtcacttgtgcttctggtgtcatatctaagaaacctagtttgaggtcacagagagtgacttacattttcttctaagagtattatagtttcagctcttacgcttaggtctttgatcctttttttttttttttttttgagatggagccttgctctgtcacacaggctggagtgcagtggcgcgatctaggctcactgcaagctccgcctcccgggttcacgccattctcctgcctcagcctcctgagtagcggggactacaagtgccagccaccacgcccggctaattttttgtatttttagtagagacagggtttcaccgtgttagccaggatggtctcgatctcctgacctcgtgatccgcctgccttggcctcccaaagtgctagaattacaggcgtgagccactgcgcccggcaggtctttgatccttttgagttaatttttgtggatggtataaagaaggaacgcatcctcattctttagcatgtggctgtctggttatcccatttgttgaaaagactgttttctctcccattgaattatcttggcacctttgtccaaaatcaattgaccataaatgtgagggtttatttctggactctcagttctgttccattgatgaacatctctgtcctatgccagtgccacactgtcttgtacacacagctgtgggataagttttgaaatactgaagtgtgagtctttcaactttgttctttttcaaaattgttttggctgttctggtcccttgcatttccatatgaatttcccaacctgcttgtcagtttctgcaacaggaaaagaaatggttgggattctgatggggattgcgtttcaaatctgtatcagtttgcacagcgttgccatctgcacaatgctaagtgctccaattcttgaacacaggatgggtttttatttattttggtcttctcttaagaatggccaaggccgggctcagtggctcatactggtagtcccaacactctgggaggctgaggtgggaggattgcttgaggccaggagttcaagaccagcctgggcaacatagcaagaccctgtttctatgaaaaatatatttttcttttttttttgtttttgtttttggttttgttttctgaaacaaagttttctctgtcacctaggctggagtacagtggtgccatctcagcccactgcaaccttgacttcttgggcttaagtgatactcccacttcagccacccaagtaggtgggaccacagatacgtgccaccacatctagctaatttaaaaatatgtattttgggccgggcatggtggctcatgcctgtaatcctagcactttgggaggccgaggaagatggatttacctgaggttgggagttccagaccagcctggccaacatggtgaaacctcgtctctactaaaaaatacaaaaatttagctgggcacagtggcgtgcacctgtaattccagctattcaggaagctgaggcaggaaaatcacttgaacctgggaggcggaggttgcagtgggctgagatcgcaccactgcactttagcctgggctacagagcgagactttgtctcaaaaaataaaataaaatacgtattttgtaaatgtttcactgtgttgcacaggctagttgcaaactcctagtcaagtgatcctctcacctcagcctcccaaaatgctgggattacaagcgtgagccgaaaaaatttgatcccaccactgcactccagcctggacaacagagagaggcccggtctccaaaaccaaaaacaaaaagaatggtccacacacccttttgtgcgtgcccctcaccatgttccccaccagactagcagttcctaaggcacagactctgaggcctggggccttggcccccctgtggttggcgaggaggaagagccctgtgcaggctgcatgcaaatacaagaggccctgcattgtttctgtcatctcatacatctctgttctatgccagtgccacgctgtcttgtacacacagctgtgggataagttttggaatttatttcttctttggaatttatcttacagatgggcctgcgtatgagtgcgcaggtgtgagggtgcaggttctccccaagggcccattttctgcaccagaaggctgagggcagcccaggtctgtcccctgggttctctgtagccgtggaaaataatgagatatggccgggcacggtggctcacgcctgtaatgccagcacttgcaggtggatcatgaggtcaggaggtcgtaaccagcctggccaatatggtgaaaccctgtctctactaaaaatacaaaaattagcctggcgtggtggtgggcgcctgtagtcccaactactccggaggctgaggtggaagaatcgcttgaacccaggaggcagaggttgcagtgagccaagatcttgccactgcaccccagccagggcaacagagtgagattccgtctcaaaaataaattaattaaaaaaaagaaaagaacgagatatgaccagcctgggcaatatagcaagaccccatctgtacaaaaattagttaactggacatggcacacacctggggtcccagttactcgggaggctaaagtggaaggatcacttgaacccaggagttggaggctgcattgagccatgattgcgcccctgcactccagcctgggtagcagagtgagaccttgtctcaaaaccaaaaaccaaaaaaggaaaaaaaaatgaacaaggcagctgatgaaacctcccatgtgctagacaggaggctgagagctgggagctggccctgagcaccctgggcctctccagagatgtgcctctgagcccggacccagcacaccctcattacctgtagtatggaaatgtcttagccctgacttgggcttctaacaggttaaataaccaggtacaaatttgagccagtttctcatttatctccgggtctagcagaggtgcccccgtgagctccatgctggagcagagctgaaggcagaagagcatgacaggtgcagagcagggcccggcaggcacagagtagccccagcaggcatagagcagggccagtgccctggaggcctggagatggccttgccttccacctgctggtcatttcctgggtgttgactggagcctggcctacctgagcttttcattcatcccaccaagtgcaaagcctgtccagagaagagactggggctggaaggatctggagggtgcagggtgagcctgggagccagatcccagacagcccaggcctctctgaagatcccagtgggcccccagcctgtcagtcaggattagagcaaggccccactggtgctcagtaaatattcatgatggcctaggtccttcctggggtgcagggcagggggcttcaccctgcagagccaagaggtagcacggccacccctagagtccggggggtggctgggcagcccccacagggcactgcctgtccctggcagctgtgtgcagcccccgcagggcagcacgcggaactgtggcccaggtggccgggagccaccatggacactgtcagaactgcccttccacttcagggccagcctgccgcccagggtccaaacagccttctagaacacgatggacctggggcccccctagcaaccaccatctagaccctcaggcctcctgaggttgctgcctggcttgtacctttcagaaaacccctggcatgggggcagaggtgtcacagtccaagcagcctcactcctgagaagccgccagtgtcccctgattgcagagtgggcagcgcctggagctgtggaggagggtgtctgggggcgggctggcccgctgagcagcgcctctcttcacaggctacagcatgctggccatagggattggaaccctgatctacgggcactggagcataatgaagtggaaccgtgagcgcaggtagggcccctggtgggcgttgtctgaaagtgcccccccggcgagttgtcggggtcctgtagcattccgctgttgtctgtgctggcgaggggtgaacgggccccttggacttggctgtgcaatcccaggccccagaaagtgcagatccagacccagcacttccacttctaggctctgtcctcgagatgtctccatgtctgcaatcccagcactttgggaggccaaggtgggagcattgcttgagcccaggagttcaagaccagcctgggcaacagagggaaaccctgtcctcgccaccccaaaaaatgtgtctagtgaggagggttgggacccgtggatccagattaggacaggatatgagtggggggcctgcctcgggccctctaagcaggattttgtcagaggtgaccaggctcaaaccagaccacaccaggcagtggacacacagggccagatgaactagggccaggcgcccccctctccctgtgtcacaggctgggcactccttccccacccctcccccaaccccaacgcaggccaggcaggactgggagatgggggtcattgcagggaacttggaaactgccagaaagcagggagaagaaaggaaagattgtggccccgcctgccccagcctcacacactgattattttgagatgaaggggacgtggttttgtgaggcccagagccccgtgatgaagtcaccccctcttcgtcgcgatcatcaggcagagttatttttaggataaaaaaagtttttaattgaaaagaaagtagaaagccaacagtcttgtgggcagtcacccgtgcagctgcctgcacccgccctcctctcaggctcctggtgggctctgcccacagcccttgcccttcccgcgaccctcgccctgccccctgcctgcctccccgcccccctccgcctcttcccccagcagcaccctggcccctgaggtctgtgctgcctgtgctcccccgacctagcctggtctgacctgagtgtgggtttcgggctttcacaggcgcctacaaatcgaggacttcgaggctcgcatcgcgctgttgccactgttacaggcagaaaccgaccggaggtagcaccgcaggggccaaggttgggaggtcactggccggaaggccccaggctgcagggcctgacctgcatccccgaaggtggccagaatgcacgtgggggccatcgccctgtgccgtcagctgcatcctcaggcgtggagacttagtggagacccaagggggcgaaccggaaggcttcctggaggaggaggcagcactggggttggggcaagagaaaagctaggagttggctgggggaaaaggagacagggtcggagggaggcttgaaggggtgctactaggggccctaggcaggggcccctcagggcactgaggccccacccccaccatcggccccatccccacaggaccttgcagatgcttcgggagaacctggaggaggaggccatcatcatgaaggacgtgcccgactggaaggtgggtcccggctgggagggcagaggtgccagccacggcagagacagggcctggggttggggagctcccacagctttctatagaaaccccaggaccaagggggtggtgggtgccaggtcccacaagggaaggctgtagcgcctgccacgcacaggggccactgatcctgggggatgggtcctagcaggctgtatatgggtggctgtgcctctacccataccccactgtccccacaggtgggggagtctgtgttccacacaacccgctgggtgccccccttgatcggggagctgtacgggctgcgcaccacagaggaggctctccatgccagccacggcttcatgtggtacacgtaggccctgtgccctccggccacctggatccctgcccctccccactgggacggaataaatgctctgcagacctgg

SEQ ID NO: 1417 - DNA, 544 bp, Homo sapiens
aggcgcccgaagagcggcatttcctcaggtcagctggggagagggaagctggagacgggcatggttcccatggggccaggagcagcccgtaggaccggaggcagggtcatagctgggacagaatggggtccggggactggagacgggcacagccgggatggaggttcaacggcagaggcatgaccacggtggggaaccggaggcagggatatggccaagacgggcctgggaatcccgggaatccgagaccctcctggcatcttgctggagacactaagctgcgttgctggggaaactgcctccggggcagcccgcccctcatgaatgattcatcagcagcgctggtcgctcccccaccgaaccccaaccgtggcccacccccactctccatctctcccagggccttggagctgcagcccccacttgccgacatgggaagagcggagcttagctcaaatgctaccacctcccttgtccagaggaggaaacaggcctggggaaggcagtcatggctagagcagatttggaacgcagggcctgtttg

SEQ ID NO: 1418 - DNA, 293 bp, Homo sapiens
ctcggtggctcacgcctgtaatcctagcactttgggaggccgaggcgggcggatcacgaggtcaggagatcgagaccatcctggctaacacggtgaaaccctgtctctactaaaaaatacaaaaaattagccgggcgtggtgatgggcgcctgtagtcccagctgctggggaggctgaggcaggagaatggtgtgaacccgggaggcggagcttgcagtgagccgagatcatgccactgcactccagcctgggcaacagactgagactgtgtctcaaaaaaaaaaaaaaagat

SEQ ID NO: 1419 - DNA, 1304 bp, Homo sapiens
tatttttttttttctttgagacagagtctcgctctgtcgcccaggctggagtgcagtggtgcaatctcagctcactgaaagctccgcctcctgggttcacgccattctcctgcctcagcctcccgagtagctgggaccacaggcgtccgccaccacgcccggctaatatttttgtatttttagtagagacggggtttcaccgtgttagccaggatggtcttgatctcctgacctcatgatccacccgccttggcctccctaagtgctgggattacaggcttgagccaccgcgcccggccagtgcagtggtattaatctgacagagagaccaatcaatcacaagctagcaagtgcacagccagatgctggagtgtatgaaagggaccagtggataataggagaggccttccaggctagaaggaggacaggtgcagagatctggagtggagaataaggcctgtggttccctgaggggagcatggagtgttgggtggaggaaaggccagggcaaatgagagacaaagctggaaaaggaggctgggacctggctgggaaggtctgagcccagagatctgagctatgtttgttaagtctgggtggggaagaagtgggaatgtttatttacttagtgttttgaatctgttaactcatttcttaaacctttacatcactttatcccacaaattgtcattataccatcaacttctccctccacaagccactggactatttgagaatatccctcaagtcttcatgcgtgcatgcctcagccccaagattagagacagctattccactaaggctgtgttttcagactcttttaacagtatctcttagtaagaaatccattttcttatgtgtgcatgtatgcatatagatccatgaagcaggcgtttcacagtacaatccttttggtttgatgcatgttgatacttgcctctctattctattttattgccaatggtgactaaattgattttacaactcactaacagatcttgacctacagtttgaaaaacagagtactgaagagtcttgtttcctttatttagaacagtgcaaggatgagtatctgggtagagttgtgcgttgtacataacctttgatagtcatatagttgaaccaaaaacaatttctgtagtgacattgaaaaacattttgacttgatttatcctgacagcatacataatttttggctggctaatacattatccgattgttaattacagcaaaatggataagggaaccttataagaaaacctaccaaataccaatactgtaacattaaacttatttaaatataa

SEQ ID NO: 1420 - DNA, 1042 bp, Homo sapiens
ttgtctttttttttttttttttttttgagatggactttcgctctgtcacctaggctggacagtggtgccatctcggctcgctgcaacctccacctcctgggttcaagcaattcttctgcctcagtgtcccgagtagctgggattacaggcacctgccatcatgcctggctaatttttgtggggttttttttttttttgagacagagtctcgcttttgttgcccaggctggagtgcaatggcgtgatctcagctcactgcaacgttcacctcctggattcaagtgattctcctgcctcagcctcccaagtagctgggattacaggcgtgtgccactatgcctggctaatttttttgtattttcaatagagacatggtttcaccatgttggtcatgctggtctcgaactcacgacctcaagtgatcctcccgtctcagcctccgaaagtgctgggattacaggtgtgagccaccacgcccgaccaatttttgtatttttgtagagatggagtttcagcatgatcctcccgcctcaggcacagtggctcatgcctataatcccagcactttgggaggccgaggcaggtggatcacttgagccccagagtttaagatcagcctgggcaacatggtgaaaccccatctataccaaaaaaaagaaattagccaggcgtggtggtgtgcacctgtagtcccagctacaggaagctgaggtgggagaatcacttgagcctgggaggtggaggttgcagtgagccgtgattgcgccactgtactccagcctgggcaacagagtgagaccccatctaaccaaaaaaaaaaaaaggacctacatgtttcacatgtacatgtatgatgcagaggcactcacttgaagtggtgacttgtgttccttttcgctttgtatctaaatatcttgaaatgaggcttacagggtataggtacagatgagtcccttagtatcatataaacaatgcatcaattatataaaaacagaatcagatgttacagggggaccctgtggaacacaggaaaaacataaac

SEQ ID NO: 1421 - DNA, 665 bp, Homo sapiens
tttttaagcctctcactcaccataggttaagagtatgatccactctaccggttcactgccagttctctgtatttacattaaaactgggtgtacattttaaaatatagattcctgaatcccaccaccagagatgatcccagaatctgccttttagcaagaaccccaaagtattccagtgcaggtgaccactgaccatgcattgaaaaacacagtgccctgacacatgagtgtaaactgagctgagagcaagggccatgaaattctccaagaatcaaaagtattttgtccttgaacttccaagtgaagatgtaaaactggttaatataaaaaccactgttcagtttattacaaatcatttcccacttcctgttgctacaaaaagcagcctttcctttcaaaagatgttttccagggctcaggggaattgttaaccaagggagaaattttaagagatctaaattccaaccagcctctctgtggacaaataaaaattgaaaagtagacatttcaagcttaatgaagattgttaaaggtggagtaattcacatgcccaaagctcatatttaatgtcatttacatccctttgctttaaaatgaaaatagaatcactgaagacagaaagggaggtaattatgtaattaaatgcaatacttaatgcactattt

SEQ ID NO: 1422 - DNA, 2195 bp, Homo sapiens
tttttaagcctctcactcaccataggttaagagtatgatccactctaccggttcactgccagttctctgtatttacattaaaactgggtgtacattttaaaatatagattcctgaatcccaccaccagagatgatcccagaatctgccttttagcaagaaccccaaagtattccagtgcaggtgaccactgaccatgcattgaaaaacacagtgccctgacacatgagtgtaaactgagctgagagcaagggccatgaaattctccaagaatcaaaagtattttgtccttgaacttccaagtgaagatgtaaaactggttaatataaaaaccactgttcagtttattacaaatcatttcccacttcctgttgctacaaaaagcagcctttcctttcaaaagatgttttccagggctcaggggaattgttaaccaagggagaaattttaagagatctaaattccaaccagcctctctgtggacaaatggaagttgaaaagtagacatttcaagcttaatgaagattgttaaaggtggagtaattcacatgcccaaagctcatatttaatgtcatttacatccctttgctttaaaatgaaaatagaatcactgaagacagaaagggaggtaattatgtaattaaatgcaatacttaatgcactattttacataattttgcctaaacttattagactgctgatctccaaactgacttttctagatatatgaaaatctcaaaataagattttaatattaatttaaaaaataaatatggaaattaaataaaccaggaaatttaaacacgattccctctcaataaaaagtctcagaaactacaaaccactgatctaatcctagaggaatggaggcatagagtttgaatttgaaacttaccaagcaaaatgttcacagtgtctgagcacatgacattaagactctctgttatttttcaattaaatgaatttaagatgagagcattgaagcagaaaagaaaaattactgcatttgtgttcaataggatcaaactaataattatagttaggaaatgagtaccaacatattgagtttgtatagctttacttcttgaaagactaaacattttgtttttgatatacaaatatataatgaaatcaaaatatagaagaaaatatgtattaaataaaaatggatatacattgtgttacatcacagatttccaacatgtctgggtgtaaaatagagctagtgaatcttggagaagttgaattctagtctccaagcaactcaatggcagacaatgggaccaagtcctaatgcaacacaattgagtgactaccatgtgccaggcactgtgctaggcactggagatatgaagatgagttagaaatattctctgttgtggttcatacataggggaaagcggaggggtcgaagaggcaaaaagtaaatagccaattacaaggcaatgtcataaccccatgctagagttacaaatggagttctatggcagagattaaagtcctcccctactaacctgttgtggacagccgtatgagcaggaattctatccctaactttctaacccaaggctttcctcaagtatttcctccaatattggagtcttgttcagattcatcaactcctcctccttcccactagatgtcagcacactagagggctatgctcggtgggtgtgtcagcccccagacttgacttgcctttgatggtttgtatttgtatttatgctctggaaagacattggggaacaggagacatgagacatgagactgcccaagtttcttggcaaagagggaaagaatccagagttgtatctctcaccttctccttatcagcttgccaagcttcaatccccaccccacaccaaccctcctctctttcacaggaccttttcctctaaatgaagtgcttgctgaatgaggaatgggactttccaacatcttttggaaagatactttttttccattatgcatcaacctgaaaagctttcagatctgtaataacaagaaagagagacagcgagatctatggagaatgccttcgggtgctgaagtgctgaagtgctacctggctttaagcaagattgctgaaacctgtaatttttatagcttataaactcagttgatgtttcccattcatggaggatactggtaccagaagattggattgtgtaattgtgttagcttcctgcatatttgg

SEQ ID NO: 1423 - DNA, 615 bp, Homo sapiens
ggtgaatgtaacaattctttgaaagacacaatctgtcaaaatccacgcaagaagaactagaccatctgaagagatttatatctattataaaaattgaatcaataataactttccaaaacagaaagcaccagacccagatgagttcagtggtgagttctaccaaacatttaagaaagatattataccaattctctataacctctttcagaagatagaagcaaagggaatactttgtaactcattgctatgaggccagcattaccctaataccagacagatattgcaaaaagagaaaactacagctcaatatcactcatgaatacagatgcaaaaaatctcaacaaaatattagcaagtcaaactaacaatgtataaaaggaattacataccatgacaaaataggatttatgccaggtatgcaaacctggttcaatattgagaaatcaggccaggcgtggtggctcacgcctgtaatcccagcactttgggaggctgaggcaggtggattgcttgtgctcaggagtttgagaccagcctgggcaacatggtgaaaccccatctctaccgaaaatacaaaaaaatttagccaggcgtggtggcttacacctgtggtcc

SEQ ID NO: 1424 - DNA, 5217 bp, Homo sapiens
catcaaggctctgtatccatttcgtcttctacaataccaacagccgatgagcagtaagactcccaggatcactgtcaggatgccgatcccagcggccctggcccaagagatagacaaatccactttgtcattgaaacattgttctacattatgatgaagcataaatcagtcttcctcttcatatggactttgacgacccagagcagcatctcccagtgtccaagtagtttcccacctcccacactgggcaccccaccaggcctccagcacctggatctaacccaggtctttaggagcctctcaagtgtgtgcccacaggaactctgctaattggcatggcccaggcacccaagttccaggtatgagaagtgccatagtaactggtctttatgtggacaatgtatttattggggctaaattatcttttcttctcatcaggctgttttaaaacattttctccaactcagcccacaaagagaaaatagaaattaacactgactcatctactaaaagccaggtgctgtgctaaacattcattagcttattcaattctcacatcaacactggagggtagacacaatttatcatcccctattttcacagaagaggaaataaaaggcagaggatacatgactcgctggtgatcatacagagctagcacaaaacagaggctggatttgaacctgaatccgtctcaattatgttcgtgccctcccttccctaaactccccgctttgctccttgcagccctagggagaagtgtctgggctgaacctacagcaaagctgtggcattacttattgagaaggatcttgtctaagcagcagggtgccaatctgggggtctacaccagcctcttgggccctgtgttcagtgacccctgggaagcattacagttaccacaaagttaccacaaagaccctggaaacagggcctggagctgttcactccgggcaagcatcatcaattagctaacatctgcctgatcacagcatgatcaaaatcgacagaactgactctgttatctgtggttgtcaactcgctaagaaagtttctgcagagctgagtgacttacaagagactgagcagctacaggagaagcaaggtttaactaaggcttctgctggagagacttttgctcagtaccatctactggacaacttctgtctcaaggctgaggagacatcaagcttatcctgtccgtctccaaacaggatagagcgaaccatgggatgacagtgctagatggaaactctgacttatgtaggtcagtccacccgctttatagatcaggaagctgagacctatgaagattcatcaacattaccataaccatagtgactaccattcattgagcaccaatttgtgccaggcactgggctaggcacccccacatatatgcttttatttcatcctaaccacagtcctcggagttaggaatgatgttcattttacagctgacattatgctggtcaagtgcccagggctgcacaaccagcaagtggcagaaccaacattcacagcaactggaacgggagaccaagcaagtgagcaccagaatttgggccagatccaggtctcccaggccagtgcttttcctgcagagtcactctttcctgaactgaagctgtcacaaggagtgttcagtgtgttctcgtgactgaaggcagctgattcaactcccaacatgcctgtgctctcattttaccctgtggcgtccacttgaatatcttgacacagtcagagctctgttacagcactttatgcatggtcacgtggtactcacaacatgcccaagtaactgagagcgaaaagcaccagggtatgcctgacacattggaagaacccactgcccagcttggcagggcgcctcagagtgtcttccaaataccacctgcagcagaatcacctgagatgcacgttaaggtgcagatcataggactccacccctggcctacccaatcagcctcttaggtggcagcacctagaaatctgcattttaacaagttccatggatgacttgtgtccacccaactgtgagaactgctctccactgaggtttcaaagagatacataatacccaaagcaggtatgtagtccttcttggctggatgtgggaacttattttgcatcattcttcttcattccacctgctggcacaattgtgagaaggataaatattctcagatcttagggatgcattgttttaatgaagattgccccattgtgcaggatctggattttatgcaaaaaaattaaaaaaaaaaaaagaagatggccccattcccctacctccatcccacctatttaaacaaacagcaatgggggcagggacttttcatgagaggaatgacttttgacattggtggccatgtgcagttacttattttctggaccgatctccttcagtacctgcacaagatgatgatgttccatgtattcaggggttcctacactcacagactgaagttaagtgtttcattgtgctggaagctttggccatctgacccttctacagacagcaaaatgtcaaaaggaattactttctctttaaaggatagctcccacgcatacgggttgagtgggtatttttcttttgtgctggaatccagaggctccctcttgttctcaaggaaaatgtcagataacccacctgaccctgcttatgcacgtcattcaggttgcaagacacagaaagcttgtgccttcagtcaaggggttccttcacatgatagtggtcataaccccctttgccctttattaagccattgtccctcaactccaaacctacctttctatgctctgctctgtgatgctgggactggactctgcaaatgccacttctcctttgcccactggctcccattagagtactctagagggtgcctacaaacctggggcatcaagaaggagcagctccttccagtgtgcttctggctcctgtcaggatcaccccagcaatgctcacattgtctgtatatgccaagcaccagctcgttttccggcattgtcagagccagcttcattatgcccctccccagcagagcactggctgacctcagaggcctgagtatttgattcatgcccctcacttctaagctcttgagacaccagaaccagccaaacaaaaatctctccttagagatctgggtcccatttctgtggcgtccctcctcccaactctaggtcctgatggcctcacccttccgtttgttaccccagacacgggggtagaagcagcattctgtgggtacagccttggttgccccgatgccttctttgcctcctcagtctcagtcccatgcctgtttaaccagcttcttatattaaagtctctatgttgaaccatctagttggtttcttcctgactagaccctgaaagttaccttgttcaggttgtgggtacacctggctatgaggttccccagctgggcatgatggccctacatggcaaaggacaactccactttcggcctactgagctgactagcatcagcctccagcttcacactgagagatactgacctctgccctagcctctcgtcggatgggattgtgcaaatatttgcctctgctggcctgcagcataacacttaagagcatggactctggaggcaaacagacctggatttaaatcccagcgccaccatgtctggccacacatttcctaatttctctaaacctttcttcatttacaacacagcaagaatgatacccaccagggtgggtgccacggggcggggggcgggggtggagcaataagcagaagtgacgtgtgccccttgaaaggaacggtcctagcctctccttcacctcctgctttctgttggcaagatgtggaggtgatggcacaacatcttcagccatggggacaaaagtgacatcccaagggagtaaccagcaagaagaaaacgaacaggccttgaactctttactcttgaatttttacacgagacataaaagtatattttaaagagtctgttgagtgattatacacaagctgaaacgataccctaactaatagcacgggcaatgggctcccctccctcaaagagtatgtttttgctgtcaggacattttctgagaagataccgccgccctcatctccaattggccagggatattagaggatcctataccagggtcttctgaggaaatgctgtctgcctgaactcttcctcagtgcctttgttgggctttacatcttgctggtccctgcggttgactgttaacaaagattgttcaacagctctttccaaagaaagagcaggttcacagggagttctggacagaccacataagagggtgttgtcctgttagagtcccacgcagagggtggggcctcccctgcccctgccacccagcacgtacagagtatgtccctttcccactcccagcacatacagagtatgtccctgcagcctctgggttttcattaccgcacttacatttgctgaaattaatctcatgcctaactctcccactaagttgtgagttttttcaaagataaaaacagtgtctcacgccagtatacaatgcttagcatttagaaatgcttaatcatataaatacttatttttaattcactcataaaacccaatgtctttccttaggataaagttatactgcaaaggctgtgacctccatcttcctctcgagtctggctgtgggctgagtcacacacacctgcccgtcatccttactggctccttggcaactcacttttattctgtctgcaaaccaccttcaggaatttgagtggaggagacagaacaaggattgaggagagaggcattgtgatcctgaacagatgtttttccacttgggaacctacagataagacccaatagtcaaaagtgcacccaaaaatggcaagatccaaccttataccattcccatcttcctgcctgtttggcctcagagaagcttgactgagccccttatagaagcacagaatctcctccccttgttgccagggatgttactgtctggggagataaacactagggagatttacgagcaggcatgtactggtggaagtcagcaggctgtgtcagcaaacggcaaactggaagccctgctgggtctggttttgaacttactcttcagccgtggtgtaagagtggccgtgccccttcttggggtaaccatagatgaagtgagcatcttctcttggcatcttgtagggtcagggcacaggacacctaacagaaggag

SEQ ID NO: 1425 - DNA, 19553 bp, Homo sapiens
tttgtagggtgtgaagtaggtggtaaatagatgatcagttcattatcttgactgtattattaagtgggggaaatatagaatagatgtaaagcatgattacattttagtgaaaatacttatgtcttaagagaagcacggaaataaaatatactacagattccataccattgatatttctttctaaaagggatttgggaagactgtgatttctcttccgcatttctaaatttcttgacatgtttataataatcatgtatttataatcgggaaaaaaattaaagaggctttttgctgttttcttttgttcttgaagcctaagtagagagctgtgtgcttgtgtaatatctcagtgaagctttaaagtgaaacttggtatagattatctgtgtataattatctacagttaatatatttttcctggtatagtttggacaaagacattgtccaataatttggtagttaaattacctatatgaaagattgacttgtcaaatttgttgatttttataataggtgtttgatcagtatgtaaagaccagggcagaggaagaacgcagggaaaagaaaaataaaataatgcaagccaaggaagatttcaaaaaaatgatggaagaagcaaaatttaatccaaggtatgtggtttgtttctcttaaatatcaaagtgtatttattttctcctaagatcagtttttaaaaattaaaaaaatagatattttttgactatttgggcactaaaagctccttatttgattatcggtttttgccaaaatttctaatctttattttttactatgtttcctttagaggaatcctaagtgctctaagaagggtacctttgatttaagtgcttccctatgggaataagttctttagaaactagtatatgatagaaaatctgtgcctcatctttgtaaagttttatacataatgagttgcagaggaggaacattattttgattaaattgaagtggtgaaggaccttttaccacttcaatttcaaaattttctaagtgtctagttaatggtcatgtctgacattttgaattgattggtaatatgtattaaatacatgtaatgggctgaagaaaatgagacattttaaatttatttgcctagttttatagtaataacagttactgggtattttatgtgcttatttgcactttaaaacatatatgtatgcatttatacatttacatgtaaacatgactgaaagcatataattttatatatatgcatacagatattcagtcttcagaacaggtagtttgatttaggtacttacgtgatacctgttttatatgagataagcaaattaggtagcttgccccagtgaagctgggatttcaattagatttcagtgttgcacagaattgtataggtagggggaattattcttatttatgacttagatgtaagagtagtggtattaggttactgggaatacctcagtattctaaaactgtcgggtagcatcatggagtctctgggttaaatggcacttattataaacgttcatcttatataaatagttaattttgtctgtggaggtaggaaagagtgatgttgtttaagaagaatgtttaatatagttttatatttgaaatatggtattaaaagttttagaaaataaagctaatagagtatttgtgatatgaagaatttaatattcttcaggggtagtagaggttcagactttccagggagtcctgagttttttctgagtcaaaagagtgagatcatgagtcaaaatagttgagtctctgttataaaagacattttggggggcagttgaggtcacttggtaagaattggatattagatgttagagaattagtaattttcttgggtattgtggttatggaggaaaaaggctttactctcaggagttgcatgttgaaatatttctaagtgaagtcttaagatgtctgcagcttatttccaaagcattcagcagaatatatttattaaaactccatatgggtctgtgaataattgaaactccaaagagatttcccttggtagatatgactaagtcttaccatatcgtagtactctactggtgttcttttcaggcaggtagaattgttgaagtgatctgtattatgcaggttacttcataaaatgaaacgatcaggcactaagggcattgtcctgtattgttatattgatacatccaactctggcatagaaattaagaccatttttagttctagaagaatgcaaggaggaaaaactttaaaatgagaaaatgttgtctgttggcctaattttttttttaaagtgggaaaaaatattgcagaaccttttagtagagctagtaaatatagagcaccagagtttgttccaacgggaaagaaagggggaaattactgaactgtgcctgtctcttgtatgtcgtttttctttttaatgaaaatttaagtcatacctcccacagtcagtttctggtcactactatctccctgtcactcaccaccagccattacctacttccttccaaaatattttttatcctgtttgttttaaagtagttttttcacagttaagaaataagtcatatgaaaacatctccatgggaatctaatgctaaaagttcacttctgtcttttctcataaaaagtgtcagatattttacctataagtaatagaaataagtctaaaataaatcagttatcactttacacgttgattttccactttttaaaaggttttttctttaatcatagtttatgctttaatcataacaatgcaagtttattatcccttatcccaaatgcttgagaccagaagtcttttggatttcagattttttaaaaaaaattttggaatatttgtattatacttactacgtgagcatcccaaattcaaaaatctgaattgaatgtcttgttggcactaagtaagttttgggttttggagcatttggatttcaaatttgggatgcccaacctgtagttgctttttctatcttaaaattataaactgaagggcttaatttatcatgaaaataaaacatttaatggactacatatgatcccttttctggaatatacatttttattttaccatgccattttattattgttatgtatctgttgttcaaaccaggtttgcaatatattcattgttaaaaatgttgaattaatgttggatattgattagtattggttgcatacaaaagattattagaatctagccttggccagcaaagcttaaaaataataaatgttagctgtgagtgatactcttaaccttcagttgatgttttaagttctaaattgagattaactggccagttttttgtttataattaaaactataacataatctttgttttaacacaagagaatgttttatttttgcatttaaataactaaatagcttttaagtgggctaatctttattttttttcttctaaaaccatgctaaatataggattgttaattataagagtaaattcttggccaggcgcagtggctcgcgcctgtaatcccagcactttgggaggccgaggcaggtggatcacgaggtcaggagtttgagaccagcctggccagtatggtgaaactccatctctactaaaaatacaaaaattagccaggtgtggtggtgggcgcctgtagtcccagctacttgggaggctgaggcagaagaattgcttgaacctggaggcggaggttgcagtgagccaagatcgcgccactggttaaagcttcaaatatttaaactatataccaaatatatgaaagctttataatgccttttatttatggagaaacttcttttttaaaacttaggctcattagccctcataagcctcatccttttatttaacctgtttggagtttgctgagctttttgaatttataaattgatgttttccatcaaatttgggaagtttttggctagtattttttctgccctaattcattcttttctcttttgggattctaatcacacatatattagtgtttgatattatcttacatgtccctgagactgtttcccctacctcagtcttttttctatctcctctttggattagataattgttagtgatctaacttcatataattgactccttattcaattgtcaactctcatgttaatcctatccagttaattttttttcattagttttaggttctttttaatattttctgcatctctgccaaaactccttatttgttcattcatttttagaccatgttttcaattctttgaacctgtttttctttgattctttcagtgtaataataacagttttgtttagttatttttttaagaggcagagtcttgctcagttgttaaggctggggtgcagtggctcagtcacagctcactgcagcctcagattcctgggcttaagcagtcatcctgagtagctgagaatatatgcgtgtgccaccatgcccaaccaatttttaaattttttgtagggacagagcctcactatgtgttttttttttttttttttttttgagacagagtcttgctctgtcacccaggctggagtgcagtggcgtgatctcagctcactggaacctctgcctcctgggtttttctcttgcctcagcctcctgagtagctgggattacaggtgcctgccactactcccagctaattttttttgtatttttaatagagacagggttacaccttgttggccatgctggtcttggaactcctgacctcaactgatccacctgccttggcctcccaaagtggtgagattacagccatgagccaccacactatgtttttttgtttttgtttttttgattcaaggccttgctctgttgtccaggctggagtgcagtggcacgatctcggctctacagcctttgcctcccaggttcaaaagattattttgcctcagcttctcaagtagctgggattacaggcgtcagctactgtgcctggctggagtctcactgtgttgcttaggcttgtctcgaactcctggcctcaaatgatcctcctaccttgccctcctgacgtgctgggattgcatgcatgagccactgcacctggccagtaatagttgttttaaagttattgtctacttagaacgacatctggacatcttgggtttggtttctattgacttcaaaaaattttttctatggatcacgtttctttgtatatttagtgatttttgattgaatattggactttgtggctaatatatagagactctggagtctgttacctttcattgaaaagtggatatttttgttttagtaggcagtttatttactggttgccaccttaattttaggcttgactttatgttttgttaatgtgaatctctgaaagtgtaatatgtttcttttagccttccagctctgttttccttgtggatcttttgtggactttgttggcctgatcctattctccctttaatactactgactctctgttatctcttctatgctcttaaccctgtagtagcttgatatatagagtgatctttccctgctgttacacaacttggccttagctgtggactcatgggtaatcgctaagtcagatttttcttgggtaccctctctttgtagattcctcttcacccaagctctaatctttgcttcctccagttcattaagactatggtactctagttggacttgagctctctctgcacctcataaatttcccttctttcaggcatttcagtcttactctttctgttgtctactccttgaaatcggttgcctcatatacttttgtccagttttatagttgtgtatggagagctaatccaataagaatttttctattatggctggaggaaggacttagcttcatcgcagagtggaaattgatgagctcttgtctcttgaggcatgcaaattctttactctgtgatctctttctttttttttttaataataatatttattctcctaattctatgctgatagcatacaaatcccttaaccacatttttgctcattacctctttttactcctttctgaaacttactgttcactgttaggtagatgttgagtcccagtgtctctttgtcatatactcttgttggaaaaatggtatcttctgctatgcctttatacaagcagaagtaactgccaaagttagcacacttgtaattttgttacagagcaacttttagtgaatttgcagccaagcatgctaaagattcaagattcaaagcaattgaaaagatgaaagaccgagaagccttgtttaatgagtttgtggccgctgctaggaagaaagagaaagaagattcgaagaccagaggtgagaaggtaagatggttttagttccagtggtgtgattgatgggagtgtgaatgggaaaggtctatgctggtgttatgtttctaaccttattcattggcataaataataggacgtacatggactgttcttttaagttaacttttataattatttatgtatgtatgtattctatcactttacttacataatgcttattttagtagcttcactaaactatatacttttgctttaaattgtgttaatattaagatgcctggtaaactcagaacaggttgttaggactgcctgctcagtggtgccttctaagatttcaagattctttataggttgtaatatttgaatttcaaaaagcttctttatcttttttgccctctaaaagatagcattttagtgactttctattctttcagtaaacatatcttacatataaattattgcttatcagaattaaaggtcagctattaaagattaatgaattccaaatgtcatttgatagcagtgtcaggagtggagaggagcttaccactggggaggaaaactagtagggagatgaccccagtggtgtgtgaaccatcaaaacatgcagccactctccttagtgtcctggtatgctttgtgaatgtagaaaaataacctctggagcctaatcattcttgacatttaaaattgcctcttattccagaaagttataatattacaagttctattaagaaatgttgtttgaaagtaatgctactcctgggaagaagtctctttcattcaaaatagtaacagtattagctaaaacagcttttatcagaaatacctgaaacctcctaattatccgatttattgggcttccaagtgagttttccagaattgtttcactgtttacttaaaaaatgattatgcttctcagaggaaatgtgtaaaatcaaattctactacataattttatatgttgaattagaatcatgttaatgaattatttgctacttttgattttagaataacctatttaagaaaaccaagtaaataagtgattgtttgattttgtatgattgcttttatagaaattaaatgtatttatatttgcatttgtaactgattttctttttctaaacactttttttataactattttatgtattctgttttataacaagtggatagactttacagttttgtgctgtgcggcctgtcaatcagttcagtgacagctgtcaatcactgacacgcaaagtgttatgggattccctagtgaggaaagaattggtatctctgtgtggtgactttagcctcccgagttccggtactttacatttttttagtctttttccttatgaagtgatgagaattgtgcccagaatgtgttaattttaaaaaagaaattaaatagatatgacatctaaattaaataaatctaatatttaatatattcagctttattttattttggctataaaaatcttaattctttaaattacagggttggctttataccattactagattaaaaaaaaaaggcaggaaattgctaaagtgaagctttctcagccaatttaaagaatgcaaaatcagtgagtgactaggccatcaaagcagaaatctttaaagtaagggtttaaatatagtggattttatattcacattttgagcacatttggttaaggggctttatcatttttctttcatgacttccactgtattgtgtatactgttcttaagtatattgtgtatacttaaaaaaaaaaaatcacattgtaactgagtaattagatagcaagagcagtaccagtagcatggtacgagagtttatttccttgttcttgtaattctccagctggtctttgtagcattgtgatagttgaatcaatagctgaacactaaaggtttaaaactaattttaaaactaattttgaaaacctgtgaagaacattgacttctggtgaaattcttgtttttcttaagtagcattttgacggtaaagtcattctcacagtaagagcatcattttcatgtagtttttaccactagttttccattttattaaaaagtgcctgtaaaagtctacttattgaccaggagtggtggctcatgcctgtaatcccagcactttgggaggctgaggcacgaggattgctcgagaccagcctaggcaatatagcaagacccccatctctacaacaaaacaaaaaaatagctggttgtagtgatgtgcttctgtagttccagttactctggaatctgaaatgggaggatcgcttgagcccaaacagtcaaggttgcagtgagttttgatggttccactgcactccagcctggacaacagatgggattctttcaaaaaaaaaaaaaaagaaaaaaaagtctacttattttgtttgccaaagtaactattcttaagctattttattgtaatatattattataaccaatttttataaaattgtggttcaaatactttaccttttgaaatagcacatttgaggttgtatgtaattggagttaatacactgttacaaaattgacatatttttctcttccctctcttttaaatttcctgtgcataaattatttttgttatagtaaggaatggggagaataataaggccttgaattgcagctaatggtaaatgacatttttttgacatttatgcagctgtcaggcaattgttctcatactgatagccttagtaagccatttataacctgtcatggtaatatccacaatgaaaggaagttaaagtttaattttatttaaagttcacttgtttatacatcacacatttaaaaacctatatgataatccttactttataggtttcgtgtctaatatatgaaaattgttttaagctaatacaaattcctgtggcttagaaagattcctatttgatataacttgcatgttttatttaacataaattttgtaaattttgccttccagttgtcaaatgcatctaggaatttggtgttcatcatgtcagatacaaagtagacaagatgaacagaaaaatttaagttacatcactacatcaggtggtttcttaatcagtgtctggaaatactgggtttatgagtatttcttattagttcaaagtgaaaggccaagtttagtagtggagaaatccacagccaattagctgttgtctttagaaacatttctgatgcagatattctgtttcttataaccttaaaagtattttccagaaagaacatcaacttcacttttttttttttttttttttttttttgagatggagttttgcttgttgcccaggctggagtgcaatggtgcagtctcagctcactgccacctctgcctcctgggttcaggcaattctcctgcttcagcctcccaagtagctgggtttacaggcacctgccaccacacccagctaactttttgtatttttagtagaaacggggtttcaccatgttggtcaggctggtctcgaactcgtgacctcaggtgatccacccacctcagcctcccaaactgctgggattacaggcatgagccaccatctcacttttaatcctccagtaggagaaatgaagttgtaaggggaaatgatagtgttagactaggcagaaggaatgattcatatatttttgtgcatacacattttaaatcctgattcccatgatcaggtgggaaggtaccattttcaattcctactggaagggaggggttcttaatatggtcagaatcctttgttgaaatgaccttggttaccttgggtatcttctatggtaggagtacaaagtagtatacatgggattaaattttaaaacaattaggccctcagacatacataaaaataactatctcatttactcctttcctcacctatttaaataaataagaaatacagttttggagaggggttttaagtagttgtatatgttgatactgaaggattaatgtttaatacctttggtataatgtttttaacttggtatttcagttgttgagtataatactggataaacacttaacattctgagtttataatgttataaacattacatacatgtttaatgctaaaaagtgtagaagatctgaatgcaattttttagtaatgattaattatgaacatagaaattctgtaactttctcacatatcaaggtgtacagctgcctttttttcaccaaaatataaatttttaccctattttgatttcagacatttgacagtataagtttgtaatgacttgcagtgatttttaaatgtcctattaatttcaatggccaaaatttttatccatctagtttttaaataaatcatttttaccttgttgatattaaagaattgtcagcttcataagcctgactcttagctaaaaagaaatgcagctcgatgtaaatttatattccctatgaatacatggcagttctgagatctaaagttatcaacaatctgaaaaagcctttttctatattttaataatttctttataaaatattatttatcttgaatttggcaaattttagatgaaagcctatatgcttgtcgatgtttacatttctagtaaaagaacacttctgatcttttactgtaattctactctaaatgcctatattttaaaagttattattctcatatttaaggtaggtgaactttttttctagttgtaaatatttaagatatgatgaatttctcatggtacattattttccctcccatcccactacctgttttaaaatacagattaaatcggatttctttgaactattatctaatcatcacttggacagtcagtctcgatggagcaaagtaaaagacaaagtagaaagtgatccacgttacaaagcagtagatagttcatcaatgagagaagaccttttcaaacagtacattgaaaaaatagccaaggtaactgttgtgtttacttgtattgctttcattgaataatacaattcttgtgtttaagggtatatgttgttgttggggatttttctattgggggtttggattttttcttgttagtattcttaacataagagtctagttgatttggagatgagaggtacacagtgtttaggtatattctgggcaaaaactagatttggaattttttatttggcaagctagttattctgtaaaaacatattttgatggagttggtaagaaggataatgtagtttttgcttttacagaatttagactcagaaaaagaaaaggagcttgaaaggcaagcccgcattgaggcaagccttcgagaacgagaaagggaggttcaaaaggcccgttcagaacaaacaaaagaaatagatcgagagagagagcagcacaaacgagaagaagctatccagaatttcaaagctcttctgtctgacatggtatacgttaatcttttactttttttctctaaagtactggatattggaaatttattatgttactgttatgaatattttaatgttctttaattctgagggagataatttgctaaattagaaagcatttaaaaattgaatacttggtattagtactgttagtataggaaaaaacccaagttattcaacaaattcagaagttaggcattttgcatatatggaaagtcataatcatttagtctcacaactttattatttattgttcttgatgaaagtcattgtaaactattacacacttacctgccatagtgataaacaaaacgtgctgaacacaatttaaccttttcgttgatgatttagggccatcattgtgatgatcagttatacttgcagatggtatgagattgtaggactggaggtgtaactgactgcaggagataccctgaaactttgttgaaaatctttctcccttacccctcagagttgttgaggtatgtagggttttttgtccctacagtgaatgaccctagactaccgtcctacttgctaatatattttggagttgggggtggcttctctttgtcatatctctcctatgctatttcttttctctttttcagtggagcttgctactcttgtcacttctgatttcttcccttgcatctgtttcttactctacccaggagtatccaatcttttggcttccctgggccacattggaaggagaattgtcttgggccacacataaagttcactaacatggctgggcacggtggctcatgcctgtaatcccagcactttgggaggccaaggcgggcagatcacttggggtcaggagttcaagactaggctggccaacatggcgaaaccccgtctctaataaaaatacaaaattagccgggtgtggtggtgcgtgcctgtagtcccagctacttgggaggctgaggcaggagcatcacttgtacctgggaggcggaggctgccgtgagccgagatcgcgccactgcactccagcctggcgacagagtgagactctgtctcaaaaagaaaaatgtacattaacactaatgatagccaatgagctaaaaaaaaaaaaaaaaaaggacaaaaacatctcataatgttttaagaaagtttatgaatttgtgttggggtacattcagagccatcctgagttgcatgtggcctgtgggccacgggttggaaaaccttgtcctacaccctggacaattacagtagtttcctaatttctctccctacctctaacattccctcaaatttatccgttctgttgcagtcacagaagtcttcataaaaagctaatcaaattttgtcactcccctggttacttgcaggggatgaaggttctctttactcccagcagtttcctacaggtcacatttagcctccttagcataatataaaagattgttcatttcttacctcccaccttcatatttccttaacacctttgctttcttcattgttccttgaactgtagccttgctgaacatgcttaatgaaccataccatccttccattgctcacggcagtccctctacctgatatgatttggaagtgttcctgttgcagtgacagactttctcgttcttcagggggacgctcaagtatctcttctgtgaggctactcctgacctatctaggcagattcgatctcactgttccttagaccacccttgtgctcagcatatgactgcagcacttattacctgtatttgcagttatttgcttacatgtttatcctttttgtttttttattttttatttttttgagatggagtctcactctgtcacccagctggagtgcagtggcatgatcttggctcactgcaacctttgcctcctgggttcaagtgattctcctgcctcagtctcctgagtagctgggactacaggcatgcgccaccacacacagctcatttttgtatttttagtagaaatggggtttcgccatgttggccaggctggtctcgaactcctgacctcaggtgatccacccacctcccaaagggctgggattacaggcatgagccaccgcacccggcctttttatccttttttttccttctaagtgagctctttgaaggaagggataacgtcttattttgtaatcttattgcaaagcacggtatatatctgacttgtatttagatgcttggtaagtgttggttaaataaatgtttttgtatttttgttttcttacctttctgttattttagtctgtgtttcttcacattggcagtagtgtggcttaacttttaatgccattatcaccaatgaagcatatctttttgctggttggtgagccagccagacctgttatgccttctattatactgtcttcttcttaaaaattgttttgagaagtcataattgtatatacttacggggtacagttgctgttttgatataggtagataatatggaatgattaaaccaaagctgtttaacatattcatcactttgtttgcttataattttttgtggtgagacacttggaatttactctcagttattttgaatgtagaatacattattggctttagttaaccctggtgtgcagtaggtctcaaaacttatttctgctgtctctgaaacttcattatctttgacaagtaactcctcattctctcccttgtcctgtctcctaccccctagactttggtgaccatctactctctatttctatgagttcaacttttttggattccacaaatgtgagactatgcagtatttgtgtttctgtgcttgacttatttcacttatgttgtcctctaggtttatccatgccataaatgaatagaattttcctctttttttaaggctgagtggtactccattgtgtatatttattacattttctttatccatgtatctgttgatagacacttaggttgattccatatcttggctattgtgaataatgctgcagtggacatggaagtgcaaatggacattcagataagtctctttggtgatatatatataattttttctcttcaggtacgttcttcagatgtgtcatggtctgatactcgtaggaccctccgaaaagatcaccgctgggaatctggatccttattggaaagagaggagaaagagaagctttttaatgaacacattgaagcacttaccaaaaaaaagagagagcactttaggcaacttctggatgaaacttctgcagtaagaatctcttatttttctcattttaatctggatgaatcttgttagtaatttcttaaagcaaagcattgatatgatttttagtgtcatggtctttagattcattactggaatgcatcttatgacaattctctgattttaaaaaattatggtattcttatttatttagaaatgcctattctttgcagttttcacattcataactgctcccatagtaattcaaaatgtccttagccatgtggtcagtgatccctcctaataatagatttagcaaatttcttcttttgatccattttcaatttggtactatggcctcttgttcggcagtttgtacgctttgttatccaggttttgttcctttttatttgctctctttttggtgatggtttcttcagaagttatgatgtttgcccatgtaaatacagggtttgcaggtgattgtcttaggccaccttgaaagtatggccatgaaaataactcttgtggcaagccaacaaaaagaaattgcattaacgctgcttccctgtccctaactagtccagttacgcttgggcattacaagagatcgcaggtcagtgtgtaatattatgtacctatgtgctgcagtttgactccctaagtaaaagtgagttgtatttatgttttttattcatgtcttttcaaagattaccttaacatccacgtggaaagaagtaaaaaaaatcattaaggaagatcctcgatgtattaagttctcctccagtgacagggtaagaggattttgtgtcgagatttactgtcagtctataaatacttaaatcggggcctaacagcactactatcttaaccaaaatgaagttgattgttttaagtgaattacttttaagtgtatgagaagtaaatctgaattttaagtttatgtattgtttcttgcatgataaattagcaagacagcacaatagaaagtttaaaattttagtacttggggtgaagcttgtattttaggatcttagaaatttaatgaagctgcagttttattttagtcaggtaccactagacagacatatttaggctggcaattggtaccaaactatcaaagcacttgactcttaagccaaacagagccctgtaatgagatcgctagttctcatatgcttcaaggtctgaaacagtgaatgatgtcaagaaaagtgttgtttactacagtccattttatccctaggccttttatttgttttcttttacatcattcccctttcctggttggtttctgtaggtctgggcatcttttataaaaactcataaatctaatattcttccccctcaaagtctattggattgtagatgtttggaccataaaatatgcatgactgggaaagaggggtagacccagtctcagtttctaacttttctgactgtttagaattgataataaagtcttttttaagtccaaagagtttattcatcttattacttttggcttgccagaaagctaaatgctcattactgtgtaagttaagtattgagtgttaacctacagttgctgtatccacaaattactctttttgttcttgaagttaaaaatacagtgtgcaggaagtgaacacttaatccttaatatccttatttttaagtgtccacctcatgaggttgttgtgaagattgaagtagatgatcctcataaaatgctcagcagtgtagcacatagcaagttctcaagttttagccactactaatttatgattcctcattctttctatttgccgcaaaaatgagccttgcaaattgtgatttaatgaattttatatatgaacaaaatgtaccctgttgcctttttcttttgaattttaaattttattatgtgacttacacattactgtttaataaataattgatgtttattttggaattagtgggttttatttccataatctcaacttttttttttttattaacagaaaaaacaaagagaatttgaagaatatatcagagacaaatatatcacagccaaagctgacttcaggacgcttttgaaagagaccaaatttataacatataggtgtgtgcaatgaaatgtttcatattggcagtcattctctttactagtctttactctaatggtcagagcattctttgcattcacacacatgttgacattattaatttttagggataagaagataccaacttctgtccaaagtcaaatacagcccatatctaccatacttttttttttttttaaagaaagggcccagatgtcaattcttattttgtgttacccacccatccagttttgaatacataccttttttttttttttacttcaccgctttttttaggaataccctcaactatataagaattgtatttcatgaagagacttttaaaataatctttcactatcagttatctttgcctcctctgaagactattcagtgtggttagatcattctaaagcatgaaatcatctatttaagctcagcataaacatttttttttccctcagaggaaagcattttgctgggtacatttaaataaaaattgtaaattatgaaatcagagcctttaaacaagatttctctgtagcaaacccaacagttcttcacccctaacaatttatcatcaggaaaacaatttcgcattgcttaccagtcagtatgcaggaaaccatttttgtttcatgctccagcttttcttctttaagagagaaatttgaaacatcttaataaagggtatgtgcacgggaggctagatagtgctgagggtgtggtttttagatattttgtcatttggattttttggtcaggatccttaatgttttgcatcagcttgggcttttaaattagatgtgaagtaagacttctttctacatttttatagttaatttagtgaaagatgtgaaagtgaaagcttgtgaaagatgctgggattggcagccccgcagactgaagtcctctgttcatccacagaacaggtacagcacgggcaagatttacccacccaccctcagccctgatctggagggaccaccactaggggtgggagggtaattcagcttctgaggccctttcactccttggagtctttgctgaggcgacttacaaaggtgaccactgccgtgaaatttttcttaaaaaaaaaaaaaaaaaaaaatggaaacacaattaggaactagatggacatttccagctcatttctgaaagacctgtgaacagcagtcagtaattcttggacttctttttcttatttcagatccaaaaaattaatccaagaatcagatcagcacctgaaagatgtagaaaaaattttacagaatgacaaacggtatctagtactggactgtgtgccagaggagaggcgtaaactgattgtggcatatgttgatgacctggatcgccggggtccacccccacctcccacagcatcggagcccacgagacgatcaacaaaataattctaaatactcttccataggggcatctattcaaaatgcttgcatgagccaattttcaggtttttacatatatgtgcattagtcaacctattgcgaaaccatctgacaaacagaaggagaagcatttgtgaacagtttctgaacagaacactttggaaatatttatgcttttctttgtgtggcatgactgacatacatactcaaatataggctgtctctagtaaatcttaaaatcttgaagctaaaattcatccttttatgaggtgtggaagtcagtgacttggtgacgttcttcctagcagtgttaatacatgcaagaagtaagagcatttgtggcttgaacttgccagatgcaaataccacagactccaagaaaacccgagttggggtttgttttgttttgattttttttttttaaagcgggtaaaagagaaaacactgaaaattgaattcttatcttccagaggctacaattattataatggacaatacttttacctttgtctctaaagatcagattagttttatttgttcacttacgtgctttgattatcccctctgaattatagaccgagtcttgttgtttagcctaagagaagatttatgtagtaatttcttctcaggtatggaaccacggtcataactaacatgttggccagaatagaaccactggttaaacatattttattcaccattaagtgatctttatcaatattctggattagacaacaaattacctttctgggtgtttcttgtaaactatactcctgtttgaatgttaaactttgttgctaaagtttaattttaagatgtttgaatgttcagtttatgtatttgaactacaataaaccaaccctttttatatatctgtattgtatatgattattgttacttaatttttaagagcttattttaacctgtttttaaaagcagcaaatagaatttcccacaaagtaagttgactctaaatcttaagtattacctagtttttaaaggtttgaatataataatgcagtatttgcagtataaaaaggaaggaatttgtagagaatcattttggtgctcaagtctcttagcagtgccttattgcctcatagcaagaagatgctggggttttttttgtttttgtcctttgtattaatgtatgatggtttgcgcctttttggcattctttcaacatgtcgtgtacatcacaccatgaatcagttcctaattgatatatctagctttacctcccgagttaaaaaaaaatctttttattttatgccttcataggttgctcgtttcagagtgccacataaataaaatgtttaacaaaa

SEQ ID NO: 1426 - DNA, 16181 bp, Homo sapiens
ggacatgtcctcatagagatttcaagtacccacaagaaactcaacgagagtcttgatgaaaatgtacgtgatctgtgtttctatttacaaaatacactcatttcaggttttagaacttattttgcttaaaatctcaaacctggtatgaatttatttccttttgttaacagtttaaaaaattccacaaagagattatccatgagctggagaagaagatagaacttgacgtgaaatatatgaacgtaagtgcatggttttcctccagccccagccttgggctgcctgacctcccagcctggggagaactcgttcccactgttgactcatcagcagcagacaggagagaagctccgtgttgatgatgcccagatgcatgaaaccgacaagctctctttgggctgtgtgggccggttttcgctaacacttgggatcttattagaaagcataggggccaggtgcggtggctcatgcctgtaatcccagcactttgggaggccaaggcaggcggatcacttgaggtcagtagttcaagaccagcctggccaacatagtgaaaccccatctctactcaaaatacaaaaaaaaattagctgagcatggtggtgcatgcctgtcatcccagctactcgggaggatgaggcaggagaatggcttgaaccggggaggcggaggttgcagtgagccaagattgcgccactgcactccagcctgggcgacagagcaagactccatctcaaaaaaaaaaaaaaaaggcataggaaaaagtattgcaggaaatcacactgcttccagaaagcattgtcttcacagaatacattcacgctgtaggacatttgtgcttctgtcgctgcagctgatgcagacataacacttcctaagccagcagcacttcaggctgtgggtggtgtgcgggagagcaccgtccggggctcccggtgtgccctggcccatctgcagagaccgctcctgcatggcgccccttctctatccacttttgtccatttcagcaggtttatccaggtccccttcagggtggccctacagacccggtattgagggctcttgccatcttcccttgctctatagagtacttaactttctcctgccacccaaagtccccttcctgctcacccagacccccatgtggcagtgagtgtgcgagttgccctggaatcatccctcccttgtcgtcctcgtgaggactgctgcctggctgcaccctcccggcaggaggccacaggacccggacagctgctaaggtgcatttcatgccaagtgatttacatacattatctaattgctatgccttcagaaactccaaaacatagacaccattctttttttttttttttttgagatggagtcctgctctgttgcctaggctggagtgcagtggcgcaatctcggggctcactgcaacctccgcctcctgggttccagcgattctcctacctcagcctcccaattagctgggattacaggcacccaccactgcacccggctaatttttgtattttttagtagagacggggtttcaccattttagccaggctggtctcaaacttctgacctcgtggtgcacctgcctcggcctcctaaagtgctgggattagaggcgtgagccaccatgccggccagacatccttcttatctgcacttcacagattatagggaaaacaaggatttgaattctgacgcgggtccgtttaagaccctgtgttcactgggcgtggtggctcacgcctgtaatcccagcactttgggaggccaaggcgggtggatccaaggtcaggagttcgagaccagcctggctgacatggtgaaacctggtctctactaaaaatacagccgggcgtggttgtgtgcgcctgtaatcccagctactggagaggctgaggcacaagaatcacttgaacccgggaggcagagagtgcagtggcgcgatctcagcttgctgcaaccaccttggtggctaagtgctttggatggaactttgagactttgggtggcagaagaaagttaaccacccagcatcaaaaagcctttgaggaaagaaggaataaaagaaagagaagatgtccttagagacttggcttctggtcgggggctcctcatttaaacagtaacctttagaacaaagccaagacattaaagttgcatgaagggggcaatgtgaactgaggggtgagggctctaaccagtgtgtggatggtgtgaactgcgggttgagggtcccagccagcatgcagatggtgtgagttgcagagtaagggtcccagccatcatgcagatggtgtgagctgcggggtgagggtcccagccagcgtaaggatggtgtgaaatgagtgagggccccggccagtgtgaggatgatgtgaactgtggggtgagggtcccagccagcatgcagatggtgtgaactgcagagtgagggtcccagccatcatgcagatggtgtgaactacggggtgacagtcccagccagcgtaaagatggtgtgaaatgagcgagggccccggccagtgtgaggatgatgtgaactgtgtggtgagcgtccccagccaacatgcagatggtgtgaactgcggggtgatggtcccagccagtgtaaggatggtgtgaaatgagtgagggtcccagccagtgtgtggatggtgtgaactgcagggtgagggtcccagccagcatgcagacggtgtgaactgagggatgagggccctggtcagcatgaggatggtgcgaagtgtgggcatgggaccccggccagcaggaggatggtgtgaactggtgtgggtgtgggggccccagccagtgtgaggatggtgtgaagtgagggtgtcagggccccgttgagccacacacagtggaagtgtgagtaaaggcaaactgtgtgacaattcgtgtggtgccacagtaaaataagcacagccatttaacttacaggcaactctaaaaagataccaaacagaacacaagaataaattagagtctttggagaaatcccaagctgagttgaagaagatcagaaggaaaagccaaggaagccgaaacgcactcaaatatgaacacaaagaaattgaggtgagcttttcaacaatatcttgttttcttttgttgttgacaatttgcacagtttaagaggaggttagccgggtgcggtgtctcacgcctgtaatcccagcactttgggaggccgaggcagtaggatcatatgaggtcaggagttcgagaccagcctggccaatgtggtgaaaccttgcctctacaaaaactagctggggtgatggcaggtacctgtagtcacagctactcaggaggctgaggcaggagaattgcttgaacttgggaggcagaggttgcagtgagccgagattatgccactgcactccagcctgggtgacagaatgagactccatctcaaaaaaaaaaaaaagttttgaagttgatctcatggaagtggggagtagaatgatggttacctgtcattctctagatagctgaggatggtcattgtgttgactggggagtggatgaaggagaggttggttaatgggtccaaacatacaattggataaaagaaataagttctagtgtccaatagcagagtagggtgactatagttaacagcgatgcattatttcaaaatagttagaagagaggtcttggaatgtccccaacacatagaaacaataagaatttgaggtgatggccacccaaggaccctgctttgatcattatcacatgtgccctataaatatataatctatcagtttttaaaaataagcattttgactgagagctgaaggctgtagagtttccctgagttaagtataattaatcagtgacctcctgccaaaacatgggctttttatcctggctctgaaagaagaagggactctccatgatcagtgttactattcccattgtacagatggggaaaatgaggcttaggttaaatcatattttattactccattttcatgctgctggtaaagacataccccgagactgggcaatttacaaaagaaagagatttaatggactcacagttccacatggccggggaggcctcacaatcatggtggaagggaaggaggagcaagtcacgtcttacatggatggcagcaggcaaaggagagcttgtgcagggaaactccctttatgaagccatcagatcttgtgagacttattcactatcacaagaatggcatgggaaagacctgcccccatgattcaattacctcccaccaggtccctccccaaacacataggaattacgggagctacaattcaagatgagatttgggtggggacacagccaaagcatatcacctattgttggcatttggaactgggtttgaacctggaactttctggttccaaagcccgtggtgctttccagtaggacacgatcatatctctgaagtacaaagtaatatttgtgcaaattgccccgtgggaatgtcaagcccttgggcaacttctctctgcacacgagtcagggacctcaaggagaacgatggtatctacttaggtcaggttacagcattctttcctctcatgtatttactctattattcaaataaagcaggtgtaaagatggcagaagataaacgtcaggctgcacgctatctgatgctcatgtcatgcttatataattattattattattatttttttttttttagtatgtggagaccgttacttctcgtcagagtgaaatccagaaattcattgcagatggttgcaaagaggctctgcttgaagagaagaggcgcttctgctttctggttgataagcactgtggctttgcaaaccacatacattattatcacttacaggtgggtgtggtggcaaattgccttgagcgtattaataactttatttcatatttaaatgccccagaaggctgggccgtggcccacgcctgtaatcccagcactttgggaggctgaggtgggcctgggcaacatggcaaaactctgtctctataaaaaataataaaaaaaaaactagccaggcatggtagcatgtgcctgtagtcccagctactcaggaggctgaggtgggaggatcccttcagcctgggaagttgaggctgcagtgagccatgattgtgccactgcactccaacctgagcaacagagcgggaccctgtctcaatcagtccatacgtacagagatatacacacatgcacgccactcaccttccacacatgcccaatataaagcagtgggccattttgccaatgaaaagattccagagaaactgtgtttggccaacttgaacatataaacttatagaaatacagctgaaatggtcaaacgtccatgtataatgtttaataaattaataatacatccatatttaaagtccttcataaaataatgcttcatcattgaaaaatagcacatgtttgctcttctcacctgcgagtcagctttccccaggccctttctgatgtgtcctcagcatcagtgtcttcaccatggctgctggtgagtcccagcgggcccaggtctaccccacctgggcgatttgagatgctcccttcatgggtccgtgtccgggggtcacgggcagctctgccccagcccacgggcccccattcacgcgcatcaggacagctgggctcagtgatgcgttcattcctcttggtggtattggttcctggtttattcaactgaatgacctcatcaccctccttccaacacacacagctgtgaggttcgaacccccaggaatcatgatgcaacacatgtcactttcctttcctttgttttaaattatgaactctgttgggcctttgtaaacatccaaaactagcactggttgaggtcagaaattcattgttgttcatagtaaagttagagagtgttccaatataggagaagctttgcaagagcttgaatataagtcagctttgtctttgttttaaaggaaaaatactttggccttgtatgtatgcaaatgttgtattttctataaactttttacaactttaaggaatattcaggactgcgcatggtggctcacgcctgtaatcccagcactttgggagaccaaagtgggtgaatcacttgaggtcaggagtttgagaccagcctggccaacatggtgaaaccctgtctctactaaaaatacaaaaattaatcacatgtggtgagcacctgtaatcccagctactcaggaggctgaggcaggagaattgtttgaacccaggaggctgaggttgcagtgagcccagatcacaccactgcacttcagcctgggcaacagagcaagactctgtctcaaaaaaaaaaaaaaaaaaaaggaagaaaaaggagtattcagctccctaaataagatttaaaattagtacagcaggccaggcacagtggctcatgcctataatcccagccctttgggagcccaaggcaggaggatcacttgagcccaggagttccagaccagcctgggcagcatagcgagaccctatctctaccaaaaaaaaaaaaaaaaaagttttaattagccagttgtggtgatgtgcatctgtggccccagctactcaggaggctgaggtggaaggattgtttgagcccaggagttcgaggttgcagtgagctgtgattgtgccagtgcactccagcctgggtgacagagccaaaatcctctctcaaaaaagcagaagaaaatggttacagcaaaggaaatagttgctgtattaggtgatcacttttgtcaacagcatgtctgtactagtttcgggaatgtagagttcactttagaatcttctcttcccagagtgagggcatcctgtggcaccagggtcgcaggctggagaggacagaggtgaccttgaggttctcttcctgcgtgatatccccaccgtgtcatgaggcagcctagcaccttttcagggagctccagttatcagcagagtctttcttagacttaaccatcggtcccagtaatgctttctagagtgacgcagaccaaatctgctcgtttctatgctggaagtttcttcgagtatctgaaaactggttttgtggcttcccttaattcagctaaagcgcctcagtcctttctgtggagttgggatgaagcaggcccaagcagctggtccacggtgctgcagagtgtcagggtgacagttgggggtggggtggcatttggggacaggggtggtgtgagggggtctttgcccttccccaggactgacatcagccccccaccactcttgataaactcagaggctgagtaaaagcagtgtgactgccatgcacacagccgcaggacaggctcctgcctcccctttcccaaccagagtgctcttcagaaaaggtgctcactggaagcgcttggggggcctctgagaatccagttgtcaggagcagagccaggcttgtgggtgctggaggggcactctgcctccagggttgcgggttctcacccctgctggtcaggtctgctctgcaaaaccttgtttggcctgtggtgggggcgtccctcagcactgcccaccactcacccacagtccctcttccccatagacagactctcaggacagtgtctgattcacttctctaatgtctgaatcggtcagagtcaactacggggcccgtggcctgtgttggaggtgctgcttttagtaggagtgggagggagaaagtgatggttggcgtttctggggccacctggaaaacgggattcatacagattgctccctccctccctttgagtttctgttcttgctcttaaccatttaccatccccgtattagtcccatgctctgtattcacactgagggatcaggaaatttccttttgagtcagagcctttgcccctctcagccggtgagacacagctgatcctctaggtgcttaaagtgctcaccgagtttaacccagggcccccacactcctggtgctaagccagtaatctgttatcagcgatatgacgtgatgtcatttttctcagctcttcagacaatcttctttgtctttagtcttcttcttttggctttgcagtctgcagaactactgaattccaagctgcctcggtggcaggagacctgtgttgatgccatcaaagtgccagagaaaatcatgaatatgatcgaagaaataaagaccccagcctctacccccgtgtctggaactcctcaggcttcacccatgatcgagagaagcaatgtggtaggagccagttttctcttccagatttcaatcgtgtgtttcctaacttgatctgggccaaatttgcctgtgttggtgggaatcacaggtccccctttattacttccaggaccaccttttcgcacctctatccccttacctttaggggcgaaggtagctgggcacatgtttgttttttgttgttgttaaggtggagtctttcttgctctgtcgcccaggctggagtacagtggagtgatctcggctcactgcaacctccacctcccgggttcaagtgattctcctgcctcagcctcctcagtagctgggattactggggcgcaccaccatgcctggctaatttttgtattattagtagagacagggttttgccatgttggtcaggctggtctcaaactcctgacctcgtgatctgtctgcctcggcctcccaaagtgctgggattacaggcatgagccaccataagttgggcacatgttttatactatgtttggcgctattatctttgttttggaaattttatccttactgttttttttttattttttttgtttttgagacacagtcttgctctgtcactcaggctggagtgcaatggcgcaatctcggctcactgtaggctccgtctcctgggttcacgccattctgcctcagccttccaagtagctgggactacaggcgcccgccaccatgcctggctaatttttttgtatttttagtggaaaccgggtttcaccatgttagccaggatggtcacgatctcctgacctcgtgatccgcccacctcggcctcccaaagtgctggggttacaggcgtgagccactgcacccaaccatacttactgtttttatttgtaatcattccaactaagtttactcccaagtaaggaagtataggtgtctcagaataaattagacacactctgatggcattcatcacaacgtaaggcacttcaggaaaaaaaataggcatcaaagtattcacagtaatgaattcacacatttgtagtttgctgatctttgaacctgggctctgtggagattgggatgcagcaggtactttgaacacatggatccactctttctgcccatctcaaaccccctgaaatgtggccagtcatggtggctcacacctgtaatcccagcactttgggaggcctaggcgggcagatcacttgaggtcagaagtttgagaccagcctggctaacatggtgaaacctcatctctactaaaaatacaaaaaatagccagatgtggtagtgcgtgcctgttatccagctactcaagaggctgaggcacaagaatcacttgaaactgggaggcggaggttgcagtgagctgagatcgtgccactgtactccagcctgggcaacacagcgagactctgtctcaaaataaataaataaatagcctattatttaaaaaaaaaaaacagccttgggaatctgtgtaattccggttctgcactatactaatattggactaataaagaatttttcacaggttaggaaagattacgacaccctttctaaatgctcaccaaagatgccccccgctccttcaggcagagcatataccagtcccttgatcgatatgtttaataacccagccacggctgccccgaattcacaaagggtaaataattcaacaggtaagagattcagtctgatttatttgaagataccttttacatttgttttaagataagctgtgaaataaatattttgtataaatgtattgcaaggtttggaggtaaacaagcaggtatggtagatacattcagccctggctttgcagagcgtgagttcagaagaaatacaggactagactgtgagacgctctgataagtgatacatttctctgacatttaccagttctacgcactgactgatgtttatccagagtaaacatactgttgagaattatctatttacaaataaatggaggccaggcgcggtggctcacgcctgtaatcccagccctttgggaggccgaggcaggtggatcacctgaggtcagttgtttgagaccagcctggccaacatgatgaaaccccatcgctactaaaaatacaaaaaattagccaggcgtggtggtgcctgcctgtaatcccagctactcgggaggctgaggcaggagaatcacttgaacccaggaggcggaggttgcaatgagctgaggtcgcaccactgcactccagcctgggtgacacagtgacaaaaacaaaagttggagccagtgactgtctgcagatgttgccggctgcttcactggtcagaccccgtccttctgcacagtctttagcacccaggaccctcgagacctgtgccatggccccaacccatccacgtggggtgtctcacaggcccccatggtgtgaaggttgcggcagtcaagctgtttgtgagagagagccctggaccacagcgtgtgaagctattgggcaaaagaacagagttttccagaatgatgactaggatggcccagtagaggaagatgatggtctgcaggcatttgcctttgaaggaagtcctgtcagttaactaaaatacacagttaaagtatgtaatactctgtgcatcccagtgattcagatgactctggttcttattggtaaaagcagaatgaaaattgctggtggaggattgggcgcggtgactcatgcctgtaatcccagcactttgggaggccaaggtaggtggatctcgatgtcaggagttcgagaccagcctggccaatatggtgaaaccctgtctctactaaaaatacaaaaattagccgagcatggtggcacgcgcctgtaattccagctgttcaggaggctgaggcaagagaattgcttgaacccagccaggaggtagaggttgcagtgagccgagatcacaccactgcactccagcctgggcgacagagcgagactctgtctcaaaaaagaaagaaaactgctggtgggttcaacaccagcgaagtagagagtggcaggttaagggggcgcaggtttatgttgtaatcatgaagaatctgcaagaataaagcagaaagagatcttgcattgttttaaattaaagatgcttgttgtattactagcctgggaaaatttgaatggaaaaaaaaaacggccagaagcagtggctcaaacctgtaatcccagcactttgggaggccaagctgggaggatcacttgaggccaggaggtcaagaccaggctgggcaacatagcgagacactgtctctacaaaaaaatttaaaaatgaacctggcatggcggcgtgtgcctgtagtcccagctacttaggaggctgaggagggaggatcctttaagcctgggaagtccagactacagtgagctgtgatcctgccactgcactccagcctgggcaacagagtgagactctgtctcaaatgtatatacatacatatatatatatttttttctaccttttttcccctggagtggaaatatcagcctgtgtttgaatggagacatgaacagcacagcctcgtgctcatgggtagagagtatgggacaaacctgccctagctggttcctggcccagccacttgccagctgtggggtctgtcctgtggataataaatagcagcaccttcctcctgggagcctggcgggatggcagctgtgagacattgagatcgtgactggcacctggtgaggactctgtaaatggaactcatcctcaccttgtccttcttaggcctgggggtgagaagctgagcggccagcatggcaagaccaactgcatttccagctttcttcttttctttgtggacattggcagttgggtttgaactgtggccctagcctgcctttgcgattggaattgcgagggcagtttggcgttggagcggtttgtctctctaagaagagccatcctggctaaagcagtgcagatcaacccggcacacaccgccttgtccttgggcctggaaaagagcccgcagccgcagggatcctcttctgcacggtgcatgccttcaggctgcacgctgcctctgtttctcaacagtccctgttccttctgggcaatgatcaaagcgaggaaataggacagggtcagtttccgtggaaggagcattgttggcaagatgagaacaggtggattcctggggtttgctcattggaatgtgcctattgattctcatgctttgaaaagccattactgctacactccctccaacaggtacttccgaagatcccagtttacagcgatcagtttcggttgcaacgggactgaacatgatgaagaagcagaaagtgaagaccatcttcccgcacactgcgggctccaacaagaccttactcagctttgcacagggagatgtcatcacgctgctcatccccgaggagaaggatggctggctctatggagaacacgacgtgtccaaggcgtaagtctgggcgtgatggtccccgcagggcaccagacggcccctcccttccagagcagccaagctgcaaactgtcttcgtggacatgctcacattttagccaaagttaagtttatggtttagttctagtttagttaactgaagttattcgatcccaggctattttctgtatgtctgtgcatgtagagatacatttggtgcatgcatagttattagagcgtatgaagtcacctgtctgaaagtagtttaaacattcttttgtttttaaaaaaaatttagcatttggccagtgcagtggctcatgcttgtaatcccagcactttgggaggctaaggcgggcagatcacctgaggttaggagttccagaccagcctggccaacatggtgaaaccccatctctacgaaaaatacaaaaattagccaggcgtggtggcaggcgcctgtaatcccagctactcgggaggctgaggcaggattgaacctgggaggcgcaggttgcagtgagccgagatctcgccattgcactccagccttgggtgacagagcaagactctgtctcaaaaaaataaataaaattagcatttgatttattgaagataatctgcatatcagatatactttgttaaggtttagcacgtaggtagtttgaatgcaatcctcttaatttcagccataattatgtgcacaagccttcctgtaactagcttgtcagttttctagacagattgttcagatgtattaaataaaaccaatatggaaaaaaaaaggggtaatccaaatcaaattaatgttatacatacaacatatattgctttttagctaggcatggtggtgcacacttctagtcacagctactcggatgctgaggcagggggattgcttgagcccatgagttcgaggctgctgtgagctatgatcgcaccactgcactccagcctgggcaacagagcgagaccctgtctctattaaaaaaaaattgttaacaatacacattgttcagtgtatgtgaaagtccatatttacctattaaaagccttaatttcatttcctccacacatgggcgtttctggagcagtggacctgtctgccctgagctctcaccaggttgttcagggaggttgccgtccacatgtctactgctgatagggtcttttctccctctttgccggtaggaggggttggttcccgtcgtcgtacacgaagttgctggaagaaaatgagacagaagcagtgaccgtgcccacgccaaggtagccctgaacgtggctgagctctcccggtgacagaaacccctgccttgtcgtttctgtaacacaccaccatctagctgtgtcgcaggccctgccctaagcctcagctctcgtggactagtcagagatgagaccgcggctcacagtgctgtctgccgtgatttctgttgtccccgagctttgctgctgtgaggagacccagcccaggccacctactcctcgcagtcctgcagccctctgaaactccctccctgtgccctgcccctcctggtcgctaaacccaagccatgtgttttccgtccttatcttacacttatcttaccgttcttatcttacagcccttaacgctgttgtatgctttttctggaatgttctctggccccggctgcttgacctgtgctctgtttgtcttctgcctcaccagctctttgcacccctcttctgcccatcaattaaacatcagtgttcttgggagtcaccctgggtccatccttcctgcctgtgctgggccatctcatccactcccatggcttgaaatacactgatgggctttgctgagcacctccatgccgaaaacccccaaatccgtattccagatcagatactaacagtagttattgcctagagactgtccaaaggactttgcattgattttttcacttaattctcacagcagacccatgaggtgggcccccactttaaaaaatgaggaaactggccgggcacggtggcttgtgcctgtaatcccagcactttgggagatggaggcaggaggattacttgaggccacaagttcaggaccagcctgcgcaacatagcaagatccccatctctacaaaaaaaataaacaattagccagggcatagtggcatatgcccattgtcccatctactctggaggctgaggcgggaggatcgaagttcacagaacccccataacccatccagctagccaggtagaaggcctccaggtccgacgttgcattccccagggtctgatgctgtctgcaatcttcatccctagcagaagagctaaaatgccattgtgctggggaacaaaaactgagtaacacttttaggatgttaaaatttcaagtgtttacattttttttttttttaactcttagctcattgctcactccagcttttgctagtctccaatttctttccttagattaaatcaatcaagagccagcccctaatttaaaaggtttcctctccttttgtcatgtcttttaaataattttttggccaggcgcaggggctcatgcctgtaatcccagcactttgggaggccgaggcgggcagatcacctgagatcaagagttcaagactagcctggccaacataatgaaaccccgtctctactaaaaaaaaaaaaaaaaaaaaaaacaaaaaacaaaaaaattagctgggcgtggtggcaggcgcctgtaatcccggctacttgggaggctgaggcaggagaatcacttgaaccagggaggcggatgttgcagtgagccaagatcgcgccactgcactccaccctggacaataagagggaaaccccatctcaaaaaaaaaaaaaaaaatttcttgtgaggatatgtttagaaaccactaaaaacattagtgttttaggccgggtgtggtggctcatgctgtaatcccagctgaggtcaggagttcaagaccagcctggccaatatggtgaaaccccatctcaactaaaaatacaaaaaattagctgggcacactggcgtgcacctgtaatcccagctactcaggaggctgaagcagaagaatcacttaaacctagaaggcagaggttgcagtgagctgacatcatgtcattgcactccagcctgggtgacagagtgagactctgtcgcaaaaaaatttaaaaaatacagtgttttgtattgatatatgtactgtgtgtgtctgtgtgtgtgagatcaagatcaggttttgattggtgatgtactattactgttgtccttggtcagggacacagaggatgtttggggtttggtggtgagacattatctaacacgtgctgtgtcctttttgggtttgagccccacaccagtgagaagcatcagcaccgtgaacttgtctgagaatagcagtgttgtcatccccccacccgactacttggaatgcttgtccatgggggcagctgccgacaggagagcagattcggccaggacgacatccacctttaaggccccagcgtccaagcccgagaccgcggctcctgtgagtaaagccgcagcagggcgtcctgggtcctggactcgccatccccgactgggaggcgcaggtcctgtggtgaccgccttgctctgctct

SEQ ID NO: 1427 - DNA, 561 bp, Homo sapiens
caaaaacactgacactagaagccatgcagagaataacacaaggtgaggtgatggcgtggtggggagcagcgcggctggacatcactcccgggctgggttggctgaggttagtgcgccctggtgtgagacctgtgggtgaaggggaggaggctgggtggtggtgtctgcacccctcgctccaggagctgtcttgctttggggcgaaggagccaggcccctataccttgtgtccggggccttagttcagctgtgagtggtgcccaggtgtggagtgtcttgatgatatgaaacggatgtgcttctaagatgtgcctgccccagacctacgcgtgagccttgaggagtctgggaacgtagacctgcctcattgtagactgcattggcatgatttggtttaggaatgctagcttttgaaacttcattcaaaatgtctttgaagccaggtgcaatggctcatgtctgtgtaattccaacactttgggaggccaaggcaggaggatcacttgagcccaggagttttagaccaaactggcaacatagcaaaaccctatgtagacaaaa

SEQ ID NO: 1428 - DNA, 356 bp, Homo sapiens
tgtcacctgtagaaaggtggcagagagctggcgcactgccactcactgcagagatatgattgcaaacccgggggcgtgattgctgccctcggcggtgaggcttctctgtcctggagcatcctgcccatcatgtgactgtgcttggtttcaggggctggtgtattcccagcagaggcagggctgagcactcttcctgctgcgggttcccctggcgttagtattttccaaaacattgtaagaactaacgtgagaaaaaagaaatagcctttatctctcgtgcctgacagataatcagattactctggggattcgataaaaataaatcattttttattcctagagttagctactgtgat

SEQ ID NO: 1429 - DNA, 7032 bp, Homo sapiens
gggactcctctgtgctctgctctctctgctggcaggtgaggctcccaggctggctgccccttcacggctgtactaaggtcaccttgctcttccctcccatcccaggcttctgcctcctgccctctaggcttctcagcatcctctccctgccctcccagcctgctcttcgctgacccctttgtccctcatccccaccccagggcatggctgggcagacacccgtgccatcggggccgaggaatgtcgccccaactcccagccttggcaggccggcctcttccaccttactcggctcttctgtggggcgaccctcatcagtgaccgctggctgctcacagctgcccactgccgcaagccgtgagtgacccaggctggccatgctggggagggacagaggctgggggtcaggagagggtgaggggtgctttaggccagaagtgcggagcctccacttctgataccacaagttcaactcttagaagtaggaagggtagcctcccaaatcctaaaattctagagaccagcaatatctcatttgagaagtctaagattcgaaacttaggctcttcgaatccgagactgacccagagaaatccagaatcgtagaatcctaaaatcttgaatttatgaaattctgcaatagcctcagcaaattttagaatcatagattcgcagactattagaatcttagcagtctgggtcagcactgcccagaggaattatgatgccagccacatgtgtaagtttaaatttctggtggacacatttaaaaaataaggaatgagtaaaattaattctaatagatttaacttgacatacccaaaaacttattttgacatgtaatcaatttttaaatacgtatgaacgatacagtttacttttgttttggtactaagcctttgaaatctgttctgtattttacacacatagcctgttacaaaatggactagccacatttcaagtgttcaatagccataatggctagtgtgatcctagaatcttaaattcagagctttctagattcattgaatattgaaactcacagtactagaatctttgattcacagtatcctagaatattgagattcagataattctgtagtcttaaactatttgaatcccagactcttaaatttctaaggttatagatttatagaatgatgacattctagtctttcttttttttttttttttttttttttgagacagagtctccctctatctcccaggctggagtgcagtggcacaatctcagctcactgcaacctctgcctctcgggttcaagcaattctcctgcctcagcctcctgagtagctgggattacaggtatgcaccaccatgccaggctattttttttttttttttttttttagtagagacgggggtttcaccatattggccaggctggtcttgaactcctgaccttgtgatctgcccgcctcggcctcccaaagtgctgggattacaggcgtgagccaccgcgcccagccaaaattctagtctttttgtcctagaacattaaaattctatgttcaaatcttagatttaattcagataatgttagaatcctggagtttttttgatccaggggaatctggaatgttagaatcttggattcataaaactctaaaccttgagcctctagattctagaatcatggataatagtgtgtcggaatctgagaattctagaatcttaggttctgggcattctaatagtatcctggaatccacctgatgcaggaatcctctctccattgcctctgaaaagtgaccatccatactgttccaattttcttccctccatgagtaaagcactgattgtggtaagagatgctgtgtgggaatttcccatcatgcattgctccatgatggaacctcctttaacttaagcctatacatcagactgggagaacgatgttcagatttcagccgaaagtgaagcaggagaaatgcagagatatgaaggtggaagagagtgagaggcaggggaagggtagggggatgaagggatgtaggggtgaggactacttttccagatccagagccaagacagcaagaatgacagagagagacagacacagatgtttctggttccccaaccctgaattcgcagtcattagcctgctgcctaatgtcagaggtcagaggctggggaatggacttgtcatccccgaaaggatcccagctgtctagggcatggaccagaaatgaaacaagtgcgctgagactgtggtgagggcttaaggttagacaccaggaagacatgcattgaagggtgaaggatatgatagacaggaaaagctgaggccagagatgacccccaatttggggattttccatatcccatcccctttcatacacacgcacacgtatacacacacaccacttagacatacagagccgctcccacagaagccaccagacctgtgggggcaggggtggggcggttgttatgtggtaggtggggtcccccgtgcccacaccgttcctagggacccaagtcaccaccaaggctccaggtgagtagggaggaaggtggctcactcagcctgggactaggagcgggggctttgtggggagagctacaaagatggagacacacaaaacatcagagtggggaccagggacccagaggaggtgtgtgcctcgcttaaaatcacagtaccctgggccagacatagatgatgagggtgcagagagggtgtgtggcttgcagagggtcacacagcaccctgatggacaggaaaagagggctggggctgaaaggacttttacctttcccccagcttgacctctgaggcctgtcccagcaggtatctgtgggtccgccttggagagcaccacctctggaaatgggagggtccggagcagctgttccgggttacggacttcttcccccaccctggcttcaacaaggacctcagcgccaatgaccacaatgatgacatcatgctgatccgcctgcccaggcaggcacgtctgagtcctgctgtgcagcccctcaacctcagccagacctgtgtctccccaggcatgcagtgtctcatctcaggctggggggccgtgtccagccccaagggtatgacctggcccagaactctctctgaaacttgctccctcacccctctgtctctgccttttcatctctgtcttctccttttctctctcctctctctctctgtcagtctatctatctgccaatcgatatatttaaccaaatataagatgctagcatttttaagatgtgccattatttcatgaactgcgaagaagtggaagaaggaggaggaggagaagaaaaaaaggaggaggaggaaagatcccattagatcccattgattatataacaccattttctggaagacacattctaatttcagagtgtttgtttgtttgtttgtttgtttgtttttgagacagggtctcgctttgttgctcaggctggagtgcagcggtgtgatcacggctcattgcagctttgaactcctgggctcaagtgatcctctcgcctcaacctcccaagtagctgggattacagatatgcaccaccacatcccacaccggggtcatttttttattatttattattattattattattatctttttttttgtatttttagtagagacagaggtttcaccatattggccaggctggtctcaaattcctgacctggtgatctgcccgccttggactcccaaagtgctgggaaaacaggcatgagccactgcacccagccaaaattctagtcttttttaaatctagtcatatcttagatttaattcagataatgttagaatcctggagttttttgatccaggggaatctggaatgttagaatcttggattcataaaactctaaacgttgagcctctagattctagaatcatggatactagtgtgtcagaatctgagaattctagaatcttagattctgggcattctaatagtatcctggaatccacctgatgcaggaatcctctctccattgcctctgaaaagtgaccatccatactgttccaattttcttccctccatgaataaagcactgattctggtaaaagatgctgggtgggaatttcccatcatgcattgctccatgatgggacctcctttaacttaagccttatgctaaaaatttttattatttttagcaaagatgaggtcttgctatgttgtccaggctagtctcaaactcctggcctcccaaagtgctgagattacaagtgtgagccactgtacctggcccagagatgtttaaatgtgaaatgcgttcatcttagaatgggaataagaccatgtctctcagagtcacggatcactgacccattagccaaattgggtcagtggattggaaaaacagtctgaatttgttgctgccaatatctaaaacttggaaagttttatacaaaagccaggtttctggattcacctgaaaaagtttgaagaactcacattcccaaaatagcaagcattgggctgagtcaatggaggctgcccccttcagccaagataagttctctgattcactccaatggacccaaatggctcctgtctccctgcacagcccccgtccccgacttctgtttaccaattctgtttatcatatcccttgatgcatcggagcctgcacccatgtcttatatagatgcacatgtgtattatatatccatatccacatctatactgactacactgtatctggtatctctgtctatgtctctgtctccatcagtgaccatcttcctgcaaatctctttccttttatctcactgccttcattccaccccttgaggtctgggtctttttctatttcttttttttttttttttaagagactgagtcttgctcttgttgcccaggctggagtgcagtggtgtgatctcggctcactgcaacctccacctcctgggttttaagtgatcctcctgcctcagcctcccgagtagctgggactacaggtgtgcaacagcatgcccagctgattttttgtattttcagtagagacggagtttcaccatgttggccaggatggtctcaatctcttgaccttgtgatccgcccgcctcagcctcccaaagtgctagggagttatatatgcatctcctcttatctcttggctctctgcatgcatctttctgtttctcttccttcctttcttttttttttttttttttttttttttttttttttttttgagacggagtcttgctctgtctcccaggctggagtgcagtgaccagtctcggctcactgcaacctccacctcccaggttcaagtgattctcgtgcctcagcctcccgagtagctgggattacaggcgcctgccaccatgcctggctaatttttgtatatttagcagagatggggtttcaccatgttggctgggctggtctcaaactcctgacctcaagcgatccgccggcctcggcctccaaaacactgggattacaggcatgagccacggtgcccggccagcctctctctctacttggccctcttcctccttgtctccatttgtttctcttgtgtgctatgactgtctgtctgtcactgtctcttgtctctatctttgagagtcctaaatgtggctccattggtcctttggaaaagctgcagggaggactcagggcagtggggtgctgagtgtgttggagacagttgcagatccttgacagttctcttccctgacagcgctgtttccagtcacactgcagtgtgccaacatcagcatcctggagaacaaactctgtcactgggcataccctggacacatctcggacagcatgctctgtgcgggcctgtgggaggggggccgaggttcctgccaggtgagaccttactctggggaaaatgaggctgtcctgccaagttttctaggatttaggggagcagaggggtcggcccccagccttcctgggtcaaaatgagaaggagactgggatacctggttcctgggagaggacgggaccagggcctggactccttagtgtaaaagagaaaaggtctggaggtccagacttctggatctacaggaggagtgggctgggcgtccagagtctgagtcctcggggaggaggaggttaggtcctgcggggaggtgggccctctgagcttttactcctgggtctgaggaagaagaggctggagatggaggactctcggatgttggaggaggaaggggctggggcctttctgggagggaggaagtggcccgtgtaattgtcatgaacagagtggcctaacagttcctctgcccttctctcgcgtacagggtgactctgggggccccctggtttgcaatggaaccttggcaggcgtggtgtctgggggtgctgagccctgctccagaccccggcgccccgcagtctacaccagcgtatgccactaccttgactggatccaagaaatcatggagaactgagcccgcgcgccacgggggcaccttggaagaccaagagaggccgaagggcacggggtagggggttctcgtagggtcccagcctcaatggttcccgccctggacctccagctgccctgactcccctctggacactaagactccgcccctgaggctccgccccctcacgaggtcaagcaagacacagtcgcgccccctcggaacggagcagggacacgcccttcagagcccgtctctatgacgtcaccgacagccatcacctccttcttggaacagcacagcctgtggctccgccccaaggaaccacttacacaaaatagctccgcccctcggaactttgcccagtgggacttcccctcgggactccaccccttgtggccccgcctccttcaccagagatctcgcccctcgtgatgtcaggggcgcagtagctccgcccacgtggagctcgggcggtgtagagctcagccccttgtggccccgtcctgggcgtgtgctgggtttgaatcctggcggagacctggggggaaattgagggagggtctggatacctttagagccaatgcaacggatgatttttcagtaaacgcgggaaacctcaccttc

SEQ ID NO: 1430 - DNA, 1598 bp, Homo sapiens
gtactggggcctcctccactgggtccgaatcagtaggtgaccccgcccctggattctggaaggtgaggtgcagaggtactcagatacagacatcaggccccggaccctccttctccagattccaggaccccagcctcagatgcccttctctgtcgagatccagcagtctggaccccggcttcctcctctccctaatttaggagtcccagctcccagctccctgtcccctcagacccagacatcgaggactcccccctcccttggaatgtaggaatccagtcccccagcctcctccttcctccagagaagcccagaacagccccagatactctcggctgcctccccagtgcccaaatccagaactgggagctcaggctcctccttcctgtttaccggccccgccctctccatttcccagacctcaccatgggacgcccccgacctcgtgcggccaagacgtggatgttcctgctcttgctggggggagcctgggcaggtgaggagggttgcggaggcctccggaggggagggatctgaaggcagcagtggcgctggggagtctgtgggaatgccgcgggggttatgtgggtgcgtgtgcacggatgtgaagagtgcgatacggtgcaggagcctctgtgggctttcctcagggtggacagaggcaagaaacaggtagcagcaggtaggagtaggttccgtgatgctgtaaattgtctgaatagctacagcctttgggggctgcttgcttgggggcatagattcacctgggagtactcggggcctgtagactcatgtggaagcatgtgggggcattcttgggtgtgtgactcttgtatgatgacacatggactgaaatgagtgtccccgtgtggcagcgtgtggaagcctggacctcctcactaagttgtatgcggagaacttgccgtgtgtccatttgaacccacagtggccttcccagccctcgcactgccccagagggtggcgatccaaccctctccctcctgctgcaggacactccagggcacaggaggacaaggtgctggggggtcatgagtgccaaccccattcgcagccttggcaggcggccttgttccagggccagcaactactctgtggcggtgtccttgtaggtggcaactgggtccttacagctgcccactgtaaaaaaccgtgagtggatgatgggggcagaggtcagctggggcttaaggaaagagggggctggggtttcgactcaggaaggagagagctgaggactggactcctgggtctgaaggaggagggggctgggggcaatacccctgcctgggtcccaaactatccccaccattacaggaaatacacagtacgcctgggagaccacagcctacagaataaagatggcccagagcaagaaatacctgtggttcagtccatcccacacccctgctacaacagcagcgatgtggaggaccacaaccatgatctgatgcttcttcaactgcgtgaccaggcatccctggggtccaaagtgaagcccatcagcctggcagatcattgcacccagcctggccagaagtgcaccgtctcaggctggggcactgtcaccagtccccgag

SEQ ID NO: 1431 - DNA, 4019 bp, Homo sapiens
cttgaaatgggctgagtccctcttgctcacccttgacttggaaaaaccagtttctcttttattgtctgttactaatctctattctaaaaattcagctcaattctcaaccatactccaaactctctcttttccagctacctttactccctctccttcaattccactttcctctgcttactttttttttttttctgacagggtctcactttgtcgcccgggcaggagtgcagtggctcaatcttgggctcactgcagcctcaacctcccaggttcaagcgattctcctgcctcagcccctcaagtagctgggactacaagcgcacaccaccacgcctgactaattttttgtatttttttgtagaggcggggtttcaccatgttgcccagactggtcttgaactcctgagcttaagcaatccacctgcctcggcctcccaaagtgttgggatcacaggcgtgagccaccgcatccggcctcatgttctttttcattaaagagagaaatcaactattcaggaccggcccccacctttcctcaggagtcatttctgttccgcacaggcctgctgaactgggtgctttatatagggtaagtgtttctcattttttgttccctgtcctcaagccttaggggcaaaagaaacatccaagatttgaaatttcttttcttcttctcatctgcatggctgtagccatctctctgttctgcattatcttatgacaaaaaaaaaaaattcttattttgaagcaaactcaaagctaggtcctgatgtctcaaggcacaggtactcgtacttaaaggtgagtctgaaatctgtggatttggggaactttggaaaaacaaagatgagtggctagatcagggggctcattgggcaggaagaggagactggaaaatgccatattcactgcaagtcaattatcaacttcctccaaggctaaaatagctgaacctgctgcattttaaaccaatcctcagccactttggtgttttctcaaggatttccagggatcccaggcagtaaattctgctgataataggaattggtgtgataaggtgggtgctgagcagtttaagcaccaagattgtagctctgtctggttttgtggagatttactcaactagaagaacagagatttggctggtttttcagtcctggggtgcagggtgcacctgtactggaaaatttaggacgtggtttcattctttgagtctcatgttcaagttggttttaatgttatgaagacacttgggacgtaatcctgagggcagctggggggaagaaagtggtcactggatggacttaccctgtagcgagcccatgcatggtttgttctctgatcgtgcatgtgcttggctctagacccatgtaaccatggtgaaggccactgggggattcagttggcaaaggcatagtgggcagaagaatcttgaacaaggagtccagagcaggtcaagtctcctgatacaggttgtgactcatggttttttgtctctgcctgtagcagctacaggtctgtaaagcaaggggagagtgataaggaaagaactcacctttctggggctctctgacattaatgccacctcccatttgctttttgcagacactgtcatctctcaagtacccatcttggagggtacggaccccacatgagggtgaggctctctgcacactccagagtgaggactttaataatctagtggactgtacatgttgggaggggaagagcggggtgccgagggtctggagggagaagaattgactgccccttttgctcttggagttaagcagaaatctaaagagaaggcaaagaatcttgccttcctggcatcatttcctcctaccatcccaggccatcatttatttattacagccaacagactggcctctttcttccctttgactgggaatgggtcaaaggcggtgcaggaggaggatctggtccagataattcacaagcagggtgcattttcctctcattattgagaactgtgagtgtttatcaagaaggcagagcaggagaagatgaaccagtcttcttcccctcactacccagatctctgcctgccaacaagccccgtgttcaccctggcaaagagtctttacattcagaccaaggagagtgtgactccttctcagcactagctagaaacctcaagcccttgcttaagggcctttttcagagagacccaatgcccagaaggctagatgcgtggggaggagccacatacgagaaactgcctccctgcttcgggtcagaacaagccccaggaagaaagtatttcaaacaacaaggtgcatctgccccaacccatccagcctgcatgttggtgctgagaacagccttttatggggcttgcactgagccatgggcatgtctgaacacaacaaggaagaggccagagcagcaacagcacgcaaagggttgatgggcatttcttttaagacagagcagaaaactcttagatactttgcgtccttcctatttgactcagtctatgaaagccaggttagcttgctttcttcctccctaaatcctccatcctcatgaccaacaaagaaatagttgaatcattttccaggcacatcttggggaggatgtggggccattggaggctgtccttcctagataagtctttaggagtgagaacaaggagtcttaccctcctctgtccacccacccccatgaatgggcctggctccagccaggagttgtggtttttcctgagctcctcacctatctcttctggatttcacattggcaaacggggttgcaaagtgctcttcgtgctctttggacagtgccttgtggagaggaatgcccatgcccctgcattccaaggccttggtaagcaagctcagagtagctggatttttctaaagcaattgcagaacacctgctttttctttgtttcctctagaaaggaccaaccacaccgagctcagttatggcacacacagtgggacctagacaaagggagagggtgaccgacatcccaactaggtaaacacagaggaggttccacatggacttatctgggtggctgttttgaaaacgagaaacagtcaagagtccctggccccacagacccacctccccaactcagcactgtctgtctgtgcagcaggtgcaaggacgtgttgaactagctctctgcagcctccttggaggatgtgatcctatgggaggggtaggagtattcaggtccttgacatctcccaaatgtgtgattccgggatgccaaaggcctttggccaggtaatgcagtgtctacaggctgaggttgacatgcatccccaccctctgagaaaaagatcctcagacaatccatgtgcttctcttgtccttcattccaccggagtctgtctcatacccaaccagatttcagtggagtgaagttcaggaggcatggagctgacaaccatgaggcctcggcagccaccgccaccaccgccgccgccaccaccgtagcagcagcagcagcagcagcagcagcagcagcagcagcaagagtaactctgacttaggaatagagacagccagagagaaatgtgatcaatgaaggagacatctggagtgtgcgtgcttcttcagagggacgggtgatgggcagattggaaaaagcaccgcagatgggaaccttaatctttcttttctaaaattgatgctatgaaaatttgcgttttctgtaacttgtaaaaactaaaagttgcttgtctactgaaaagcctctctgcctctatgttttataccatcggatgccaactcccggccttctaagccacctcccctttaggctaaaactgagacatgaacttgaaaaattgacactggcttcctctctctttagggtccccaggcaggtggctgggacactatttgcaatcagcaaggaaccctgctgcccttagactccccacagagcaagcagaacttgcagaatggggtaaaaacactctattaaagattttttaaacctatttatattgtaataaagtaaatgtaaataaaattta

SEQ ID NO: 1432 - DNA, 506 bp, Homo sapiens
ttccttcctaccactttcttgtttgttaaagagttacctcatacagacaggagtggcaaattggattggaaattgctttggatcatttggcaagaactgtatttttggggttgtgggaggaggagaggcctgtctaaaagctctatttcttctttactcagaataccttcctgttgactcattggaaatcataacaaaaagcagaaggaatattggagaggcagctgccagcctagggcttggcttctgttggggcagctgtttggggatttagacacactgggctctaagaactgtgaggtttctgcagcagaaggaaatagtattactctgataggtatttattcataaggttaaaaagtgtcagactattgcttgggattattgatgagcaacataagaaactaaaaatattttctcaaatagaattaactggtgatcctaaaaacagaatgaattgaggaatacaagagggagtgggggcaaaattagaaaaggaaaagttg

SEQ ID NO: 1433 - DNA, 506 bp, Homo sapiens; identical to SEQ ID NO: 1432

SEQ ID NO: 1434 - DNA, 506 bp, Homo sapiens; identical to SEQ ID NO: 1432

SEQ ID NO: 1435 - DNA, 394 bp, Homo sapiens
tgtctgtcccaaagtcagtgtattccccttgcctctccccctcttcctcattgtcatgattagtaccgtttattgcatactttctacatgcaaggcactgtgctaagcactttatatgctttatctaattagctattcttgaagccctgtgaggtgcttattatctacatttaacagataagaaagcaaagctcagagaggttaactcattcatctaataagtggttgatccagatttcaggtttggcaagaactctgaagtcctttctcttaactgccatgttagtctgctgctgctatacttctggttctaaaaataatgacaacagtagtaactactgttaattaagcagaatgatgatgaaatttacatattacattattgtgagatagg

SEQ ID NO: 1436 - DNA, 394 bp, Homo sapiens; identical to SEQ ID NO: 1435

SEQ ID NO: 1437 - DNA, 394 bp, Homo sapiens; identical to SEQ ID NO: 1435

SEQ ID NO: 1438 - DNA, 514 bp, Homo sapiens
tttttttgtagagaaagggtctcactgtgaatgtcacccaggctagctattttcaaacatttattgctttggaaccagagcccatatgtggataaaggtaggtagcattactcttgatgatgcaggcatgagtgatgtcctctccattccccaatcctcgagccccttgaaatgctatttgaggaatgctatcaaaacaccagtgctctttgagagaatggtgcaaaaatttaaaaaaaacagcctttggctgggaatggttgttcacgcctataatccaagcattctgggaggctgaggcaggaggatcgcctgaagccagctggagaacagcccagacaacatagcaagacctcatctctattttaaagttataaaataaaataactgtggccgggcacggtggctcacgcctataattccagcacttagggaggacgaggcgggcgaatcacgaggtcaggagttcgacaccagcctggccaacatcgtgaaaccccatctctactaaaaa

SEQ ID NO: 1439 - DNA, 513 bp, Homo sapiens
tttttttgtagagaaagggtctcactgtgaatgtcacccaggctagctattttcaaacatttattgctttggaaccagagcccatatgtggataaaggtaggtagcattactcttgatgatgcaggcatgagtgatgtcctctccattccccaatcctcgagccccttgaaatgctatttgaggaatgctatcaaaacaccagtgctctttgagagaatggtgcaaaaatttaaaaaaacagcctttggctgggaatggttgttcacgcctataatccaagcattctgggaggctgaggcaggaggatcgcctgaagccagctggagaacagcccagacaacatagcaagacctcatctctattttaaagttataaaataaaataactgtggccgggcacggtggctcacgcctataattccagcacttagggaggacgaggcgggcgaatcacgaggtcaggagttcgacaccagcctggccaacatcgtgaaaccccatctctactaaaaa

SEQ ID NO: 1440 - DNA, 279 bp, Homo sapiens
tttttttttgagatggagtctcgctctgtcggccagtctggagtgcagtggcacaatctcggctcactgaaagctccatctcccaggttcacgccattctcctgcctcagcctcccgagtagctgggactacagatgccggccaccactcctggctaattttttgtatttttagtagagacggggtttcaccgtgttagccaggatggtctcgatctcctgacctcatgatctgcccacctcagcctcccaaagtgctgggattacaggcatgagccac

SEQ ID NO: 1441 - DNA, 279 bp, Homo sapiens; identical to SEQ ID NO: 1440

SEQ ID NO: 1442 - DNA, 147 bp, Homo sapiens
ctgggcatagtggcagacgcctgtaatcccagctactcgggaggctgaagcaggagaatcacttgaacccgggaggtggaggttgtagtgaggcgagatcgagccactgcactccagcctgggtgacagagtgagactccatctcaa

SEQ ID NO: 1443 - DNA, 147 bp, Homo sapiens; identical to SEQ ID NO: 1442

SEQ ID NO: 1444 - DNA, 544 bp, Homo sapiens
acaaaactcctttataaagcctgacatcatctggtactctttcagactaacttcatatattgccctccagatcagccatacagtccatttttcagtcattggttctcatattccatttcacccacgcgtttactcaacaaatctctgttgagtcccttttatataacaggacattgaagatacagcattgaccacaatatataaaaattcctactgtcatagagcttgcattctactgaggagagataataaataaatatgtaaaacacttagtaaatgaaatgaagacaaatgcagtggagaataaaacaactgggaaggggaatggggagtgccaggatgtgaggggcaaggttcacttttaaataaggttgttagaaaagacataatccagaaggggacaattgagatatgaagtaggggagggaataaaccatgtagatgcctgggcaaataacattctaatgaagagaattagtgcaaaggccttgggcagaagcctgagtgcgcatttgagaaatagcaagaaggctagtgtggctgg

SEQ ID NO: 1445 - DNA, 544 bp, Homo sapiens; identical to SEQ ID NO: 1444

SEQ ID NO: 1446 - DNA, 544 bp, Homo sapiens; identical to SEQ ID NO: 1444

SEQ ID NO: 1447 - DNA, 439 bp, Homo sapiens
ttgctcttgttgcccaggctggagtgcaatagcacaatcttggctcactgcaacctccacctcccaagtttaagtgattcttcgtcctcggcctcccaagtagctgggattacaggcatgcaccaccatacctggctaattttgtgtttttagtagagacagggtttcaccatgttggtcaggctggtcttgaattcctaacctcaagtgatccacccacctcagccttgcaaagtgctggattacaggtgtgagccaccgtgcccggcctctttcttttttcctgagacagaatctgactatgtcacccaggctggagtatagtcatagctcactgcatccttgaactcctgggctcaagtaatcctcccacctcagtctcccaggtagttgggactacaggcacgtgccaacaagcccagctaattttgtatttttt

SEQ ID NO: 1448 - DNA, 439 bp, Homo sapiens; identical to SEQ ID NO: 1447

SEQ ID NO: 1449 - DNA, 642 bp, Homo sapiens
tgtggcacctttgtgaattttaacaagcttctgctttgcagctcatacatgatcatgtctcataccatcaggacctctcgctggaaccttcttccgcagacttaacttcctccactggattatgcttttgtgttatattcccaatttttcaaagttcatttattctttcaacattgaaaaattatttatcagatatctcctgtgggccagggactgttaagaggtgctgcggatatagcaatgaacaaaatagacagaatccattcttttactgaaacggcagtctagtggagggagacaataacaacacaaaaattgtcacatggtggtaagtgtggtggagaaaaataaaatacactctaatgaatttcattttttttcttctgttttttgtaaaggtgggatcttgctatgttgtccatgctggtctcgaactcctggactcaggccatcttcctgcctttgcctcccaaagtgctgggattataggtgtggccaccatgcctggcaaagacaactgtcttaattgaaaaaagtgacatttggctgggtgtggtggcccacgtctgtaatctcaatgctttgggaggccaaggtgggagcatcgcttgcgcccaggagtttgagaccaacctgggcaat

SEQ ID NO: 1450 - DNA, 642 bp, Homo sapiens; identical to SEQ ID NO: 1449

SEQ ID NO: 1451 - DNA, 642 bp, Homo sapiens; identical to SEQ ID NO: 1449

SEQ ID NO: 1452 - DNA, 642 bp, Homo sapiens; identical to SEQ ID NO: 1449

SEQ ID NO: 1453 - DNA, 290 bp, Homo sapiens
ggcgcggtggctcatgcctgtaatcccagcactttgggaggccgaggcgggcggatcacgaggtcaggagatggagaccatcctggataacacggtgaaaccccatctctcctaaaaatacaaaaaattagccaggtgtggtggcgggcgcctgtagtcccagctactcgggaggctgaggcaggagaatgatgtgaacccaggaggcagagcttgcagtgagccgagatcatgccactgcactccagcctgggcgacagagcgagactccgtctccaaaaaaaaaagag

SEQ ID NO: 1454 - DNA, 290 bp, Homo sapiens; identical to SEQ ID NO: 1453

SEQ ID NO: 1455 - DNA, 291 bp, Homo sapiens
gggcgcggtggctcatgcctgtaatcccagcactttgggaggccgaggcgggcggatcacgaggtcaggagatggagaccatcctggataacacggtgaaaccccatctctcctaaaaatacaaaaaattagccaggtgtggtggcgggcgcctgtagtcccagctactcgggaggctgaggcaggagaatgatgtgaacccaggaggcagagcttgcagtgagccgagatcatgccactgcactccagcctgggcgacagagcgagactccgtctccaaaaaaaaaagag

SEQ ID NO: 1456 - DNA, 291 bp, Homo sapiens; identical to SEQ ID NO: 1455

SEQ ID NO: 1457 - DNA, 5744 bp, Homo sapiens
aaggaaggacattcttgcacacgtgcaaaatgagtgctggaacctcagtcaacaactcatgacagagctcacagatttcatgcatatcttccgaaccatcaactcagatattcatgccattgcacagtgcacccagaaggtgggctctccccatccatccttcccagtttattcagggcccatcctgctcaaaagctcagcacactctcttcaggtctctgctgagcccccagcagagcttgatgctcttaaactgtgctcgcctaagagatctacccttgctaattcttaccctgtccatgtggccctcaggttcctcatgtcacagggaggccctggtgtgatgagagagttgtgctctctgtgacagtcagatagaaaattgttgccttgtcatcaaggtaatggggtggtgggtgagaagtggacccttcaccagagagatctgggtcagagagagatttgatccctctggagagatccctcaggagagattgcccctgattccagttgattacaaggctgcaactgggtctggagacttcactccaaaaggtgggagttccccttggggatgggaccaaagaggtacatggggttgtggggctgccggtctcatgctgtaattcctgcagttgaatgaagccaatgaacagtacgtcgagctggaggagcgaatggaatacgtacgggcactccacgaactcatccgcaaccactttagcctctttagtgctgagaatgaagcactggacatctcggtgagaaggcaattcggggagtcacccatccctccctgccctcctcccccacaaccacatctactccactgccctctgcttgccccacagcttctggatatgtgggaggcatttcagtttgagaaaagccaggcttcagagttcctgctcagcaagcgacatgccattatgcccaagctgcagcagctgatggcagcagcattggcagagctggaaggcctgcttgcgaaggcccctctccggtccctttatggaccccacacaagatcagaggagtactgagcaccagctcgtctccctagagcgtcagttccagaacacagtcagcgacctcagtgaactgcaccacgcctatgccatcttcactggtactgaggatccctgcaccctccattatcactctgtgatagacccttcaactgaagtaagagttggaactcagggttctgtgtcctgtatgaccccaagcaagccttgggaatcacacaccttcactggtgtcttttataaatgaaaatttcaggacaaaaacatcatatattgaccatggcaggtgttgtgcttagggtgggggtatgggggctcacagtctggtaaggaaggcaaacaagtgaatgttccatcagaatgtgatggggtcaggggctaaaagcatgtgtgggagaaatgtaagttctccttatagaacgtagcctttttgtagccctgttcaacacagtcctacaccaggcagcaggccccgaacaagagtaggtcttgatgctctagcagatcacttcctccagccagtgtggtatagagaggaggctactgagggcctcactaatacacaggaggaggccaggacagaactattggtctcaattctttcatacagtggtgcaggtaagctggttcccttctgttcttaaagaactctgtgggctctggaaggagaccagagcaaatataagagccattaccaaacaatggagacaggatctcaggctagagtgcagtgtcatgatcacagctcactgcagcctcagcctcccaggctcaagcaatcctcccatctcagcctcctgagtagctgggactacaggtgtgtgccaccatgcctggctaatttttgtattttttgtagagatgaggactcactttgttgctcaggctggtcttgaactcctggactcaggcagtccttctgccacagcctcccaaagcactgggattacaggtgtaagccactgcgcctggccttccttccagaattcttatatgtatgttggatttactgaatctctctcactcattgcttttatcttctttatcatcagtcattcctttattctttttctctgagttctggaaaaatgttgtgagcttgttttataagcttccatttcctatggtatcactttgtatttctattgcattttaaaacacacattttgcatgtgtatgcatgcttatgtacacatgtatacgcatgtaactgtgtgtttatgtgtatatacatgtgcacacatttgctatctctatctgctgaagaggacatgaagcaaagaaaccccagtagcaagaagccacattgtgctcaggtcttagtttctaacaaacaccattccccattaaaaggaaccagagctccttagagaaatggatgattccagggctgtggcagggtaggtacaagatgaacctaaagtgtcattttataccagaaagtaagaaagtattaaagtgtttaaaaaagtgatgggagcatatcacaaggattcagaagggataccaactggctaaatctggaacaatttgatcaccaaagtaagtacaataataaattctaagctattgaagtaaaggcatttattatgcgtagtaataataaatagataatgagagagaaatgaggactcatgcttacagtaaaatgccaggagctgactggcataaatgtggaaggaaggctggagtgggaaaattattattttgcaaccatcatggtaattaccagatcagataaggatcaacagatgccaaatctagggcaaatttgatgaggagcagaatatttgcactgtctttgagagtttctcccagagatcacttatttgttgtaaaaaaaaagaaagaaagaaaaagaaacaacaattagtggagaaatcagacaataatttgaccaggtgattaaaaattaacatcaccaatgaaggacatagggacatgatctgccttcagatgtgatactggagaaggaaggatacaatatcacttatgtagtagtccagctgagaatgagtatcatttttaaaaaccataaaaacacaacatgaggaactttctatgaacaaaaaaaatggcaaaaggggactgtatacttcaaagatgtctgttacaaaagaaagaaaggctatggaaatgttccagattaaaagaaactaagagacatgacaaatgcagtgcttgaccctggaccagatgctataattgaggcaaaaaatgcaatctaggacattattaggtcaactgacaaaactgaaatatggacagtagattaaaatattgtatcaatataatatatgaaatttggaattgcactgtggttatataaaagaatatccctactcttaggaaatgcatacttgagtatttatgtaacttgcccttaaatagttcagaaaaaaaaattgtgtgtgtgtatatgtgcatacacatgcccatgcacagagcatgtgaatgcaaatgataaagcaaatgggtaaaatgtcaacaaaaggcaaagatacacagtatagatatatatctatacctatggaagatagaaggtacacaatttttttttactactttttcctacaactttgaagattggaactcattttcagataaaaagttttaaaatgcatggaaattatcaagtagatatcacaaaatgtctgtcaaaggacatttgctcttaatccccagtttgtctttatcttttcatgtgtttggagatgatatctctgctctttcttacagatgaagttgtttatttgtctaatatttgatgttgaaacaactgctgtcaaagattgtatgggactctagccatatctttgagtttagacaaagactggaagagtttagatttactgtcattttactttttgtcagatcagagctttgatagcctagtgattccagctttttaatactctgagatctccaaaatggatgatgtgcacatgtgtaagatgcatgaggcccagcatttgggtgtgactctatcactttttgtcccactcaagaaagtaaactggagttcaagttaatgagatatctgttgtcttttaagtaaattgcaaacctcgatattataattattgttaattataaattcctattgacacttatctcacaactgactataagtaactgattaagaactaatgtagtaccctgtgagatgaaggggtggaggataatggccggaggtaaacatgacaggtcctctatgtgggccagatcttttttatattcatcttgctgaactttcttttgggctgacagttcattcgctcattcattcattcattcattcaacacatatttgttgagagactgctgtgtacactaggcttgaggtacatcagtgaacaaatgataaaatgcttttcttaatggacccaaacttctagttgggagagaaagacaataaacaatgatgataaccaaattctgtagtatataagaaagtgataagtgatagagaaaaaaaaaaaatagaacagagtaagaggggttgaaaatgccgggaagggtagctaggaatttttaaccagatagcctgcataggcctcattaagaaggtgctgtctggctaggcgcaatggctcatgcctataatcccagcactttgggaggccgaggcgggcggatcacgaggtcaggagttcgagacaagcctggccaacatagtgaaaccctgtctctactaaaaatacaaaaattagcctgacatggtggtgtgcgcctgtattcccagctacttgggaggctgaggcaggagaatcacttgaacccgggaggcagaggttgcagtgagccgagatcacgccactgcacaccagcccaggtaacagtgcaagactctgtctcaaaaaaaaaagaagatgctgtttgtttgaacaaggacttgaagctggtgagggcatgagccatgtgattctctgaaggaagagtgttccagaaagaatagactgctagtcaaaggcccttagcaggagggtgcatatctggtgcatctcagccatagtaaagcgtccagtgtcactagaatggagtgaatgagatggagactaattaaagaggaactcttccctttcactgccatcacattttcccagatggtctttccctggagtaactgttccttggattaaccccacctccattgttgagccaaacaatttggaactccacctcccccacccccaaccatcactttctggaccctaccttctgtcattatgggctcttgactgatcattccaccaccccccctccaacactgcaagtagcccaggtttcaagtcagcccctccccacagaggatgagactcctgtgcccttgccaatctgtgggacacgtcctattgtgcagcagcagcgcatatggcacctgtaccgagtcatctccgaaaacatcagcgagtggaagtgcatggcttttgccaaggtgctgacacccttccttggagctcttgactgggagtggaggactacagtggtgggggaggggaagagtctcaagctgacagtgagcccttctccctgcagttcagcccagctatggcccaggagaagacagagggctggctgacagaggcagcacggatgagcacaaccctggagctgcacagccccgtgctgcagcactgcatgcgcatcctgggggagtttcgcagctacctgcccctgctcactaagctgggcagcctccacccacagagcctc

SEQ ID NO: 1458 - DNA, 1228 bp, Homo sapiens
gcctaagacattagtctgttctgagacagtgtcttccatgtagcccccctactgtcttaatctccttgggatccccttcccctcacccatctctactcaatgcctgggtccttcagcaaaggtcctcccctttctgggtaccctcagaaattcctcatagtcagttatctacacctttcaatgctctgtcctctagattgcaccctgctgtctgattttataccttattcattaattcatttctttattctctccctcatcaaacctgcctcctctgtgctaaacacaggagaccttgagacttacagacagtatccctgtcccccagaaatttctgagtccagtgaggagagacagacaatactatagggataaacacaatggagcaccttactgagggcagtagaatctcagagagaggaccagctcaaagaaccagagagagaattagagaagtcttctttaggcagaggccttatactgactttttgaaggagtaagagtttgccaaacttgccaggtgagaagggcagaccagacaaagggaacagcatttacataagcatccaagatgatatagctagggcattgccaatagaggagaattttcttattcaacgcaactagaacccagttggtgaatccaaaaaactaatgatgcatacatagtttaagatttttattttagcttaaaatacatacatgtacatttatttactaacgttttaacctaatgacaagagcttttgtttgatttgatagttcctcactgcctttcttgcattaatgtattgtctactatttctgctttcactttctgcaaagttgggcagcaacatgaagacacttttaaagtccttatgaagggaagggccttagctgcagaagctgggcactgtgtggagagagggaggtggggagaggacttccaaggagattaagacagtatgggagttacatagaagacactgtctctatgtgacttttccaggtttttattataagttcccaatttataaaaattgacttgcctatacctaatagcatatgtttaatcagtttgcctttactgaagctttctgtggtttccatagaaacagcaactttccccccaccaatgtgtcagtggttgttacaatattagattcaactctttacttaaaatcacaacataactcacataaatagatttgcaaacacactcttattcttagtgcgcacacacttt

SEQ ID NO: 1459 - DNA, 222 bp, Homo sapiens
tgcatattttaacatctctgaactttaaaggtgtctcatgattgaagatgtgttagagtttagatggcatcagttttttttctttgttagtggtatataaaataatggtgcttcttacaacgggatcttagattttatgaggtatcatatgggtgttatccctgccctctgagataataaagttgttcatactgccaagggcagcttccaggattactttct

SEQ ID NO: 1460 - DNA, 4761 bp, Homo sapiens
ctgcaaacacgttagcgtttgtatttataaactccaggcctcagtgtcttcagtaggatgggttggccctgctcacagggcagtggcgaggacagggtgagctgatgccaggggggacgtggaggggccacctccccccacctcctttcctatacaaagtctcccacatcctcaaggcagccctctgaggcagtgagtagcactccaattttacagaagaggatctgggattggagaagtcccatagcccctgatggggcctcagagtgagagccaagtcagggcgagaggatgccggtctcgggtgtagcctgaccccacaagtcccttcctaagctgctgggagtcgtcacacccccacccgtgactgggtggagtcgtagtactcacctcccggggttgccgcaaagattaaacagaagcgtccgcgtgcagtgctgaggacagcacaggcccggcagctgcctgggtgcttctggtgtcactagtccattccacctcagcggttccctgggatgctcgtgaaaaatacagccctcaggctggggtccagatgccgggtcagagccccagaatgtgccaggcctctccagctgcttccactgtgcctgatgtgggaatctgtgctcaccctgggcacatcctcaggggaaggggctgcctggctgtgtccaaaactgaggggccctggttcccacagaacatcaccaacgagctactgcggattgaacctgagaagacgcggagcacggctgagggcgaagccttcatccaggccctcccaggcagtggcaccacacccctgctgaggacccgggtggaggacaccaaccggaaatacgagcacctcctgcagctgctggacttggcccaggagaagtgggtggcagacaggcagcatggaggttggggtggggtcagggggccaggtgggcatcccccgacgcctgattggtgctctcagggttgatgtggccaaccgcctggagaagagcctgcagcagagctgggagttgctggccacacacgagaaccatctgaatcaggatgacacagtgcctgagagcagccgtgtcctggacagcaaggggcaggagctggcggtgagtctagggcccaagtcctgggagtccttctgtgagcaggtgagagcatctggcacatccacccgcccgtctggatagatgaggacaccagcatccagtctccccaggtttggaatgcccaaattgggaactgcaaatggaggcccacagcacaaatccaagctattcacgggatctgtgtgacttacgggatttcgggtgccagcattttaagatcaaatatctgcaatagccagtgtagtggcacatgcctgtaacaccagccattcaggaggctggggcaggattgcttgagccttggagtttaagtccagccgcctggacaacgttgcaagaccctatctcttaaaaaaaaaaaaaaaaaaaaaaaagcataaagcacataacaatccatgttcccagtatctcttgctgagcagagctggcatcctgggctgcagctcagagggcaagtcagtgggcagaggagcagctgccttctcggcctgcttacctcgcagttgccacgggcccccttcccacactgcctgagcacaggaaacattcaagtctgtgacctgaggccccttattcacactcccatctcacgacttgcttttgccacagcctcatgaccagacagtggcaggctgttctcgcgcagggcacgagctgcctgctgcagggtttttagaagttagcttttcagggctttgttcattgttaaaaaacagaagatggcagaagtgacccaggtttgggatgtacagagcaaggctccggtccttcctacctgtggccttgcccaccctcctacagtcagtggcccagggggcttcagtgggtgtcatcgcctggctctgggagctctggcccgtagcaccgccgtctcctcctctgcccccgccaggccatggtctgtgagttacaggcccagaagtccctcctgggtgaggtggagcagaacttgcaggcggccaagcagtgctcgagcacactggcccagccgcttccaggagcactgtccggacctggagcgccaggaggccgaggtgcacaagctgggccagcgtttcaacaacctgcgccagcaggtggaacgcaggtgagggtgcggtgggtggtggccatttttgttttctgagaatgcgatctaattccctctaagcaatgctttagccgtgtcccacagattttgctgtttttctttttggtgagttcgtcagattctctgacggccctgtggtctctcttttgagtcatgcttacctgggtcctgtaatccacaatgggcatctctgcaagtcaatgtatatggacccacctggttctccacagtccaacctgacgttccctaatgaccacccaccctgtgtgggagatacttggggtatttctggttgttacatttggttgtttcccactttaaaaaaaaaaatgagggctcggtgaggcatctgtttgctgtggctgaggcctgaacgctttgccttgacagggcgcagagcctacagagcgccaaggcagcctacgagcacttccaccgcggccatgaccacgtgctgcagttcctagtcagcatccccagttacgagccccaggagacagacagcctcagccagatggagaccaagctgaagaaccagaaggtgagatggccgtttccgcagccccaggcacacactggcaagggagggtcagaggtcaacaagcccctttctggggagccaagcctttgggaggtggagcagggcagaggcctgccacagctgtgtcctccctgggcctcagctcaagctcccaacacccaaccctctgagaacaagaaccgagtgtgtcgctcacctctcccagctcagtgccccgcacagggcctggtgcagaatggacacttggcgtgggttggctatgtgagtgaacagctacagaatgaggagccgcctttgtgggggaaatcccattttcaaagttgggacttctggcttccccatgcccaacgcagtgcctttggggtgagggaagaacacgggaaacccatggcttgagaatcaaatccccggtcccccccatatagccacatccccacctcagaagctttcctcactcataagctggaggtcacgatgcttacctcctggcatcgtttgaagattaaatgagataatctaagtcagacagcagaacagtgtctggtggtccaaatcatcagtaaacatttgtttcctagcagagataatgatcttggcccttcttcacagagccttagaactgccttttgtggctgggcgcggtggctcacacctgtaatcccggcattttgggaggctgaggcaggaggatcacaagttcaggagttcaagaccagcctggccaacataatgaaaccaaatctctactaaaaatacaaaaaaaaattagctgggtatggtggcaggagcctgtagtcccagctacttgggaggctgaggcaggagaattgcttgaacccaggaggctaaggctgcagtgagctgagatcgcgccactgtactccagcctgggcgatgcagtgagactgtctcaaaaaaaaaaaaaaaaaaaaaaaaaaaaaaaaccaccaccaccaaaaaaactgccttttgcaatgaataaaaatgtatacaagggagccattcatcatactttgtgctagagaagaataaattcagattctgagatttccagctactgcatccatggttgcttttttaaattttttttctggttagttttgatttttaaactctgtcttacagaacctgctagatgagatagcaagtagggagcaggaagtacagaagatctgtgccaattcccagcagtaccagcaagctgtaaaggtgagccgggaaacttccgcccaaagcacaaacagcaggggtcttattccaccgtgccctggtcagagaagcagcaagcaccggccctggcacatgggggtggagctggccatccgaggcactgccggctgctgtgcaaactggcacaggcttttgggaaaacagcatggtactagacatggaatgctgtaaaagggttttatactctgaagcagtaaacactttgggggaatttatccttaaggaaaaagtacaaaaaaaaaaatgcaggataaacaacattgttgcaacagcactatttacaatagcaaaactagtacgctggaaaggactggtgtccagtggaaggggaaagctgcgtgaatcagcacacatccacctgatggattataaagtcagcaagctggtaaacatgagaagaggtggtggcaaggtgagacagggttatggtacgatgttaaaagcagcagcagaatgtgaaaatctctaggcatgtagaaaggctgggaggggaattcagggggcacttcttgtctcatatgttactgagtgatggagctatgtactgctgagatatcagtaattctcaaaacctcctggaaatcactgcagggtgcagctgtgaggaagacccacgcagattataaaaccagcacatggcacagggcaggtctgggtcagcctgaaggggtacaggaacatgtctgtctcttctcagctgttttaatctcccctctgccatgtctctccctcatgcaggactatgagttagaagcagaaaaactaaggtctcttctcgacttggagaatggaaggag

SEQ ID NO: 1461 - DNA, 232 bp, Homo sapiens
ccacgtgagcaagagagccaggctccaatctcctgccaccaaagtgaaggaagaggtgagttccatgggccaggcggcctcgggactgaggtggaggccaagctgccctgctccccagggagcatggtgtcacacgctggcctcagagatgcacacacaacagggaagccactgagagccctcctgcatgcaaacaggtttggtaagagatgaggaacttgttctagggcag

SEQ ID NO: 1462 - DNA, 306 bp, Homo sapiens
gcgacctggaccggcaggagaaggccatcacagggatcctgcggccaccactggagcaaggccgggctgtgcaggacagtgccgagcgggccaaggacctcaaggtacctgcgggtcaggagcacaggtggggccgggggagccctgcactggccccctggggcccctatttgaggtcttttccccatggagtcttgggatattcactgcagctgtctgtcagggacagcctgctgcatgtaaaagggtcccaagtcatggaggtggcagggctgctgtcattacctccccaggagaaagagctgg

SEQ ID NO: 1463 - DNA, 3587 bp, Homo sapiens
cctttatcatagcacacaatattagaattctcattcacttgactgtttcattcagaaaaccagagcttcctaactggtgtaccaggaacaggtgtatcacaagatagtaacagctggaaatattactcaaaatcatttttcaaccattaaaaaggttacaggaattgaaataataattgaccattctgtgtatgactatgcctttatcagctttcttagtttagtcattagttttttaaaaaataattttaataatcattattttaacacatacagtttttatgcccaaccaacactcatcaccacagcatgttctgtgaggcctctccctgagctctctgcaaaccatcccaattatagtctgtatagttctttgttcaatgatgatatcatcagggatgctccacatttaaaatagattgcctctgatttaatttgcttgtatctttgcatgtttttcaactaatgtaggtaagatactgggattttttagtattagtattattgttattaataggtgttttcatagaaaacaagagttattgttagttctatccattttcatttggtttttgttgccttttgatgtaaacaattagcaaaatctgattcttgttggaatttcttttcatgattatatgggataaagaagatacaattaattgttttcccaagctcaatatgaaggcactgcactacactctgtgaggatggggtctgtgtctttaatctctggatccccaggtcctaagacagcagtcaacacagaaagggctcagtacttcattatttctactttatatgtatacatttatttgtggaatgaactactacaaattataaagtgataagggccatagagaattacaaatagaattatagggagttaacagaagaaaaatacatattcattgaactctttctgtgcatggggcactgtactatgttgagtgctttaaatgtacttttttaaattctgaaagtaaccatcttactaacaataccttgtagtgaaacttaatgcattaaagaaagtgccaacttcattttcagctcctttaccagactgccatacttgggaggtagaagatggtccattcatccggaacctcttagaatgtgaggtcaactcagagttaggaggaacctttactttctggatatagagaatgaaagctattaattactctaacaatccaaggtgcctcttacttatatagagaaattttatacaaatattctgattttcaagattacctgttaaattcttgtgattatagtttttcatttgcttcatatgtcaattttagattacaaaactcttagaagaattgagagaagccaaagaaaaccatacaccagagatgaaacatttcgtgggcttagaaaagaaaattaagcagatggaaatgagacatgcacaaagagaacaggaacttcaacaggtaaagtaaatcacatttacatatttatataggtctttacttttaagtgcctttaatttgctatagttttgtcatccctagcaaaaattaccacttaaagtgtttccagtgtattttgatcttgttaaaaatttaataaatttataacttttaccagaaaatgagactttatatctcaagtgcttgaagattggtatccttatatctggaaaaaaagcaaaaacttgtatcatgttcttaattattgatggattcctaaaaacttacacatcttaccctgggaacaaggcatggtgttccatattcaagtcatttcagcaaatgtttataagaaataaattgttttaatatgattatttaaaatatatagctagcactagtaatattactatacttaattataaacagataaattaatagaagttaaaaatagcagatgtaagggcatgatgtgtttttaggcacttgccttggtgctgaaatttaacttggtttgaacagtgtattagtctgcttgggctgacataacaaaatatcataaattgggtggctaaacaggaaaaatttatcttctcacagttctgtaggccagaagtcccagattgaggttttggtcagttaggtttctggtgagggctctctttccagcttgcagatagccaccttttttctcattctaacatgatctttcctcagtaccatgtgtgcagaggaaaggaagaggggcgagagatcactttggtgtctcttctggtgatgatctcttcggtgtctctagtggtggaaacactggttcttatcaaatcaagtccccacccttatgatctcatttaacattcattatttccttactccacatacagtcacattaagggttaggaaattcaacatatgaatttgagggggacacaaacatttagtccctaacacagttgggatgtatatactccttgaagacagaaaatgttgcatccacgcagagcattatgatttacctgagttccccaaagaaaccccaggtttgcctactttaagattgttaaatgttcctcacccaccactatgaactataacagcaatgtggaatttttgtatttgcagataatacagcaaacacaccaagtagtagaaactgagcaaaacaaagaagttgaaaaatggaaaagactggcacagttaaagaatcgtgagctggagaagttccgcacagaactagactcaatattagatgttctccgagagctgcaccggcaaggagtggttgtgccagttgcttttgcagatgaaatgaatgcaccagagtattaatagaaattcagatttcataatgaccttattaaaaggcctgaagatggatgggattgtgccactgtcaggacagcttatgaaaaacaagtgttccaatatgtttccagaaagcaaacaaccaaagcaacatttcaaaataaattgcctttaaccaataagaaaaaaaacatataatggtgtattttactaaaaatcattaaccagtctcattttaagtgatttatggacagtttcctttatagcagagaagggctcacttgtatgctagaaatagaaagaaaagaaaattgaacatactccgccacatttttattgataatgtgaggtttttaaaatttttattttagatccagggggtacatgtgcttgttgtaacatgggtgtattgaataatggtgggaattgggcttctagtgtacccatcatccaaatattaaacactgtacccaacaggtaatttttcaacgcttactgccgctcacactctttcccctattggagtccccagtgtctgttatctccatctttatgtctctgtgtacccattgtttagctcctacttttaagtgagaatatatgcaatattttattttttatgtctgatttagttcacataggataatggcctccagctctatccatgttgctgcaaatgacatgatttcattcttttttatagttgcataatactccatttatatatctctctctatatatatctcacgttttctttatccagtcaattgttggtagatacttaggttggttccatgaatttgctattgtaaatattgctgcaataaacatacatgtacagatatcttttttatataa

SEQ ID NO: 1464 - DNA, 3587 bp, Homo sapiens
cctttatcatagcacacaatattagaattctcattcacttgactgtttcattcagaaaaccagagcttcctaactggtgtaccaggaacaggtgtatcacaagatagtaacagctggaaatattactcaaaatcatttttcaaccattaaaaaggttacaggaattgaaataataattgaccattctgtgtatgactatgcctttatcagctttcttagtttagtcattagttttttaaaaaataattttaataatcattattttaacacatacagtttttatgcccaaccaacactcatcaccacagcatgttctgtgaggcctctccctgagctctctgcaaaccatcccaattatagtctgtatagttctttgttcaatgatgatatcatcagggatgctccacatttaaaatagattgcctctgatttaatttgcttgtatctttgcatgtttttcaactaatgtaggtaagatactgggattttttagtattagtattattgttattaataggtgttttcatagaaaacaagagttattgttagttctatccattttcatttggtttttgttgccttttgatgtaaacaattagcaaaatctgattcttgttggaatttcttttcatgattatatgggataaagaagatacaattaattgttttcccaagctcaatatgaaggcactgcactacactctgtgaggatggggtctgtgtctttaatctctggatccccaggtcctaagacagcagtcaacacagaaagggctcagtacttcattatttctactttatatgtatacatttatttgtggaatgaactactacaaattataaagtgataagggccatagagaattacaaatagaattatagggagttaacagaagaaaaatacatattcattgaactctttctgtgcatggggcactgtactatgttgagtgctttaaatgtacttttttaaattctgaaagtaaccatcttactaacaataccttgtagtgaaacttaatgcattaaagaaagtgccaacttcattttcagctcctttaccagactgccatacttgggaggtagaagatggtccattcatccggaacctcttagaatgtgaggtcaactcagagttaggaggaacctttactttctggatatagagaatgaaagctattaattactctaacaatccaaggtgcctcttacttatatagagaaattttatacaaatattctgattttcaagattacctgttaaattcttgtgattatagtttttcatttgcttcatatgtcaattttagattacaaaactcttagaagaattgagagaagccaaagaaaaccatacaccagagatgaaacatttcgtgggcttagaaaagaaaattaagcagatggaaatgagacatgcacaaagagaacaggaacttcaacaggtaaagtaaatcacatttacatatttatataggtctttacttttaagtgcctttaatttgctatagttttgtcatccctagcaaaaattaccacttaaagtgtttccagtgtattttgatcttgttaaaaatttaataaatttataacttttaccagaaaatgagactttatatctcaagtgcttgaagattggtatccttatatctggaaaaaaagcaaaaacttgtatcatgttcttaattattgatggattcctaaaaacttacacatcttaccctgggaacaaggcatggtgttccatattcaagtcatttcagcaaatgtttataagaaataaattgttttaatatgattatttaaaatatatagctagcactagtaatattactatacttaattataaacagataaattaatagaagttaaaaatagcagatgtaagggcatgatgtgtttttaggcacttgccttggtgctgaaatttaacttggtttgaacagtgtattagtctgcttgggctgacataacaaaatatcataaattgggtggctaaacaggaaaaatttatcttctcacagttctgtaggccagaagtcccagattgaggttttggtcagttaggtttctggtgagggctctctttccagcttgcagatagccaccttttttctcattctaacatgatctttcctcagtaccatgtgtgcagaggagaggaagaggggcgagagatcactttggtgtctcttctggtgatgatctcttcggtgtctctagtggtggaaacactggttcttatcaaatcaagtccccacccttatgatctcatttaacattcattatttccttactccacatacagtcacattaagggttaggaaattcaacatatgaatttgagggggacacaaacatttagtccctaacacagttgggatgtatatactccttgaagacagaaaatgttgcatccacgcagagcattatgatttacctgagttccccaaagaaaccccaggtttgcctactttaagattgttaaatgttcctcacccaccactatgaactataacagcaatgtggaatttttgtatttgcagataatacagcaaacacaccaagtagtagaaactgagcaaaacaaagaagttgaaaaatggaaaagactggcacagttaaagaatcgtgagctggagaagttccgcacagaactagactcaatattagatgttctccgagagctgcaccggcaaggagtggttgtgccagttgcttttgcagatgaaatgaatgcaccagagtattaatagaaattcagatttcataatgaccttattaaaaggcctgaagatggatgggattgtgccactgtcaggacagcttatgaaaaacaagtgttccaatatgtttccagaaagcaaacaaccaaagcaacatttcaaaataaattgcctttaaccaataagaaaaaaaacatataatggtgtattttactaaaaatcattaaccagtctcattttaagtgatttatggacagtttcctttatagcagagaagggctcacttgtatgctagaaatagaaagaaaagaaaattgaacatactccgccacatttttattgataatgtgaggtttttaaaatttttattttagatccagggggtacatgtgcttgttgtaacatgggtgtattgaataatggtgggaattgggcttctagtgtacccatcatccaaatattaaacactgtacccaacaggtaatttttcaacgcttactgccgctcacactctttcccctattggagtccccagtgtctgttatctccatctttatgtctctgtgtacccattgtttagctcctacttttaagtgagaatatatgcaatattttattttttatgtctgatttagttcacataggataatggcctccagctctatccatgttgctgcaaatgacatgatttcattcttttttatagttgcataatactccatttatatatctctctctatatatatctcacgttttctttatccagtcaattgttggtagatacttaggttggttccatgaatttgctattgtaaatattgctgcaataaacatacatgtacagatatcttttttatataa

SEQ ID NO: 1465 - DNA, 367 bp, Homo sapiens
tttggagttgggcgttcaatatgaattttaggattgtttttcccagttctgtgaaaaaatgatggtaattaataggaattacatcaaatctgtagattgctttgggcaatatggtcatttaaaacaatcatattggttattcagttcataagcatgggatgtatttccgtttgcttgtgtcatctgcagtttcttctgtgctttgtagttcttttttacctccttggttaaatgtattcctaggtgctgtgtgtgtgcgtgtgtgtgtgtgtagctattataaatgggattgagttcttaattttgttctcagcttgaatgttattggtgtatagagattccactgggttttgtatattgattttgt

SEQ ID NO: 1466 - DNA, 453 bp, Homo sapiens
aaaccacaatgagataccatctcatgccagttagaatggcgatcattaaaaagtcaggaaacagatgctggagaggatgcggagaaataggaatgcttttacactgttggtgggagtgtaaattagttcaaccactgtgggagacagtgtggcgactcctcaaggatctagaactagaaataccatttgacccagccatcccattactgggtatatacccaaaggattataaatcattctactattaagacacatgcacacatatgtttattgtggcactattcacaatagcaaagacttggaaccaacccaaatgcccatcaatgatagattggataaagacaatgtggcacatatacaccatggaatactatgtagtcataaaaaagaatgaggtcatgtcctttgcaggaacatggatgaagctggaaaccatcattctcagcaaactaa

SEQ ID NO: 1467 - DNA, 367 bp, Homo sapiens; identical to SEQ ID NO: 1465

SEQ ID NO: 1468 - DNA, 2048 bp, Homo sapiens
gtgtgtaggcctgggttcctcacctgtggatggacgctccttacctcattggcttgttgtgaagatcgaatgagtctgtgaggtcagtgaagcacttacacttagtaaattctcaataaatattcactgtgatgttttttattagaaacactgacacattactgagtgcatgtgctctgcacgtgtgcatgacaatgaggaaatttccctttaattcctgaagtgctgggtgatgatctatacccaggataatttttctagtaaatcagcttattggggatgcctatggataaagcccttcacttttaaggtattccctttaatttaacaataagacataaaacattgaagtatacaaaatgaacggctatggttaatggattacctgcaaataaatgacacctgtccaaatctggcttcaataataagggaattcatcactttacaaaaacaagaagttcagaggtaggtcaagccatagcttttagttactttctccctcttcatttctccagcctcactgtcagtgtccaaaggctttgctcctggtgtcaaaacagccatcagtgtgccttgtgcttcctggttcatagtcagtgagagagagaagggaagaagggagggcaaaagagagcataggagatatctcccctcaagatggacttcaagtctctgttttcaattgaattgaaccaacttaggtgaagttgccaaagaaagggcatgtgttgattgatttaaactagttgagatacgtctctagacttttgcatggttgtgtaagtgaatcaggtcaggactctaataggacagagaaaggtggggcagggggtgctgatgcatgtggggaagtaaccaacaatgtccgtactctccaattaagaacttaaattttaatatttcatctgatttttgccacaggaaattgaatcagttttctgttacagcatttttaatttttgtgaataaaatgaaacctcttagaatttggtttctttgtgactcatttcctcatagagggataataaaactcacatttccagttttgagatgactattaaaaaaatctgtgtatgacccagtgccagcaagcccagcttgctttttgagtagttactattgttgtgccattgctattttcttggtcaggatgtctttattttattttgtctcatctagactccagttttctatttccaaatttttacattatgaatccacatgggtgccttatcacctcatccaagaaaaaaacccatgaaggtgtgttttctttttaacattttataaattatatgctcatacaatctcatagagttctcacagaaaccctatggtgcagatgctatttgtgcaattttagagatctctttatctgcctcctttaaactatgagcttcatgaggacagagactttgttttgttcactgttgtatccttagtattcaaaatagtatatcacacaaggtagactggcagatgctcaatcagtgttttctgaagaaagggagagaggggaggagggaggagccctttgtgacctacagaggttggagggctttcccagtttgtgacattctagttaagatataaaccctcattcgtagtgggcctctgaggcctgtataccctgcctctctacagcttcatcttgctttcttcactctgctgtctctgtctgtgctccagctgcacaggcatatgcagttcctacgatatgcctccctctacaccgccacagggtctttgcacatgcagattctttagcctgtggaactgcttgctctacctgctcatctcccagttgcctccctacacctggccattctcccatatccctgctttactctgttgagaaccttcatattccagcttgaacacagttttctgggaagccttacctaatcccccaggttaaaccatgttccctttataaatccccacagcatcaggattctttcctcaactgtttttaaatacagtcagcccttcgtgtctgtgggttccccatctgtggattcaaccaacagcagatcaaaaatatttga

SEQ ID NO: 1469 - DNA, 873 bp, Homo sapiens
tgtcacacctagaacaatgaacttcagttttttcctttttttttcccttttctttccccctttaaatgggtaatgtgtcaacatcttaacaaggtttaaggaagacacacctatgaggtgaaaacaaatcatcactctataatttcttagtattaccaaatatcgagtcaagggcctgatcagccccaaaagaatgaggcacttttaatgtgacaccattcctggcagtctcaggttcggctctcccaggccccggatgcagatggctgttaggggctggccatcctcatctcaacggtcctggaaggcaccactttcagggcatatgccatgactaacattccggtgagcaatgctgactcaatcgtagactgttatttcatgttcccagtaccctgtgcaggaagggaagggaaatgagtaatagatgtatcagtcccattcaaaatgtgtatgtctgcgaagctgaaggcaaaaattaaatactaaaaaaagatacaaaaatttaaactttaaacaaatgaaaatttaaaaataaaataactttttttaatgttacccacagaaaatcggtaagaattttaaaaaatgtgtatgttctccatgccatcacccccattttgcacacaaagaaactgaggtctgagtgctacatgccaaatggccaacagtgacagatgaagacttgggtgtggagtcagcctgcctcccagagctacgggctccctttgcaagcagtgctgctcttctgagcacactgtgctctccaaggacggagagttgtgggagcaaatgctgattttctttctagcagaagtcttgtctgattgatagaactggggggtttagctaaaataaaaaataaaaaaaaaa

SEQ ID NO: 1470 - DNA, 489 bp, Homo sapiens
cacaagtaacttcatctccctgtgcctatgtgcctgagagatgtgtaaaatggggatagtaacagtacccatcacacagggcagatgtgatgtgtagtgagatcatcaaggtcaaatgcttctcagccaaatcctgcccattcttcaactggctacaactctctgcaaagccttccctaaagccaccaatccagctctgtcacttcctcagagaggccttccctgaaggcaagaattttgtcaaccttgttcacaattgtattctctattccaagaacactgacataaaaaatatttgatagattgattaaagaaataatcctctacctcctccaaattatcatagcattttactctacaatcttatctgacattaatatcctatacatgtactggacatagaaaattattaccgatttcacatttactttgtatgcctgtcttatctcaattagagcataagctctgacagtagggtctaattctcag

SEQ ID NO: 1471 - DNA, 375 bp, Homo sapiens
cactgtccagtcgctgagagaagctcatcaaggagctctgctggagtcaaaaggtcttgaacaatcaaaacaatcaaagcaacagcatccagtttgtgcactacagctcaaccactcctacccaaagatggagctttctatatccttgctcaggaccacgcattgaaaatagccttttgttattatgaaaaatttcaaaactataccaaaatacagtgaagaacaaaaggaactacgacgtgtgtgtcagccagctgtaacaatttggtttacggtcaatcttgtttcctattatatttctcactaaccactttcatgctgaactatatattttgaagcaaacttcaaacatcctatcatcagttcaaatgtcaa

SEQ ID NO: 1472 - DNA, 1257 bp, Homo sapiens
tttcaatactatgctaaagaaaagaagcattctaactttgtgggaaaattcaaactgtgagtgaaggtaactccaacaaagactgaaggttaaaatatcaaggcatgacacaaggaataagaagtggaaacagaatgtagttacaataatctaagtgagagtttataagggactgtgaaactatgaatacaaaagataacaacttagaagcagaattaaaagaatggttagcaaagctaaaatgccactaattaacatgtgaaacatatagaacttttgtaagaacttagaaagaacatttgtgggaagatgaatataagttgtctcaaaatattgtttgaaatatcaactggacatccacataaagtctgatgttcactactagtttgaaagatgtaaggaaagatacagccatagaaactaaacattttataaaaacacatagccttggccgcgtgtggtgactcacgcctgtaatcccagcacttttgggaggctgaggtggatggatcacctgaggtcaggagttcaagaccagcctgaccaatacgtgaaaccctgtctctactaaaacaaaaaaattagccgggcatggtggcccctgcctgcagtcccagctacttgggaggctgagacaggagaattgtttgaacttggaaggcggaagttgctgtgagcctagatcacgtcaccgtacttcagcctaggcaacagagcaagagactctatctccaacaaaaaaataaaaataaaaataaatagccttttcaacactgtaattaaattaagacatcatttatattgtttgggaggatggaagagacactggttaattttaccattagacatcgtgttaaagagaacataaatggaagaaataatatccaaacttgaaagagaaaaaaagggtaaggaggaaagtgcaggaataaagcaggagtaatccaataaaaggaagaaagaaagtgaaaagctgctgaggaagtggcccatgcctgtaatcccagcactttaggaggccgaggggtgtggatcacctgaggtcaggagttcaaaaccagcctgaccaaggaggtaaaaccccgtctctactaaaatacaaaaatcagctgggcatggtagcaggcgcctgtaatcccagctactcaggaggctgaggcaggagaaatcacttgaacccgggaggtggaggttgcagtgagccgagattgcaccattgcactccaggctgggcgacagagtgagactcagcctcaa

SEQ ID NO: 1473 - DNA, 1256 bp, Homo sapiens
tttcaatactatgctaaagaaaagaagcattctaactttgtgggaaaattcaaactgtgagtgaaggtaactccaacaaagactgaaggttaaaatatcaaggcatgacacaaggaataagaagtggaaacagaatgtagttacaataatctaagtgagagtttataagggactgtgaaactatgaatacaaaagataacaacttagaagcagaattaaaagaatggttagcaaagctaaaatgccactaattaacatgtgaaacatatagaacttttgtaagaacttagaaagaacatttgtgggaagatgaatataagttgtctcaaaatattgtttgaaatatcaactggacatccacataaagtctgatgttcactactagtttgaaagatgtaaggaaagatacagccatagaaactaaacattttataaaaacacatagccttggccgcgtgtggtgactcacgcctgtaatcccagcacttttgggaggctgaggtggatggatcacctgaggtcaggagttcaagaccagcctgaccaatacgtgaaaccctgtctctactaaaacaaaaaaattagccgggcatggtggcccctgcctgcagtcccagctacttgggaggctgagacaggagaattgtttgaacttggaaggcggaagttgctgtgagcctagatcacgtcaccgtacttcagcctaggcaacagagcaagagactctatctccaacaaaaaaataaaaataaaaataaatagccttttcaacactgtaattaaattaagacatcatttatattgtttgggaggatggaagagacactggttaattttaccattagacatcgtgttaaagagaacataaatggaagaaataatatccaaacttgaaagagaaaaaaagggtaaggaggaaagtgcaggaataaagcaggagtaatccaataaaaggaagaaagaaagtgaaaagctgctgggaagtggcccatgcctgtaatcccagcactttaggaggccgaggggtgtggatcacctgaggtcaggagttcaaaaccagcctgaccaaggaggtaaaaccccgtctctactaaaatacaaaaatcagctgggcatggtagcaggcgcctgtaatcccagctactcaggaggctgaggcaggagaaatcacttgaacccgggaggtggaggttgcagtgagccgagattgcaccattgcactccaggctgggcgacagagtgagactcagcctcaa

SEQ ID NO: 1474 - DNA, 1256 bp, Homo sapiens; identical to SEQ ID NO: 1473

SEQ ID NO: 1475 - DNA, 309 bp, Homo sapiens
ggccgggcgcagtggctcatgcctgtaatcccagcactttgggaggcagaggcaggcagatcacgaggtcaggagatcgagaccatcctggctaacacggtgaaactccatctctactaaaaatacaaaaaattagctgggcgtggtggcgggcgcctgtagtcccagctactcgggaggctgaggcaggagaatagtgtgaacccgggaggcggagcttgcagtgagccgagatggcaccgctgcactccagcctgggagacagagcaagactctgtctcaaaaaaaaataaattaattaattaaaaa

SEQ ID NO: 1476 - DNA, 309 bp, Homo sapiens; identical to SEQ ID NO: 1475

SEQ ID NO: 1477 - DNA, 3908 bp, Homo sapiens
tccccagagggcttctccttttttaatcaatgaccaacttatccagctttggaaatctggacaaagagaaggctgagaggaggcctggtccagtgtctaagggtctctgagtgagtctgtgtcagcatgtgggccccagctgggcctgtccatgggttgggcacagcagtttcctgagtaagagccagccccaccctcagggcagcattccagcccaaaaagaaatccaggccctccaggttcggcctgttttcaaggccctcaggacagtcaataaataggttagattctgagccaggcctggaaagtgagggtattcaaagggcaggatgagctgctagggatcgtaatgattcccaggtactctcctgcccttctccaacaaggaagtaaataaatagacttttaactcaggaacggggtgttggagcaggggaaccctccccttggagttagtaattaagtctcatgttaaaaacaaggtagccccagcccctaccagcatctacaaaatcctacaggatggagggaagggctagccagcctgggggtacacagtacccagccccgcagggtcctggaggaggtctcatgtctgttctggggctcctggggctccctcctcctttgggggtggctccaggaaaattggggtgactgagggtggcttcttcactctgggaaaataatacaagaatgtatagagaagaagccattagctatatccctggatctcactaggcctcctgtttcccagggcagaaaagggtcactcacgagtagggggaagccgggacccccaccatcaggaagtggttcttcttccgaaacaatctccacaggccccgatggttgccacgcacatccaggtcccagatatggaggcactagtgagggtgggatggagacagagacatgggtcagagagctgtagggaggggtcactgacgaccctttggcccagcccccacccctcctcagaaaccacctcaatttgtaagagatagcatcttttagaatatgaatttggacaaggaggttggaagaggtgttctaagagtataaagaggaggttctgaggttgaagattccagagcaaaggctccctggatcttggggcagtatgtgtgtgagggggaggggttctccagggtgggcatggtattggagcaccttggcaagctgggtccaggtggtgaagtcatcatctttctccattcgaataaaggccacgtaggtgtggccctctgtgtctggcaggaaagagtcttcacaagggttcttgctgtggtccagaacctcagcctcactgcagtagagggtgggagaatatagccaagacagggcccacttcatgggtgtgtcccacaggaccctgtacttggttgaatgctctgctgttgccaccttgaagttctttttttttttttttttttgagatggagtcttgctctgtcgcccaggctggagtctcctgcctcagcctcccaagtagctgggactacaggcgcctgccaccacgcccggctaattttttgtatttttagtagagacagggtttcaccgtgttagccaggatggtctcgatctcctgacctcatgatccacccacctcggcctcccaaagtgctgggattacaggcgtgagccaccgcgcccggcctgaagttcctaatgtttgagatgagggccctgattttcattttgcacaggaccctgtaaattatggggccaagatccccagtatttgactctttgctccctgctacaccccaattgtcctaggccatacctgagcagcctgtgaacttccacttcataagcttctttcttcagactgaagaggagggagaaatgggtcaggggagtgggcaggccctcaggtcccatgggtagcactgagcagggcaaggggtcacatgggaatctgtagccgcagggctggagtaaacacacaggcccagcattggaagggactttcagggactggcctccaaatctcctagatatccaccccttgccctgctgccagccccaacctgtccacattcctgagctggacacctggaaccgtgttgaacttgtgcttcttgaagtaggcctcctggagtgggtatgagagtgaaaatcagcacctcacattgtctggcccacacccacttgctgaccagccagacatctataagacacacaaatgaagtcctagacctgtaaagagccctctaatttcccaccgtcttctccatcctctttgcagcatcctcagcaagctcttactagctttaatttggcctccaccattgctggagagctcatgctgtcacggcagctcacactactgcaccacagacccatgaactagcagtccctgcctcttgtagttctccctgggcctgctgttctagagccacagatgtcagaaacaggccctgcaggaggtggtgggcaaagggacgggctgggctgggaaggaaaaaactactttgactctggtactgagagtgacctgagggaagcgcctgcccctctctgggagaggaatggggctcgcgtattagtcagcctctgagggacctctggcttctaggaggttccaagctggacgctattcattcctttgggctgggctggctcaaggcctcccttgctgtaactggggaatggtcctctgaatgcagccaggtgggttggcggtacctaaggacttccctgttctcctcaggctgaagcataggctccagcacttgccaaaacaggaaagggcagagattgcagggctggaccagtacttagaggcagaaatactctccccagacacccacagtctagtgctaaaaatagtaaaaataaaaacaataccagctgacccttatatatgtttataattcaaagcactttacatatattgactcatttaaacctcaaaatatcgtaacccagtgaggtagtagtattttatcctctttttttttgagatggagtctcgctctgtcacctaggctggagtgcagtggcgtgatcttggctcacagcaagcttcgcctcctgggttcacgccattctcctgcctcagcctcccaagtagctgggactacaggcgcccatcaccaggcccggctaattttttgtatttttagtagagatggggtttcaccatgttagccaggatggtctcgatctcctgaccttgtgatccacccgcatcggcctcccaaagtgctgggattacaggcgtgagccaccgcgcccagccctttatcctcatttttcagataaagaaactgaggcaaaaataggatagctctttccccaaggttacatggctagcaagtagcagagctaagattgcttcagagtccatgttcttgttcttgactgtcatgccacactgtgccctgctccctgcctcccactcacgtgaaagtagccattcatgttgaggccgacgatgccaaagtggtaggatcgggaaacgtcagggatgatgcactctcggccccggcgttgttcaggcatccgcatccacatgtcccaatcccagagctggcagacatggaccacgatgaaggttaagatgtttcgagttggtaggggactccagccccctcaccctaccctgacagttaccttttccggtgtaggccacttgggctcaagctcctccttgtacaaggacctcctgagcacccagcccagcccaggcatggtctccacacggtacagtagtgctgggtcctcagccgtgtgttcatacccctggggacagggtgccatagtgggaggtattagctgaggcctcataaactcgcctgctaaaccctggtcattccagcctacctggtcattccaggcagagatgcagtacaggctgtcatcctcctccagtaggtggatggattggtcaagga

SEQ ID NO: 1478 - DNA, 3357 bp, Homo sapiens
tccccagagggcttctccttttttaatcaatgaccaacttatccagctttggaaatctggacaaagagaaggctgagaggaggcctggtccagtgtctaagggtctctgagtgagtctgtgtcagcatgtgggccccagctgggcctgtccatgggttgggcacagcagtttcctgagtaagagccagccccaccctcagggcagcattccagcccaaaaagaaatccaggccctccaggttcggcctgttttcaaggccctcaggacagtcaataaataggttagattctgagccaggcctggaaagtgagggtattcaaagggcaggatgagctgctagggatcgtaatgattcccaggtactctcctgcccttctccaacaaggaagtaaataaatagacttttaactcaggaacggggtgttggagcagggaaccctccccttggagttagtaattaagtctcatgttaaaaacaaggtagccccagcccctaccagcatctacaaaatcctacaggatggagggaagggctagccagcctgggggtacacagtacccagcccgcagggtcctggaggaggtctcatgtctgttctggggctcctggggctccctcctcctttgggggtggctccaggaaaattggggtgactgagggtggcttcttcactctgggaaaataatacaagaatgtatagagaagaagccattagctatatccctggatctcactaggcctcctgtttcccagggcagaaaagggtcactcacgagtagggggaagccgggacccccaccatcaggaagtggttcttcttccgaaacaatctccacaggccccgatggttgccacgcacatccaggtcccagatatggaggcactagtgagggtgggatggagacagagacatgggtcagagagctgtagggaggggtcactgacgaccctttggcccagcccccacccctcctcagaaaccacctcaatttgtaagagatagcatcttttagaatatgaatttggacaaggaggttggaagaggtgttctaagagtataaagaggaggttctgaggttgaagattccagagcaaaggctccctggatcttggggcagtatgtgtgtgagggggaggggttctccagggtgggcatggtattggagcaccttggcaagctgggtccaggtggtgaagtcatcatctttctccattcgaataaaggccacgtaggtgtggccctctgtgtctggcaggaaagagtcttcacaagggttcttgctgtggtccagaacctcagcctcactgcagtagagggtgggagaatatagccaagacagggcccacttcatgggtgtgtcccacaggaccctgtacttggttgaatgctctgctgttgccaccttgaagttctttttttttttttttttttgagatggagtcttgctctgtcgcccaggctggagtctcctgcctcagcctcccaagtagctgggactacaggcgcctgccaccacgcccggctaattttttgtatttttagtagagacagggtttcaccgtgttagccaggatggtctcgatctcctgacctcatgatccacccacctcggcctcccaaagtgctgggattacaggcgtgagccaccgcgcccggcctgaagttcctaatgtttgagatgagggccctgattttcattttgcacaggaccctgtaaattatggggccaagatccccagtatttgactctttgctccctgctacaccccaattgtcctaggccatacctgagcagcctgtgaacttccacttcataagcttctttcttcagactgaagaggagggagaaatgggtcaggggagtgggcaggccctcaggtcccatgggtagcactgagcagggcaaggggtcacatgggaatctgtagccgcagggctggagtaaacacacaggcccagcattggaagggactttcagggactggcctccaaatctcctagatatccaccccttgccctgctgccagccccaacctgtccacattcctgagctggacacctggaaccgtgttgaacttgtgcttcttgaagtaggcctcctggagtgggtatgagagtgaaaatcagcacctcacattgtctggcccacacccacttgctgaccagccagacatctataagacacacaaatgaagtcctagacctgtaaagagccctctaatttcccaccgtcttctccatcctctttgcagcatcctcagcaagctcttactagctttaatttggcctccaccattgctggagagctcatgctgtcacggcagctcacactactgcaccacagacccatgaactagcagtccctgcctcttgtagttctccctgggcctgctgttctagagccacagatgtcagaaacaggccctgcaggaggtggtgggcaaagggacgggctgggctgggaaggaaaaaactactttgactctggtactgagagtgacctgagggaagcgcctgcccctctctgggagaggaatggggctcgcgtattagtcagcctctgagggacctctggcttctaggaggttccaagctggacgctattcattcctttgggctgggctggctcaaggcctcccttgctgtaactggggaatggtcctctgaatgcagccaggtgggttggcggtacctaaggacttccctgttctcctcaggctgaagcataggctccagcacttgccaaaacaggaaagggcagagattgcagggctggaccagtacttagaggcagaaatactctccccagacacccacagtctagtgctaaaaatagtaagaataaaaacaataccagctgacccttatatatgtttataattcaagcactttacatatattgactcatttgaacctcaaaatatcgtaacccagtgaggtagtagtgttttatcctctttttttttgagatggagtctcgctctgtcacctaggctggagtgcagtggcgtgatcttggctcacagcaacgtcgcctcctgggttcacgccattctcctgcctcagcctcccaagtagctgggactacaggcgcccatcaccaggcccggctaattttttgtatttttagtagagatggggtttcaccatgttagccaggatggtctcgatctcctgaccttgtgatccacccgcatcggcctcccaaagtgctgggattacaggcgtgagccaccgcgcccagccctttatcctcatttttcagataaagaaactgaggcaaaaataggatagctctttccccaaggttacatggctagcaagtagcagagctaagattgcttcagagtccat

SEQ ID NO: 1479 - DNA, 427 bp, Homo sapiens
cagaccctttctgaagaggtgctccacactcatcctcctgacattaggcccttcacagatcccttaaatgttcttttccctgccgtaggctttctcattcactccctctggacaatcccatccattttctggtgcccctatgactaacttagatcttcctaacctctttgggttactggctatgtgagaatctgatgaagaccatgacccatttctccacaaaaatgcccagatagagaattctgaatagcaaagtgctctaagggccatagacacccttgctcctacatctccatctgcaccctagcccgtctcttgaatgatgcctgcccagtcctgtcccatccacttccttcccacccctactatgcacacctgctctctcatttcctcttccaactccccagtatccctttttgttctctcc

SEQ ID NO: 1480 - DNA, 422 bp, Homo sapiens
cagaccctttctgaagaggtgctcacactcatcctcctgacattaggccttcacagatcccttaaatgttcttttccctgccgtagctttctcattcactccctctgacaatcccatccattttctgtgcccctatgactaacttagatcttcctaacctctttgggttactggctatgtgagaatctgatgaagaccatgacccatttctccacaaaaatgcccagatagagaattctgaatagcaaagtgctctaagggccatagacacccttgctcctacatctccatctgcaccctagcccgtctcttgaatgatgcctgcccagtcctgtcccatccacttccttcccacccctactatgcacacctgctctctcatttcctcttccaactccccagtatccctttttgttctctcc

SEQ ID NO: 1481 - DNA, 10128 bp, Homo sapiens
gcctgtaccaacaaagcctgcctttattaaatagagatcgcgttacattccatccaaagaaggaaatccggacgtggtgagggatgcgtccaggtgggagctccgaacgctggtcctgagtgggctctgatgggtgggagggcccaggtcctgcctgcccacccaggccccacatgccagggcgcgtgtctgcatggccacccacagctgaaaacaggcgtgggtgatctgaagccctgtctgtgttctactgtggcagaaagtgccccagtccttccagcggttttgggagcagggcctccaggagcacagggctgagacggggtgggagggaaggtgacaagggaggcctttgtgaagggggagggaggaagggggaaaggaagggaggaagcgggggaggggtcttgactcatcttaacaaggctttggggcaattctgtgctatggaggccctgccagcccctcctagtagtccaatagggaggccaccgggaacaaggcacaggatggccacaagggggtgctgctggcccagggcttggcagctggggtggagggtaccctggagatccagccacccagaacagtccctttctgaagacaagccagcaacaaggcacctgcaggcagttctggggactggggagggggcgctggctgcctcaggtgtcccctcccaagggctgaggccccccgagtatggatccgagctccctggtctttggtgctttcttgaaatcctcctggtggtggcagaacccagtggggaagagaggggggtcttgccgtgaagtccaggcccgtctgtcccaggatggacgtgtggtgctggctcagtgctgcctccatggcctgtctgtccatccattctgcctctggctcagggctggctccaggcccccgtctccctgtgtgtcggcttgttctggggtgggtgtttgctctgtctcagagctccccttcaggcctgggccgcgccctaagcctcctgggggaagaagccgagcttggccagtgacatctccttccgcaacctcatgatctcccagaacatgggctctgctgcaggcagagagagggtgaacaggtcggggacagctcagggtcacctcgggcagatggccaggtcccctcctgtggctttggacagagcagctggcacagcaccctagggtccccggcccccaaaacagatgacctcagtgagtggctggacctctctgaggctccactcttgagccttggaaactgctgagtgccgaccacacccgagggatctgtttgcactacactgacggccacccccacagcccgacgcagacaagcaggtacacgctgtcacatgccacagcggtggtccagacctgggaactacattagacaaggcacagatgcctccctggggtctcacaaggaccctgcgcagtgaggcggggaccacagcggccatccagggacctagcaggtgtcaacacccagcatgccttggccttggcctccaagaggacttgacccccaggatggagaggagatagctccttactcagagggtcgggccagactggttcaggagaagactcagcagcgagcaaaggttggtggaggagcggggagccaggccttgcagaatgggctgtggggggagggggtggagggaggccctgtccagcatggagtggagtgggagcaaaggctggaggtgggtgaccctgtgttcaggtgaccaggaggaggggccaccacctccagggccagggagagattcacaggggtggcccccttgtgcggggccgggagaggtttggggacaggagaaagaccagccggacggactcaggtacagagctcagcacccaggaagtttgtgaacgctttactaaaccacaaccctccccgctccccagcctcctagctgagtcttgcctccactaggggcaggtgggcccagagggcacttccccatccagccccactcccgtgtgcgatccctgcaccggccaccagggggcgctcaccgtcctgccgcaccaggccttgctggatgtagcggatgtaggtgaagaagttgcacactgcggtgatctgtgggcagaggtggggacggtgtgacctgccagccccacgctgggggtcccctgacaggcggatctgagtccagagcaggaggccccaggtccctgcagagccaggcagtgctccctgactcagctgggactgggctttcaagtagtaatcaacaacagcatgactagccctgctgtaatagcagcagcagcagcagcagccatttcatcaagcgcctgcagcgaacggagcagacgcgcttattattccatcttacatgggggaaagcggagccacccggggaaagccgctgacatccatcacggagatggcggagctaatgaaccagcatgcagcagagctgtgagatgaaccgggcaggctgtcccggagtctacactcgccctctcacaggccggcttgctccagatgctggagttttgggccagccaggcctcagtccagtgctactgataacactgggaaaggaaagggggtcagaagccgctcacctgggctgcccggggcccctggggcctcaggcctgctccatgccaggccccggggaccctgtgttggctcagacactgctatgaggactcacaccacggagagggtactgttggtgcctggcccagggccccttcccaggcccgggccccatctcccagctgctgagagtgggggcactaatggctcagaggtgcccccctctgtactcactcctcctgtagacctcagccgatgactgacttgtgtggagatagaaaggacagtccccttgcctcagggtggaatcaactctgctaagagcccggtggatggggctgaagctgggctgtagctaaggccacatcctggctggactcccccgtcccttccctcattctcctgggagctgcacacaatctccaggtgaggctctgcctcttcggaacccagcctaagacagggtggaaggtagccggcggctgtgcccgcccgcaacagcccctactgaatgtccaacactcctggggagggacatcaagtgagaggggcacccgcaggctggggagtggagaagcttcggggaggggcgggacggtggtggcctggcaaagatagggaggtgcgagagagcggggcgaggtcgggggaccagcccgtcgtggcagggacaccgctgcacagggagggttgaggagaggctgcggcaggagggtggggcagggcagagctcaggacaggagcagggacagtggatgcccacagaggctcatgagcagggagtagcagggagggggctttccctctccagggagtgtgctagggagaaaacacttctccctgtggaccccacatgtcttggtctttcagggcagggaccacatcctaaaacttcagaccctcctcacctcatctcccacccccagcttcatccagtgcagcaggacacccaggccagggacttaaagtgctagaggtgacattgttgagcacgggaacatcttttgtggggcctgctgttgagccatggttgggcctggaaagcggtgatggagataagtggccactgaacaaggctcagtgggcacaaatccacagggtaggggctgcagtggactcagagccaggatcccaggtctcggtgtgtggccctgaacacacccctttcctctgccaaggctcagcctcccttttggtaaatgggtgctcagcacaccgctgggaggactcacgctcggatgccttgtggagttcatcaaggacagtatagtctgctgccagcaaagggaccatttgtcccctttagacctgctcccccgcgaggagcctctagcaggcctgagatggttcctcaagctgtgtcactggaaacgtgtttccaaacatgttctcttgttcccctcaatcctcttaagagtcaacagagggacagaggaagaggaatccctgtcctcaatccccagcttggtgagaacccctgtcctggtctgggtcactcggcaggggagggtgggagctgggattcctagaggccccttggcactcacggccgacttaaggctggtgcaccagacgcaccgctgaaccttttccaaagcttcggccagcacctgagtctgggcgtcaggagccccgcactctaactggaactctagcatcactcctggattaggtgacattgaatgacagaggggggcgatgtcatcccatgacatttcatacataaggctgcatctcagccgactggagagtggccctcctgatggctctgaagtcagctgccctgtgcaacaaggccctgtggcaggggactgcgggtgtcctctagaagctgagggtgtccccttgccagcagccagcaagaaaataggggcctcagtccttcaaacacaaggaactgaatgctgccaacaatgtgagttttgaggaggaccctgacttccagaaaggaacacagtctgctgacagcttactgcgaccttgcaagtccctgagcagagaatccagtaagtaagtagtgcttagactccaacatggggaactgcgctattttaagctaccaggttgatagtaatttgttacaccgtaatagcaaaccactgcccttggcttggctgtgtggcccgagtcagtctctgcgcctctctgagcctgtaccctgctctgtaaatcaagatgtaaggctgggcgtggtggctcacacctataatcccagcactttgggaggccgaggcaggcagatcacttaaggccaggagttcgagttcagcctggccaacgtggtgaaaccccatctctactaaaaatacaaaattagctgggcgtggtggcacatgcctgtaatcccagctacttgggaagctgaggcaggagaattgctaatgtctgcctgggaggcagacattgcagtgaactgagattgtgccactgcactccagcctgggtgacaaagactctgtctcaaaaaataaataaataaaataagtaaatcaaggtgtagtgctattcatactcccaggcccagggcccagtgtcccagcacccaggtggccccaaaggagtcaagtaacgcttgcaaaggctgactcaccctggcccgggaagatggcgagatgtagtaatggcttttggagtccccgagccggattcggtggcggcaggtgcgggtcagcccgctcagggcacatgtgctaggggaaagcaaaatgggtcatgggggctggctggggcttgcccctctccctcacccctgcatacagggaagatgcagcagctgagaggatgcatggggaggggcaggcctcccttcccccacccggcttccaaaggaacccagagccaggcagagaagggagctggccccagccatccctgggacagacctcgaactaagctgagctgtacccctagaacccttgttttgcccctactgggcaagagagcttggttaatctcatgccaggtgtacaaagtcccaccctctgcaggctctgcatatgcctctccctctacttctggggactcagaccaggcactcctcccccaactaggccagagttgaggtctggctgcctcccgcttcccaacatccagcagctcccctgcttcatccatgcaggccttctgaccccactaacccccatggttctcagccgcatgccaaccaaccccgtctaagagccttctcccatgccctcttctctcctccccccagtcctgcatgacgtcgctcagcatcttcagccacccacatgaagggtctccacaggccctgagcaacccccatctgggccccactccccaaacctgctcttcactggccatcatctgctcggctctctcctcctcaccctctgcttggtcaccaagtccccaggccagggcacagcagcaggacttttggcctgcatccccttggctccttctggccagctctctgcctcatcgctctctttcttctccacatcagagccagggctcctccaaaaacccacatctaacccatcatctttctctcttgctttcctaattcccaagaaatggggagaatcccaaataaatgaaggtttaaaaagctccttggctgcggacttatcagagcatttgttgcctcctggttcactgggactctctgatggaccagagagcctcttttcaggtggcagctattgatgacttttttttttttttgagacagggtctcactctgtcacccagactggagtgcagtggtgcaatctcagctcaccacaacctccgtctcccaggctcaagcaattctcctgactcagcctcccgagcagctgagattacaggcgtgtgccaccacacccggctaacttttatatctttagtagagatggggttttctccatgttggccaggttggtctcaaactcctgacctcaagtgatccacccgcctcaacctcccagagtgctgggattacaggtgtgagccactgcacccggcctattgatgacttttgccgcactggctggtgggttaaagcccaaacctgtgaaggctctttatactctggccccaacagcctctgcagcctccaccccaattccctgtccccccactgcttagccagatgccccagtggtgcttccgttaatactccagcttctcacacctttgcacattccgttccctctgcctgaaatgcccttccctgcttggcaaacttctattcatccttcaaaacctggctcaaatgctccctctccgtgatgagcctcccaccagggcaccagccatccccagccaggctcttggctgccaaggtgaaatcctccccaatttctgccccttgctccaccctggctattttgttctgctgctcccctgctcaatgccaggtgagtagctggaggacaaatgccagggctactgcgtcgttatttattggcaggggcacagccagcaactgataatcatggttcaagaaaagaaggggagggcacagagcagaccagtcaggaagaggcagaccctagctcccggcctctctggaaagcctgggggtccacaggaaacctgccaaactgcctccttgccctgtgggggcagcaactgtccctgtcctgtcggcgctgctgcatcctgaccacccctcggcacagtaaacacacggcttggcggggctttcccacatgggcaggaaggagctaagaccctcagcttacttggtgctgctacagtcaacctcggccaccttcactgtgggcagcgtctgcgaagccaccggctcaatggtgagcgtgttgtcctccacggcggcccgtaccagcaccgagagctgtggcagaccagggaggcaggcagggtggtaaggggctgggccctggcggaggggtgtgtcccccagctggccccgcccctgccatgcctcacctcctgcattgtgaagtccaggcaggggcccacgtcctctcggtacaccctttccaggaaggggcaggtcttgtccagggtgggggattccctccaggcctggaactctgcaaacaggattgtgtccacctgtgggggagggcaagcgagggtgggggcggtcagggtactggggccagcatagaagatgcaggctgagctgaaggggagcgagggaggacgtggggcaggcccagcaagccagcaggtcgatccccagcagccgtgcagggaagccaagtccagcagcagcagagctcccttctgccctttgcaccaaagaatttagaactaaaagttttgtttccaggccggtgttaaatttcttggcgctactggattttagagtggggtgcagggctttgtcctgaagaccctcactgcctccttgaggaggaaaagtcaaagagcaactagcaggaggccacaggtaccagcaggtacacaagcacacacaagcacgtgcacacaggaggggacacacacaggctgccctgggcccacacctcagaggtgactgctggcctgctccaggccacatgcagaatgagggaggctgggagggggcaaagtgggaggcccctctttggagccatttacctgtcgggaaaaggagggagagggagtggaggcaggggctgggggctccccaggtgggagcggccaggccggctcgtaggtgaggtgaaccgccttgctggggaccacgcagaggagcagggagagcagcggggccagcccgggctgggccggatggacagacagacagacagacagacaggtagacaggtgcacagagacagaacaggaggaaggggagaagttaatgtacattcagaagctcagagctcaggaggtggatgagggcctgctcgtcttcctggaggccctggagacagaggtggaagccaggatggagtcgagtgggctggcgccagggacccaggaagctgaaggcaccacagccctctgaggcactacctgggtgcagccttgaactcagctcttgatgtccctgtctctggttcctccagcagccccgggaggccccatttatcaggtgagaaagctgaggtgctgacaggtggcctcatttgcctacagacccatgaccatgagtgtcagcccagcctgggcccagcaactggtgtggccagctgaggtgggacggagacacctctccaaaggccacgcttgtctcagccccacagtcagagggtgccagaaaccccttgagcacagggctgtcaccaggtggtcctggggctcgaggctgtggccacacggggtccaggcagcctctcccctgaggcccagtggctgctgcttggcctcttaaggccaaggaagtgtgtgtctcagtggaggccccagatcctcagggccaaagccagcctcaggtgcagagaccactacctactgcttggagtcagtggggcagggagggggcctcaggtccccagatggtataccctggaggctgcaggccaagtgcctcagatcacaggaggttggagagaaaggacctgcccagccctcacatcccagagaggcgcaggacaggctccaggtcacacagcatggggcaggctggtcctcactgggctcggaccctgcctaccgcaggcactgccacccttccccgtgcccagagcccgcttcccaccctcacctccttgccctctctgtctggggtgagggtgtgtcccgcagcgggacacacggcggggcagagggtgctgctggtgctcttgtggcgagagtggccctttcggggcccggccttggtggggctcagcagctgggggtgaagctcgcggttgggagaggctggtgtggacgtgatgaccagtgtcttcaaggctgtcacctctgcctgcagcatgtcgatctgcatgggatgggatggctgtcaaccctcacccagactggatgccatcctggctgccaccgcctatcagcctaactcaggacaatgcacccctgcagtgacaggcacttagtcccacccgacgccctcagaacagccttcgaggcagagacccagacactcgttttacacatagggaaactgaggctcacagaggcgacatggcctgcccaaggtcactctgtgagcaggattctgttaggaacaagtgtctgggagctggctgggcctcccatgagagttctgggaccgcccccaggagccaggaaaggcccaggcctcacattttgcagatgggcaaccaggcttggagagaggaagcgacttgcccaggctcagacagccatactgagtgaggtttctgctttgtaaagtggggctgggaggagagggaagaaggtacaataatcacagggtcctcccagccccagcactatcccagaaaaggctctgccatgcagcagaatcactgatggagccccgggacactgggccctgtgatctcagacccccacccttcccttccctccctgggcctaggttcacccattcctgctggccccaccgggccaggtgagcgtccactcgggcagcaaagctcagtgctcgctgagccgggaggcagggggggtgcctgggctggcctgggcaggcggggatgggcctcaccttgccccgagcctccttcagctgcttttctg

SEQ ID NO: 1482 - DNA, 10129 bp, Homo sapiens
gcctgtaccaacaaagcctgcctttattaaatagagatcgcgttacattccatccaaagaaggaaatccggacgtggtgagggatgcgtccaggtgggagctccgaacgctggtcctgagtgggctctgatgggtgggagggcccaggtcctgcctgcccacccaggccccacatgccagggcgcgtgtctgcatggccacccacagctgaaaacaggcgtgggcgatctgaagccctgtctgtgttctactgtggcagaaagtgccccagtccttccagcggttttgggagcagggcctccaggagcacagggctgagacggggtgggagggaaggtgacaagggaggcctttgtgaagggggagggaggaagggggaaaggaagggaggaagcgggggaggggtcttgactcatcttaacaaggctttggggcaattctgtgctatggaggccctgccagcccctcctagtagtccaatagggaggccaccgggaacaaggcacaggatggccacaagggggtgctgctggcccagggcttggcagctggggtggagggtaccctggagatccagccacccagaacagtccctttctgaagacaagccagcaacaaggcacctgcaggcagttctggggactggggagggggcgctggctgcctcaggtgtcccctcccaagggctgaggccccccgagtatggatccgagctccctggtctttggtgctttcttgaaatcctcctggtggtggcagaacccagtggggaagagaggggggtcttgccgtgaagtccaggcccgtctgtcccaggatggacgtgtggtgctggctcagtgctgcctccatggcctgtctgtccatccattctgcctctggctcagggctggctccaggcccccgtctccctgtgtgtcggcttgttctggggtgggtgtttgctctgtctcagagctccccttcaggcctgggccgcgccctaagcctcctgggggaagaagccgagcttggccagtgacatctccttccgcaacctcatgatctcccagaacatgggctctgctgcaggcagagagagggtgaacaggtcggggacagctcagggtcacctcgggcagatggccaggtcccctcctgtggctttggacagagcagctggcacagcaccctagggtccccggcccccaaaacagatgacctcagtgagtggctggacctctctgaggctccactcttgagccttggaaactgctgagtgccgaccacacccgagggatctgtttgcactacactgacggccacccccacagcccgacgcagacaagcaggtacacgctgtcacatgccacagcggtggtccagacctgggaactacattagacaaggcacagatgcctccctggggtctcacaaggaccctgcgcagtgaggcggggaccacagcggccatccagggacctagcaggtgtcaacacccagcatgccttggccttggcctccaagaggacttgacccccaggatggagaggagatagctccttactcagagggtcgggccagactggttcaggagaagactcagcagcgagcaaaggttggtggaggagcggggagccaggccttgcagaatgggctgtggggggagggggtggagggaggccctgtccagcatggagtggagtgggagcaaaggctggaggtgggtgaccctgtgttcaggtgaccaggaggaggggccaccacctccagggccagggagagattcacaggggtggcccccttgtgcggggccgggagaggtttggggacaggagaaagaccagccggacggactcaggtacagagctcagcacccaggaagtttgtgaacgctttactaaaccacaaccctccccgctccccagcctcctagctgagtcttgcctccactaggggcaggtgggcccagagggcacttccccatccagccccactcccgtgtgcgatccctgcaccggccaccagggggcgctcaccgtcctgccgcaccaggccttgctggatgtagcggatgtaggtgaagaagttgcacactgcggtgatctgtgggcagaggtggggacggtgtgacctgccagccccacgctgggggtcccctgacaggcggatctgagtccagagcaggaggccccaggtccctgcagagccaggcagtgctccctgactcagctgggactgggctttcaagtagtaatcaacaacagcatgactagccctgctgtaatagcagcagcagcagcagcagccatttcatcaagcgcctgcagcgaacggagcagacgcgcttattattccatcttacatgggggaaagcggagccacccggggaaagccgctgacatccatcacggagatggcggagctaatgaaccagcatgcagcagagctgtgagatgaaccgggcaggctgtcccggagtctacactcgccctctcacaggccggcttgctccagatgctggagttttgggccagccaggcctcagtccagtgctactgataacactgggaaaggaaagggggtcagaagccgctcacctgggctgcccggggcccctggggcctcaggcctgctccatgccaggccccggggaccctgtgttggctcagacactgctatgaggactcacaccatggagagggtactgttggtgcctggcccagggccccttcccaggcccgggccccatctcccagctgctgagagtgggggcactaatggctcagaggtgcccccctctgtactcactcctcctgtagacctcagccgatgactgacttgtgtggagatagaaaggacagtccccttgcctcagggtggaatcaactctgctaagagcccggtggatggggctgaagctgggctgtagctaaggccacatcctggctggactcccccgtcccttccctcattctcctgggagctgcacacaatctccaggtgaggctctgcctcttcggaacccagcctaagacagggtggaaggtagccggcggctgtgcccgcccgcaacagcccctactgaatgtccaacactcctggggagggacatcaagtgagaggggcacccgcaggctggggagtggagaagcttcggggaggggcgggacggtggtggcctggcaaagatagggaggtgcgagagagcggggcgaggtcgggggaccagcccgtcgtggcagggacaccgctgcacagggagggttgaggagaggctgcggcaggagggtggggcagggcagagctcaggacaggagcagggacagtggatgcccacagaggctcatgagcagggagtagcagggagggggctttccctctccagggagtgtgctagggagaaaacacttctccctgtggaccccacatgtcttggtctttcagggcagggaccacatcctaaaacttcagaccctcctcacctcatctcccacccccagcttcatccagtgcagcaggacacccaggccagggacttaaagtgctagaggtgacattgttgagcacgggaacatcttttgtggggcctgctgttgagccatggttgggcctggaaagcggtgatggagataagtggccactgaacaaggctcagtgggcacaaatccacagggtaggggctgcagtggactcagagccaggatcccaggtctcggtgtgtggccctgaacacacccctttcctctgccaaggctcagcctcccttttggtaaatgggtgctcagcacaccgctgggaggactcacgctcggatgccttgtggagttcatcaaggacagtatagtctgctgccagcaaagggaccatttgtcccctttagacctgctcccccgcgaggagcctctagcaggcctgagatggttcctcaagctgtgtcactggaaacgtgtttccaaacatgttctcttgttcccctcaatcctcttaagagtcaacagagggacagaggaagaggaatccctgtcctcaatccccagcttggtgagaacccctgtcctggtctgggtcactcggcaggggagggtgggagctgggattcctagaggccccttggcactcacggccgacttaaggctggtgcaccagacgcaccgctgaaccttttccaaagcttcggccagcacctgagtctgggcgtcaggagccccgcactctaactggaactctagcatcactcctggattaggtgacattgaatgacagaggggggcgatgtcatcccatgacatttcatacataaggctgcatctcagccgactggagagtggccctcctgatggctctgaagtcagctgccctgtgcaacaaggccctgtggcaggggactgcgggtgtcctctagaagctgagggtgtccccttgccagcagccagcaagaaaataggggcctcagtccttcaaacacaaggaactgaatgctgccaacaatgtgagttttgaggaggaccctgacttccagaaaggaacacagtctgctgacagcttactgcgaccttgcaagtccctgagcagagaatccagtaagtaagtagtgcttagactccaacatggggaactgcgctattttaagctaccaggttgatagtaatttgttacaccgtaatagcaaaccactgcccttggcttggctgtgtggcccgagtcagtctctgcgcctctctgagcctgtaccctgctctgtaaatcaagatgtaaggctgggcgtggtggctcacacctataatcccagcactttgggaggccgaggcaggcagatcacttaaggccaggagttcgagttcagcctggccaacgtggtaaaaccccatctctactaaaaatacaaaattagctgggcgtggtggcacatgcctgtaatcccagctacttgggaagctgaggcaggagaattgctaatgtctgcctgggaggcagacattgcagtgaactgagattgtgccactgcactccagcctgggtgacaaagactctgtctcaaaaaataaataaataaaataagtaaatcaaggtgtagtgctattcatactcccaggcccagggcccagtgtcccagcacccaggtggccccaaaggagtcaagtaacgcttgcaaaggctgactcaccctggcccgggaagatggcgagatgtagtaatggcttttggagtccccgagccggattcggtggcggcaggtgcgggtcagcccgctcagggcacatgtgctaggggaaagcaaaatgggtcacgggggctggctggggcttgcccctctccctcacccctgcatacagggaagatgcagcagctgagaggatgcatggggaggggcaggcctcccttcccccacccggcttccaaaggaacccagagccaggcagagaagggagctggccccagccatccctgggacagacctcgaactaagctgagctgtacccctagaacccttgttttgcccctactgggcaagagagcttggttaatctcatgccaggtgtacaaagtcccaccctctgcaggctctgcatatgcctctccctctacttctggggactcagaccaggcactcctcccccaactaggccagagttgaggtctggctgcctcccgcttcccaacatccagcagctcccctgcttcatccatgcaggccttctgaccccactaacccccatggttctcagccgcatgccaaccaaccccgtctaagagccttctcccatgccctcttctctcctccccccagtcctgcatgacgtcgctcagcatcttcagccacccacatgaagggtctccacaggccctgagcaacccccatctgggccccactccccaaacctgctcttcactggccatcatctgctcggctctctcctcctcaccctctgcttggtcaccaagtccccaggccagggcacagcagcaggacttttggcctgcatccccttggctccttctggccagctctctgcctcatcgctctctttcttctccacatcagagccagggctcctccaaaaacccacatctaacccatcatctttctctcttgctttcctaattcccaagaaatggggagaatcccaaataaatgaaggtttaaaaagctccttggctgcggacttatcagagcatttgttgcctcctggttcactgggactctctgatggaccagagagcctcttttcaggtggcagctattgatgacttttttttttttttgagacagggtctcactctgtcacccagactggagtgcagtggtgcaatctcagctcaccacaacctccgtctcccaggctcaagcaattctcctgactcagcctcccgagcagctgagattacaggcgtgtgccaccacacctggctaacttttatatctttagtagagatggggttttctccatgttggccaggttggtctcaaactcctgacctcaagtgatccacccgcctcaacctcccagagtgctgggattacaggtgtgagccactgcacccggcctattgatgacttttgccgcactggctggtgggttaaagcccaaacctgtgaaggctctttatactctggccccaacagcctctgcagcctccaccccaattccctgtccccccactgcttagccagatgccccagtggtgcttccgttaatactccagcttctcacacctttgcacattccgttccctctgcctgaaatgcccttccctgcttggcaaacttctattcatccttcaaaacctggctcaaatgctccctctccgtgatgagcctcccaccagggcaccagccatccccagccaggctcttggctgccaaggtgaaatcctccccaatttctgccccttgctccaccctggctattttgttctgctgctcccctgctcaatgccaggtgagtagctggaggacaaatgccagggctactgcgtcgttatttattggcaggggcacagccagcaactgataatcatggttcaagaaaagaaggggagggcacagagcagaccagtcaggaagaggcagaccctagctcccggcctctctggaaagcctgggggtccacaggaaacctgccaaactgcctccttgccctgtgggggcagcaactgtccctgtcctgtcggcgctgctgcatcctgaccacccctcggcacagtgaacacacggcttggcggggctttcccacatgggcaggaaggagctaagaccctcagcttacttggtgctgctacagtcaacctcggccaccttcactgtgggcagcgtctgcgaagccaccggctcaatggtgagcgtgttgtcctccacggcggcccgtaccagcaccgagagctgtggcagaccagggaggcaggcagggtggtaaggggctgggccctggcggaggggtgtgtcccccagctggccccgcccctgccatgcctcacctcctgcatcgtgaagtccaggcaggggcccacgtcctcccggtacaccctttccaggaaggggcaggtcttgtccagggtgggggattccctccaggcctggaactctgcaaacaggattgtgtccacctgtgggggagggcaagcgagggtgggggcggtcagggtactggggccagcatagaagatgcaggctgagctgaaggggagcgagggaggacgtggggcaggcccagcaagccagcaggtcgatccccagcagccgtgcagggaagccaagtccagcagcagcagagctcccttctgccctttgcaccaaagaatttagaactaaaagttttgtttccaggccggtgttaaatttcttggcgctactggattttagagtggggtgcagggctttgtcctgaagaccctcagtgcctccttgaggaggaaaagtcaaagagcaactagcaggaggccacaggtaccagcaggtacacaagcacacacaagcacgtgcacacaggaggggacacacacaggctgccctgggcccacacctcagaggtgactgctggcctgctccaggccacatgcagaatgagggaggctgggagggggcaaagtgggaggcccctctttggagccatttacctgtcgggaaaaggagggagagggagtggaggcaggggctgggggctccccaggtgggagcggccaggccggctcgtaggtgaggtgaaccgccttgctggggaccacgcagaggagcagggagagcagcggggccagcccgggctgggccggatggacagacagacagacagacagacaggtagacaggtgcacagagacagaacaggaggaaggggagaagttaatgtacattcagaagctcagagctcaggaggtggatgagggcctgctcgtcttccctggaggccctggagacagaggtggaagccaggatggagtcgagtgggctggcgccagggacccaggaagctgaaggcaccacagccctctgaggcactacctgggtgcagccttgaactcagctcttgatgtccctgtctctggttcctccagcagccccgggaggccccatttatcaggtgagaaagctgaggtgctgacaggtggcctcatttgcctacagacccatgaccatgagtgtcagcccagcctgggcccagcaactggtgtggccagctgaggtgggacggagacacctctccaaaggccacgcttgtctcagccccacagtcagagggtgccagaaaccccttgagcacagggctgtcaccaggtggtcctggggctcgaggctgtggccacacggggtccaggcagcctctcccctgaggcccagtggctgctgcttggcctcttaaggccaaggaagtgtgtgtctcagtggaggccccagatcctcagggccaaagccagcctcaggtgcagagaccactacctactgcttggagtcagtggggcagggagggggcctcaggtccccagatggtataccctggaggctgcaggccaagtgcctcagatcacaggaggttggagagaaaggacctgcccagccctcacatcccagagaggcgcaggacaggctccaggtcacacagcatggggcaggctggtcctcactgggctcggaccctgcctaccgcaggcactgccacccttccccgtgcccagagcccgcttcccaccctcacctccttgccctctctgtctggggtgagggtgtgtcccgcagcgggacacacggcggggcagagggtgctgctggtgctcttgtggcgagagtggccctttcggggcccggccttggtggggctcagcagctgggggtgaagctcgcggttgggagaggctggtgtggacgtgatgaccagcgtcttcaaggctgtcacctctgcctgcagcatgtcgatctgcatgggatgggatggctgtcaaccctcacccagactggatgccatcctggctgccaccgcctatcagcctaactcaggacaatgcacccctgcagtgacaggcacttagtcccacccgacgccctcagaacagccttcgaggcagagacccagacactcgttttacacatagggaaactgaggctcacagaggcgacatggcctgcccaaggtcactctgtgagcaggattctgttaggaacaagtgtctgggagctggctgggcctcccatgagagttctgggaccgcccccaggagccaggaaaggcccaggcctcacattttgcagatgggcaaccaggcttggagagaggaagcgacttgcccaggctcagacagccatactgagtgaggtttctgctttgtaaagtggggctgggaggagagggaagaaggtacaataatcacagggtcctcccagccccagcactatcccagaaaaggctctgccatgcagcagaatcactgatggagccccgggacactgggccctgtgatctcagacccccacccttcccttccctccctgggcctaggttcacccattcctgctggccccaccgggccaggtgagcgtccactcgggcagcaaagctcagtgctcgctgagccgggaggcagggggggtgcctgggctggcctgggcaggcggggatgggcctcaccttgccccgagcctccttcagctgcttttctg

SEQ ID NO: 1483 - DNA, 10129 bp, Homo sapiens
gcctgtaccaacaaagcctgcctttattaaatagagatcgcgttacattccatccaaagaaggaaatccggacgtggtgagggatgcgtccaggtgggagctccgaacgctggtcctgagtgggctctgatgggtgggagggcccaggtcctgcctgcccacccaggccccacatgccagggcgcgtgtctgcatggccacccacagctgaaaacaggcgtgggtgatctgaagccctgtctgtgttctactgtggcagaaagtgccccagtccttccagcggttttgggagcagggcctccaggagcacagggctgagacggggtgggagggaaggtgacaagggaggcctttgtgaagggggagggaggaagggggaaaggaagggaggaagcgggggaggggtcttgactcatcttaacaaggctttggggcaattctgtgctatggaggccctgccagcccctcctagtagtccaatagggaggccaccgggaacaaggcacaggatggccacaagggggtgctgctggcccagggcttggcagctggggtggagggtaccctggagatccagccacccagaacagtccctttctgaagacaagccagcaacaaggcacctgcaggcagttctggggactggggagggggcgctggctgcctcaggtgtcccctcccaagggctgaggccccccgagtatggatccgagctccctggtctttggtgctttcttgaaatcctcctggtggtggcagaacccagtggggaagagaggggggtcttgccgtgaagtccaggcccgtctgtcccaggatggacgtgtggtgctggctcagtgctgcctccatggcctgtctgtccatccattctgcctctggctcagggctggctccaggcccccgtctccctgtgtgtcggcttgttctggggtgggtgtttgctctgtctcagagctccccttcaggcctgggccgcgccctaagcctcctgggggaagaagccgagcttggccagtgacatctccttccgcaacctcatgatctcccagaacatgggctctgctgcaggcagagagagggtgaacaggtcggggacagctcagggtcacctcgggcagatggccaggtcccctcctgtggctttggacagagcagctggcacagcaccctagggtccccggcccccaaaacagatgacctcagtgagtggctggacctctctgaggctccactcttgagccttggaaactgctgagtgccgaccacacccgagggatctgtttgcactacactgacggccacccccacagcccgacgcagacaagcaggtacacgctgtcacatgccacagcggtggtccagacctgggaactacattagacaaggcacagatgcctccctggggtctcacaaggaccctgcgcagtgaggcggggaccacagcggccatccagggacctagcaggtgtcaacacccagcatgccttggccttggcctccaagaggacttgacccccaggatggagaggagatagctccttactcagagggtcgggccagactggttcaggagaagactcagcagcgagcaaaggttggtggaggagcggggagccaggccttgcagaatgggctgtggggggagggggtggagggaggccctgtccagcatggagtggagtgggagcaaaggctggaggtgggtgaccctgtgttcaggtgaccaggaggaggggccaccacctccagggccagggagagattcacaggggtggcccccttgtgcggggccgggagaggtttggggacaggagaaagaccagccggacggactcaggtacagagctcagcacccaggaagtttgtgaacgctttactaaaccacaaccctccccgctccccagcctcctagctgagtcttgcctccactaggggcaggtgggcccagagggcacttccccatccagccccactcccgtgtgcgatccctgcaccggccaccagggggcgctcaccgtcctgccgcaccaggccttgctggatgtagcggatgtaggtgaagaagttgcacactgcggtgatctgtgggcagaggtggggacggtgtgacctgccagccccacgctgggggtcccctgacaggcggatctgagtccagagcaggaggccccaggtccctgcagagccaggcagtgctccctgactcagctgggactgggctttcaagtagtaatcaacaacagcatgactagccctgctgtaatagcagcagcagcagcagcagccatttcatcaagcgcctgcagcgaacggagcagacgcgcttattattccatcttacatgggggaaagcggagccacccggggaaagccgctgacatccatcacggagatggcggagctaatgaaccagcatgcagcagagctgtgagatgaaccgggcaggctgtcccggagtctacactcgccctctcacaggccggcttgctccagatgctggagttttgggccagccaggcctcagtccagtgctactgataacactgggaaaggaaagggggtcagaagccgctcacctgggctgcccggggcccctggggcctcaggcctgctccatgccaggccccggggaccctgtgttggctcagacactgctatgaggactcacaccatggagagggtactgttggtgcctggcccagggccccttcccaggcccgggccccatctcccagctgctgagagtgggggcactaatggctcagaggtgcccccctctgtactcactcctcctgtagacctcagccgatgactgacttgtgtggagatagaaaggacagtccccttgcctcagggtggaatcaactctgctaagagcccggtggatggggctgaagctgggctgtagctaaggccacatcctggctggactcccccgtcccttccctcattctcctgggagctgcacacaatctccaggtgaggctctgcctcttcggaacccagcctaagacagggtggaaggtagccggcggctgtgcccgcccgcaacagcccctactgaatgtccaacactcctggggagggacatcaagtgagaggggcacccgcaggctggggagtggagaagcttcggggaggggcgggacggtggtggcctggcaaagatagggaggtgcgagagagcggggcgaggtcgggggaccagcccgtcgtggcagggacaccgctgcacagggagggttgaggagaggctgcggcaggagggtggggcagggcagagctcaggacaggagcagggacagtggatgcccacagaggctcatgagcagggagtagcagggagggggctttccctctccagggagtgtgctagggagaaaacacttctccctgtggaccccacatgtcttggtctttcagggcagggaccacatcctaaaacttcagaccctcctcacctcatctcccacccccagcttcatccagtgcagcaggacacccaggccagggacttaaagtgctagaggtgacattgttgagcacgggaacatcttttgtggggcctgctgttgagccatggttgggcctggaaagcggtgatggagataagtggccactgaacaaggctcagtgggcacaaatccacagggtaggggctgcagtggactcagagccaggatcccaggtctcggtgtgtggccctgaacacacccctttcctctgccaaggctcagcctcccttttggtaaatgggtgctcagcacaccgctgggaggactcacgctcggatgccttgtggagttcatcaaggacagtatagtctgctgccagcaaagggaccatttgtcccctttagacctgctcccccgcgaggagcctctagcaggcctgagatggttcctcaagctgtgtcactggaaacgtgtttccaaacatgttctcttgttcccctcaatcctcttaagagtcaacagagggacagaggaagaggaatccctgtcctcaatccccagcttggtgagaacccctgtcctggtctgggtcactcggcaggggagggtgggagctgggattcctagaggccccttggcactcacggccgacttaaggctggtgcaccagacgcaccgctgaaccttttccaaagcttcggccagcacctgagtctgggcgtcaggagccccgcactctaactggaactctagcatcactcctggattaggtgacattgaatgacagaggggggcgatgtcatcccatgacatttcatacataaggctgcatctcagccgactggagagtggccctcctgatggctctgaagtcagctgccctgtgcaacaaggccctgtggcaggggactgcgggtgtcctctagaagctgagggtgtccccttgccagcagccagcaagaaaataggggcctcagtccttcaaacacaaggaactgaatgctgccaacaatgtgagttttgaggaggaccctgacttccagaaaggaacacagtctgctgacagcttactgcgaccttgcaagtccctgagcagagaatccagtaagtaagtagtgcttagactccaacatggggaactgcgctattttaagctaccaggttgatagtaatttgttacaccgtaatagcaaaccactgcccttggcttggctgtgtggcccgagtcagtctctgcgcctctctgagcctgtaccctgctctgtaaatcaagatgtaaggctgggcgtggtggctcacacctataatcccagcactttgggaggccgaggcaggcagatcacttaaggccaggagttcgagttcagcctggccaacgtggtaaaaccccatctctactaaaaatacaaaattagctgggcgtggtggcacatgcctgtaatcccagctacttgggaagctgaggcaggagaattgctaatgtctgcctgggaggcagacattgcagtgaactgagattgtgccactgcactccagcctgggtgacaaagactctgtctcaaaaaataaataaataaaataagtaaatcaaggtgtagtgctattcatactcccaggcccagggcccagtgtcccagcacccaggtggccccaaaggagtcaagtaacgcttgcaaaggctgactcaccctggcccgggaagatggcgagatgtagtaatggcttttggagtccccgagccggattcggtggcggcaggtgcgggtcagcccgctcagggcacatgtgctaggggaaagcaaaatgggtcacgggggctggctggggcttgcccctctccctcacccctgcatacagggaagatgcagcagctgagaggatgcatggggaggggcaggcctcccttcccccacccggcttccaaaggaacccagagccaggcagagaagggagctggccccagccatccctgggacagacctcgaactaagctgagctgtacccctagaacccttgttttgcccctactgggcaagagagcttggttaatctcatgccaggtgtacaaagtcccaccctctgcaggctctgcatatgcctctccctctacttctggggactcagaccaggcactcctcccccaactaggccagagttgaggtctggctgcctcccgcttcccaacatccagcagctcccctgcttcatccatgcaggccttctgaccccactaacccccatggttctcagccgcatgccaaccaaccccgtctaagagccttctcccatgccctcttctctcctccccccagtcctgcatgacgtcgctcagcatcttcagccacccacatgaagggtctccacaggccctgagcaacccccatctgggccccactccccaaacctgctcttcactggccatcatctgctcggctctctcctcctcaccctctgcttggtcaccaagtccccaggccagggcacagcagcaggacttttggcctgcatccccttggctccttctggccagctctctgcctcatcgctctctttcttctccacatcagagccagggctcctccaaaaacccacatctaacccatcatctttctctcttgctttcctaattcccaagaaatggggagaatcccaaataaatgaaggtttaaaaagctccttggctgcggacttatcagagcatttgttgcctcctggttcactgggactctctgatggaccagagagcctcttttcaggtggcagctattgatgacttttttttttttttgagacagggtctcactctgtcacccagactggagtgcagtggtgcaatctcagctcaccacaacctccgtctcccaggctcaagcaattctcctgactcagcctcccgagcagctgagattacaggcgtgtgccaccacacccggctaacttttatatctttagtagagatggggttttctccatgttggccaggttggtctcaaactcctgacctcaagtgatccacccgcctcaacctcccagagtgctgggattacaggtgtgagccactgcacccggcctattgatgacttttgccgcactggctggtgggttaaagcccaaacctgtgaaggctctttatactctggccccaacagcctctgcagcctccaccccaattccctgtccccccactgcttagccagatgccccagtggtgcttccgttaatactccagcttctcacacctttgcacattccgttccctctgcctgaaatgcccttccctgcttggcaaacttctattcatccttcaaaacctggctcaaatgctccctctccgtgatgagcctcccaccagggcaccagccatccccagccaggctcttggctgccaaggtgaaatcctccccaatttctgccccttgctccaccctggctattttgttctgctgctcccctgctcaatgccaggtgagtagctggaggacaaatgccagggctactgcgtcgttatttattggcaggggcacagccagcaactgataatcatggttcaagaaaagaaggggagggcacagagcagaccagtcaggaagaggcagaccctagctcccggcctctctggaaagcctgggggtccacaggaaacctgccaaactgcctccttgccctgtgggggcagcaactgtccctgtcctgtcggcgctgctgcatcctgaccacccctcggcacagtgaacacacggcttggcggggctttcccacatgggcaggaaggagctaagaccctcagcttacttggtgctgctacagtcaacctcggccaccttcactgtgggcagcgtctgcgaagccaccggctcaatggtgagcgtgttgtcctccacggcggcccgtaccagcaccgagagctgtggcagaccagggaggcaggcagggtggtaaggggctgggccctggcggaggggtgtgtcccccagctggccccgcccctgccatgcctcacctcctgcatcgtgaagtccaggcaggggcccacgtcctcccggtacaccctttccaggaaggggcaggtcttgtccagggtgggggattccctccaggcctggaactctgcaaacaggattgtgtccacctgtgggggagggcaagcgagggtgggggcggtcagggtactggggccagcatagaagatgcaggctgagctgaaggggagcgagggaggacgtggggcaggcccagcaagccagcaggtcgatccccagcagccgtgcagggaagccaagtccagcagcagcagagctcccttctgccctttgcaccaaagaatttagaactaaaagttttgtttccaggccggtgttaaatttcttggcgctactggattttagagtggggtgcagggctttgtcctgaagaccctcagtgcctccttgaggaggaaaagtcaaagagcaactagcaggaggccacaggtaccagcaggtacacaagcacacacaagcacgtgcacacaggaggggacacacacaggctgccctgggcccacacctcagaggtgactgctggcctgctccaggccacatgcagaatgagggaggctgggagggggcaaagtgggaggcccctctttggagccatttacctgtcgggaaaaggagggagagggagtggaggcaggggctgggggctccccaggtgggagcggccaggccggctcgtaggtgaggtgaaccgccttgctggggaccacgcagaggagcagggagagcagcggggccagcccgggctgggccggatggacagacagacagacagacagacaggtagacaggtgcacagagacagaacaggaggaaggggagaagttaatgtacattcagaagctcagagctcaggaggtggatgagggcctgctcgtcttccctggaggccctggagacagaggtggaagccaggatggagtcgagtgggctggcgccagggacccaggaagctgaaggcaccacagccctctgaggcactacctgggtgcagccttgaactcagctcttgatgtccctgtctctggttcctccagcagccccgggaggccccatttatcaggtgagaaagctgaggtgctgacaggtggcctcatttgcctacagacccatgaccatgagtgtcagcccagcctgggcccagcaactggtgtggccagctgaggtgggacggagacacctctccaaaggccacgcttgtctcagccccacagtcagagggtgccagaaaccccttgagcacagggctgtcaccaggtggtcctggggctcgaggctgtggccacacggggtccaggcagcctctcccctgaggcccagtggctgctgcttggcctcttaaggccaaggaagtgtgtgtctcagtggaggccccagatcctcagggccaaagccagcctcaggtgcagagaccactacctactgcttggagtcagtggggcagggagggggcctcaggtccccagatggtataccctggaggctgcaggccaagtgcctcagatcacaggaggttggagagaaaggacctgcccagccctcacatcccagagaggcgcaggacaggctccaggtcacacagcatggggcaggctggtcctcactgggctcggaccctgcctaccgcaggcactgccacccttccccgtgcccagagcccgcttcccaccctcacctccttgccctctctgtctggggtgagggtgtgtcccgcagcgggacacacggcggggcagagggtgctgctggtgctcttgtggcgagagtggccctttcggggcccggccttggtggggctcagcagctgggggtgaagctcgcggttgggagaggctggtgtggacgtgatgaccagcgtcttcaaggctgtcacctctgcctgcagcatgtcgatctgcatgggatgggatggctgtcaaccctcacccagactggatgccatcctggctgccaccgcctatcagcctaactcaggacaatgcacccctgcagtgacaggcacttagtcccacccgacgccctcagaacagccttcgaggcagagacccagacactcgttttacacatagggaaactgaggctcacagaggcgacatggcctgcccaaggtcactctgtgagcaggattctgttaggaacaagtgtctgggagctggctgggcctcccatgagagttctgggaccgcccccaggagccaggaaaggcccaggcctcacattttgcagatgggcaaccaggcttggagagaggaagcgacttgcccaggctcagacagccatactgagtgaggtttctgctttgtaaagtggggctgggaggagagggaagaaggtacaataatcacagggtcctcccagccccagcactatcccagaaaaggctctgccatgcagcagaatcactgatggagccccgggacactgggccctgtgatctcagacccccacccttcccttccctccctgggcctaggttcacccattcctgctggccccaccgggccaggtgagcgtccactcgggcagcaaagctcagtgctcgctgagccgggaggcagggggggtgcctgggctggcctgggcaggcggggatgggcctcaccttgccccgagcctccttcagctgcttttctg

SEQ ID NO: 1484 - DNA, 241 bp, Homo sapiens
catcctcctttgcctgcctgctttcctctcttccatctgatgccctgtgcgtgttcctggtatgtttttgattgccagtcttccccctggacattctcagctcaagcacaggtgtccccagcatgggtggagggcttcctgtggtcctggccagtccacagctagcctgacctaccagctgagtggcaccaaggcctcaggccaatacggaagtccccacaaggtgtcaccagcccagtag

SEQ ID NO: 1485 - DNA, 241 bp, Homo sapiens; identical to SEQ ID NO: 1484

SEQ ID NO: 1486 - DNA, 241 bp, Homo sapiens; identical to SEQ ID NO: 1484

SEQ ID NO: 1487 - DNA, 5815 bp, Homo sapiens
ttgtttttttttttgttttttttttttttttttttgagacggagtctcgctctgtcgcccaggctggagtgcagtggcgggatctcggctcactgcaagctccgcctcccgggttcacgccattctcctgcctcagcctcccaagtagctgggactacaggcgcccgccactacgcccggctaattttttgtatttttagtagagacggggtttcaccgttttagccgggatggtctcgatctcctgacctcgtgatccacccgcctcggcctcccaaagtgctgcgattacaggcgtgagccaccgcgcccggccgcatgtaggtagttgttaaaaccatagggaagaactcaccccaggaaaaatacatagagaaggactgaatggaaccgtaagcactcaaagtatggtctacctctgcttgcctcagaatcatctgggggagctgttaaaaatagatgcctcattgtgaaatgtacttaatatcacaaaattgtatacttttaaaaaaattatcaatttatcttttaattttttaatccaatttttgatgggatttccacgttctgaaaaactgtacttaaaaacggttaaaatggtaaattttatgtatatattacaatagaagaatgcaaaaacaaacaaacaaaaaaacagaaaatagattcctaagccccattccagacctgaattactaaggttttgcccaaaggcaggcctagcaagtccagaagcctgaagaaaccaggtaggattcagagagcccaggaactgacatattttaagactagcctagtctgatctttataaataatccccaaaagcagccctctccataacccataaccaggaccacttttcctaggccatctcaatccagatatcctagctcatcactccacagattcattctcctcaagatttgttccaaacaatggggaacagatactgattctttcaattatgtgccttggacattttaccaaaagctcctgccaggttttgcggctgcctgattgttaaggaattaaggagaatgaacataattctcaatataaaaccctttcaatatctttcttggtcttcttgccctcccatctcactgcttctggaaacttaatctgttcttttctttccctttttctatcagtgattcagggattggatgagtctctatggtttgttttgccctgaagagcagaaggcttctgtcccaactggtgttgccaaagcaacatattaattccatgccatgatcctgggtcaagatctgcacaatctgattgggcatgtcacctcggatggcaagggagtggaagtggtcaaaatcatggagtcccagctttcggagacgccttgcagctgcccggtaacacttccagggttggggctccacaaggaggtagtggcagagggaggaaagatgggccaggaactcccataggccatggtctccatgattcagatgaatccacatggttattgacatgcagaagccaatgtcaaaaactgaacgtccaaattggcttaagaaagagctcaagagaaccttccgggtcctttgattcatgaagtccagggtgataaaagtcaaggcatcaggaaaaggacattctttttcggctcgcttcaccaggactggatctatgtcgcagcagaggagacggaattctcttgaggcatctgagcaggtttccccgtcaggtagggagaggaagtgtttgtatagagccacactcagatcctagaggaatccaaaacagctttgtcactgcagttctcaatcagtgaatggaagagaaatctgtatcattctcccactgagaatgccacttacctctggctgtataggatgtgaggttcctaaaccataacctaaagaggttgtgcaaaaattttctacagagtaggctctcagtgccctccaggggtcacatgctgtaatgcatcatccccatattttcctgacactgatgatagattgggttgtatagctgaaagttacagccaaatggatgcagcaaaggaacctacagcagtatttcccagcttaagtaatatgctgataaactcactctttttctgggtatctcaagaccccagggcggaagaaaggggtccagaggcataaccagtgtctcttaccaggaaagtgaggaatacagcaagcacaatcttacaaaaacctgcttctcagacccgcggtgggggaagtctggattccaaagtcctcattcagccttcactaaagcttcaattttactgtcttaggattcaccacctccttctgagacattctgcttctataaccatcattgctaaaagtcactgctaacaaccttctagacaagtccaatgatttgtgatttttaccacattagcaccttttttactcttaagtcaccatctcctttctctaactttgaattctttttttttttgagacaaagtctggttctgtcggccaggctggagtgcaatggcgtgatctcagcaacctctgcctcccaggttcaagcgattctcctgcctcagcctcctaagtagctgggattacaggcatgcatcaccacactcagctaatttttgtatttttattagagacagggtttcaccatgttggccaggctgtctttaactgacctcaagtgatccacctgcctcgcctcccaaagtgctgggactatagaatgagccactgcacctggcctcttgatctctataaccattataactaactcaaatttgtgtttttccacatagtattttcaaggcatttttctgtttactactttgtttgcttggtgtaacaagcatgtgaggaaaatatttatttatgccttttctgcaggtgaagaaaatgcacaatggaaaccacccagatgtccagtgatagtggcatggacaaataaatgtggtataatcatgaagatagaatactaaatagcagttaaaaaatgaaggcacccagcttggtgcacaacatggatgattctcacaaatacataatgttgagaaaaaaagcaagccataacagaaaatatatgaaaagcatccatttacatgaagctcaaaaatgggtgaaattaaagtacatcattcagggaagaaaaacagtacactataaagaaaagcaaggaaacaacagaaggctagttgttacctctgggtagagatagaggtttatgaacaggaaaaggcatataggggaagttgtggggtgctgaaaatgtgtattatttatttatttatttatttttgagacaggatcttactctgtttcccaggctggagtacagtggtgtgatcactgcaaccttgacttcccaggctccagagatcctcctacttcagccttatgagtagctggaaccacaggtgcacaccaccatgcccagctaatttttgtatttttggtagggatgagattttgccatgttgcccaggctgatctcaaactcccgagctcaagcaatccaccagcgtcagtctctgaaaatgctgggattacagcgtcagccactgcacccagcagttttttgggttttttgttgttgttttatttgagacagggtctccttcgtcacccaggctggggtatgtggcacaatcaaggctcactgcagcctcgacctcctgggttcaagcgatcctcctccctcagctctctaagtagctgggactacagatgcccaccaccacacctggctaattttttttagagatggggttttgccatgttgcccaggctgggaaaggagtttttaaaattgaaaaaaaaaagcacccataaattatggtacatctatccaatgaaacattaggaagctgctaaaaaaagaatgtggtgatataaataatctcagaattaaaagctactaatagtgtgttaccatttgtaaaactaaaaggggggtacttatatgtacgtaaatgctggtatacacacaagactgatacctaagaaattataaacagtagtgccactgtgtgggggaaaaggaggatttagggttgggagtagagacttactttttagtatatacccctttgtagtttgaatttttttgttttatcaagcgcaagcattttttttccctttcctgactacaaagatccacaagaaaaagcattttttaaaaactgcaaaacagaaagctccataaacgtacagccaggtttgggaaccactaccctagttagctgccaactatgtctttacctctcatgtgtatactactctcaactttaaaatctctggtggtttcctaatgcctttcgtgaaatcccaagccttaacctcagtctctcttttccattgtttttaccctctgacttcccgtatcatcacagcggagaaattttgcaggggacacaggacatcaacccatctcctcattccagtctttgagactgtatccaaatgtccccttcctactatcatctgagtcccacaaggtctgaagtcgtcccccaaagtctcttctgtaaaaggacagcaacgtaacagaattgtcccccgccctccagatgctggactggagtgatggagggagcgcagagagggtactaacttttgaagcatttgccgtggtaagttcagactgcctgctagtgtagaatatcccagtggctacaaataggtgtgggagagacatttccttattttgcatgtggtttgattataatcatatgcctaagaatagtttgcagcaagaagagtggcagtgccgcccttctccattcccttgggcaaaatgctttatttgcttctcgatcctctccactgtactctgtcaactcactgttttgttttgtttttgagacggagtctcgctctgtcgcccaggctggagtgcagtggcactagctcggctcactgcaagctccgcctcccgggttcacgccattctcctgcctcagcctccggagtagctggactacaggcgcccgccaccacgaccggctaattttttgtatttttagtagagacggggtttcaccgtgttagccaggatggtctcgatctcgtgaccttgtgatccacccgcctcggcctccgaaagtgctgggattacaggcgtgagccagcgcgcccggcctactcactttttttgaaataaacatgcaggtcccagggtctgtcctgcactgtatagcacacatgagtctcaatatcaggcatgattctgtcacccttggctcttctctcccagtaaaccaaacctaaccccatgttcccaaacgtgtgtctctggaagccccctctccccagccaaagcgccaggcacgctggacagaggccaccctagatacaaggaccgttcccacctggggtctggccctgaaagaaaagtgggaacgtagtcgacaaggactcctctccaagagagattcctaagacagatggtggaaccctggcgggcaggcagcagcggcactggctcagtcaaagccacgctttatactcgttttgggaaagtttcgatgggtgttagccaggccagaaccacagtggatgtgtaggcagccaaccacttggctccggatgctccaatccctcccctgtcactcaccccggagttacaccccacgtcgagccccagaatcggcccgttctcgggactctcaggaaagagctgtcgaagcagctccgggggcaggaggcgagccgttgctccggagggtggaagcgagaataatgaggaaaatttccgaacggggcggcgccaggtgccagaactcgcgattcctcttccgctgcggtctccttaacactccctccatccagttccgtgggcaccgccattagcc

SEQ ID NO: 1488 - DNA, 477 bp, Homo sapiens
tagtggtttaaaatactgatttattctcttacagctctggagattaaatctgaaatcaaggtgttggcagggctgttccttctggaggcttcaggggagaatacattttcttgctttttctaacttctagaagccacctgcattccttgacttgcagcccttcttcatatcactccaacctcttgcttttgtcattacatctcctactgtggtcagctctccctctgcctccctattataagaacactgatgattgcacttagggtatattctgatcatccagattaatctccctatctgaagatcctcaatctcatttgcaaagccccttttgctaaaggaggtggacatcttgggggaccattattcatcctaccacagccccatgtatgtttctgtgcgctgccttggtggagtgagaggagagagcacccagcagggttacagggtttcaaagtgttcctaaattaagatctt

SEQ ID NO: 1489 - DNA, 12989 bp, Homo sapiens
ctaccccagtgcctcgcccttgtgctgcattcccttagccccctcctcatgagttttgtctgtgagccgcctctctgggcttcctgcaggtacatggagttcttccccatcccttccaacaccacctccgacttctactttgagaaaagcgccaactactttgattcagaagtggcgccccggcgggcagcagccctcttgcccaaagccaaggtcctgaccatcctcatcaaccccgcggaccgggcctattcctggtaccaggtgagtggggctggggtggagtccctgtgtcgggaacacagggctccgtctgacactcagttactcactcactcaacagatattattagtaagcacctactgtgtgccagccctgagccaggcgcctggagcgtggtgatggctgagaatagagtccttggtggaggagacaggcggaaatggaaagccagccaccagttgactgtccacctgcctagtgtcatgcggggtcctgcctctacttctgacactgacaagaggtggaggctggttacgcctagaggaagcttagatttggtgaacagcaatgcaggatcatactgactatagcttcctcgctggacacgggtgggagtgggagctcatggaaggacaagacacaagactgccattcacagtggagaaggcaggcacctgaccaagtgaggcagttacctgggctgtgatacatggagagggtgtggatccaagcccctatctggggcatgtatgaaccagagctgtcttttttttttttttttttttttttgagacagagtcttgctctgtatcccaggctggagtgcagtggcctgatctcaactcactgcaacatccgccttccagtttgaagtgattctcctgcctcagcctcccaagtagctggtattacaggtgtgcaccaccacgccaggctaatttttgtatttttagtagagacagggtttcaccatgttggccaggctggtctcaaactcctgacctcgtgatcttcccgcctcggcctctcaaagtgctggcattacaggcatgagccactgcgcccagctgaaccagagctctctttaatgcctatggcctgacttaatttcctgcctgccagcccactgagcctgcaggaatgcttttaggccttccctggtggggtaggcggagtccctcccctggctgccagcattcctgtgattatgccacacagccaagcactgtgattcagaagtggcgccccagcagaaagccaccctgttgtccaggccgaggtcctgagcatcctcgttaacccagcagaccaggcctgtgcttggtgttggggagggggtggggccctgggtcttagcccatggttgccagagaagtgtcccctgtcctggctgggacagcctcttcaggcctggccactgtcatagttcccaccctgctttgaggctcttttctcagatgtgacagtggctgtctcccgcctgggaccttgcggtctcccgcagggctggcacctgcctcctctttgctcccatggaagtctctcctcctgccactctctgaggctggtgaggaagccccttcttactcttgttctctagggcttctgtttatgccctgatgtctgctttcctgtggctttttctttaggagaagaaaaccgagaaacacttgtcaagtgtttctgttttctgccgtgctgtgtgcccccgcctcctggcgctgtgcagggaatgggcagtctgctttcatgggggaacgtagggtagagagagagccgccacaggttgggtcagtccctgttctgcactgacactgctgtacatctgcaccttactggagagtcacagctggtttctagaaggcagaggaggggtttcacgtttgtgtccccttctcaaagattagaaaaccaagtttcagcaagtttcatgtggtggcatttgaatccaagtcttctaaatctaagaccctattcctttttctgtccatgatcaagaggggtaagggatagaaggagaagggagactcattctccccaggaggacctgggaagatgttggaggagaggaagggtgggggcctgtctcagaaggaggtcgggacgaggaggacgctgctgtgcaccatattgccccagccctgggctgtgtgtgatcctcaggggagggggttggcggctgggggatagtgcctgtcgcacaggtgcccgagctctggctttctggacttagtgaattctgcagattcggacctcccatggcattattttaagtgattcagaccagccagtctcccttttatagttctttcccagtccttctgatttccataaaggagaaatgctcactttagtgcaagtggtcttacgtcctttctaacactgtcaacctctgctttcaacaaagagagcatgttcagggcctgttgcacacatttgtgtctggctggagtttgagaacattgtttttattgccatttgtgagtggttgccttctatatatgacaacagtgcagcagcgtgatcttggctcactgcaacctccaccccccgggtttaagcgattctcgtgcctcagccttccgagtagctgggaccacaggtgtgcaccaccatgccagctaatttttgtatttttagtagagacggggtttcgccacattggccagctggtctcgaactcctgacctcaagtgatccacccaccccagcctcccaaaattctgggattacaggcatgagccaccatgcctggcatcaggaaaccctgatttcgtccagttcccgtatttcaaagatggagaagttggggctctgggaccagtggcttcccttgacactggacacagtgagaggcagagccaggactcagacccagagctcctgggtccagctgaggatcttctggccaccttgcgggctgctgtccctctcaggccacttcctttgtgtcctccaagtggcatgctgaccctctttccttgcctgcagcaccagcgagcccatgacgacccagtggccctaaagtacaccttccatgaggtgattaccgccggctctgacgcatcctcgaagctgcgtgccctccagaaccgctgcctggtccctggctggtacgccacccacatcgagcgctggctcagtgcctatcacgccaaccaggtagctgctgtccctgacccttgtgagggcagtcacagtactggcttgctgtggttagcggagagcctccaactctttctcaccagccgtggggacagatatgccctccttggagagctagacccttgggtctataaaaagattttattattattattattattttgagacagggtctcactctgttgcccaggctggagtgcagtggtgtgatctcagctcactatagcctcgatgtcccgagctcacgcaatccttccacctctgcctcctgagtagctgggactacaggtgtgagccactgtacccagctaattttatttttttaagaaataaggtcttactatgttgcccaggctggtctcaaactcctgggctcaagcagtcctccctcggtcttccaaagtgctgggattacaggcatgagccactgcacctggcctaaaaagactgtagacctgtttatcccaaggttgatacatgagaactccccaagcctgtgtcccatcaccacaggccctgtagccctaaagggacccagaaagccctgaggcaggcaggtgggagcaaggagactgggcgtggtgatggagggagagcctgatcataccaggctgtttatgtatttatttatttatttagagacggagtctcgctctgtctcccaggctggagtgcagtggcacgatcttggctcactgcaacctctgcctcccgggttcaagcgtttcttccacctcagcctcccaagtagctggaattacaggcatgcaccaccacgcccagataatttttgtatttttagtagagacgggatttcaccatgttggccaggctggtcttgaactcctgacctcaagtcctctgcccaccccagcatcccaaagtgctgagattacaggtgtgagccaccgtgcccggccatgcccagccataccaggccttttaggcaaacttgcggagtgtttgagcaggagagtgacatggactggaagctcagagagaggccagagagggatgtttgtagggacctgaggggcaggcagggtttggtgagagcttaaattctaggagaaatggcattgggcagcagaagctggtggaaagcaggcgtgagaccacagaggcctgagcttggggatacctgcccttcaacaggggaggaggagccagttctagagggtgcagggtcccatatttataagcaggcccattcctgctgccgtggctgttgcccttgtttgccaccgaagtcaaagcaggtcccgatcccctttctccctttccagattctggtcttggatggcaaactgcttcgcacagaacctgccaaagtgatggacatggtgcagaagttccttggggtgaccaacaccattgactaccacaaaaccttggcgtgagtgttgccttttcctttctgcaggttatttccctgataaggcacctgggccaacaaagccaaagtcttgaataattatgagagagagaagttagttagagtcagaaagtatggaaagttattaatatgacttaagtcatattaataaaggtatcaccttaaaaaaaagggagatgatgaatctgttctactctggtcagaccatcctggggtcttctctttggtctgggctgaacattttcagagtgttttatgtaagtaaattagatcagtaatgagcagccctaattcccacaagattttcttagcattagcttttttttttttttttagacagggtcactctgttgcccaggctggagtgcagtggtgtgattttggctcactgcaacctcaacctcccaggctcaagtgatcctcccacctcagcttcccgagtagcttgggaccgcagacatgtgccaccatgcctggctaatttttgtatgttttgtagagaaggggtttcaccatgttgctcagcctggtctcgaatgatctgcctgcttcagcgtcccaaagttctgggattacaggcatgaggcaccgcccccagccagcattagattttgacttacgatttcaggaaaaggaaacacaaatgttgttgacagttaataaccgtactcactcagaacctggtgcaagtgtgttgagaatgccctcccactatgagtaaaggcctgcccgcattgcatgggctcagggctaggaaaggctgctttcctgtgctatgtcacagataagtgacacactcagctggatgaggggaccccaagagaaggaggaatcaagtcaccctccttggctccattcttgggaaagttttgcaacaagaatattccgtcttcactgtcgtgggagttgaaggtggagaagggaagtcagtccttcaccttgagggagaaggggccacctgctgaggctgtgggccatggtgtcagagatgcctgggttagggccccacatccatctcttcagcctttcaagcctcgctttcctcatctgtaagttggggataaagataataatccctgcgtcctgaaggccactgaattgaatgaaagcttcatgtggggctcttagctgagagcttggcatgcactaagtgctaaataaacggtagctgctattgtccttgtcatcatcatcatcaccatcatcatcgtcatcgtctatacctatcctatgaccctttcagaaatctctgttctccttcgctattcatgggaattctgttttcttgatgccctcatgctcaagaatctcctcatagttcctcatccagggctaaattctgatgtcagtattcctcccttcccataacagcttcggatctcatatcccaaaaatgcctttgaagacaggatgatgttggcagtcttgctgtgtcatttctgaagtttactccaaaaaatgaaattctccagtgacaggcatgcttaagtgcagctgtggatactgcatgttttgataaagatgaaatttattaaaaagcaaaagaacctccactaaacacccctcttcccattgacgctgggaggggtaaagaaggcttcttgggtttaaaaaaaaaaaagagttactcagcattgagaatgctcagaaaagatttcccagaacactgaaggatgggaaactgttcatgttgtagattgctgaagcggctgtggctggtcgggctggaggagagaagactcagaatgtgcgagctgccctttgccggaagtaggacaggcacgtttagtgcagcctaggacacatttgatcccacagatggcacatagcttctgacagtccatgtgggttcaagagcagtagattccctggtctctgccattcctggggtccatgaacatggctttaaggtcggaagtgggtggctgagccagctcccatccaaagactttcccacctccacaggtttgatccaaagaaaggattttggtgccaactgcttgaaggaggaaaaaccaagtgtctgggcaaaagcaagggccggaaatatcccgagatggacttggatgtaagtggtggacacactacctgtagcacctgcataagggtaaggggtccctgtatggagttgagggggattctctttcctttaccatgcactcagcatgttcatggccttagcatttcttggacagtatttgtaagaggaggaaaatgggggctgggacatggtgggtcagacctgatttcgtcaaacaagtgttggttaccttctactaagggctgagtgctgtggggttttgaggatgagccagacatgttctctgccttcaaggaactcctggtcttggaggggtatgagtcccaacaccactaagtagaatacaggcagagagtgctgcgcgcagtcagagagggcacacaagtgctatgggaattcagaacaaggggatgtcacttgaacctgagaggggtaaaaaaggctccttaaaggagggatgggggtctctggagttgcgcctagaaggatgagatccattttgtaggatttggacatatggaatgggagggtaggtaagaacagcatgtgtaaaaccatagggggaaaaaagaaattttaaaaatatatagaaaaagggtcacagactgggggtcttgttacttcctccttttcctacttgcttctgtttttgttttgttttgttttgttttgtttttgagacagggtctcgttctgttgcctaggctggagtgcagtggcatgatcatggctcacagtagcctcgaccccctgggctcaatcgatcttcccgcctcagcctgccatagtgctggtattataggtgtgaaccaccgtgcctggccctggccctgcccgccttgggttttgattattaattctctctcctctccctatcagaagaattttgacttagtgagctatattttgatgctcctgccaactgggagttcactattggaggctaccatttagaaggagattgtggataaataagaggtgtatggggggtggtgccagcagcatggtgggttttttgtttttttgttttcttttgagacggagtttcgcttttgtcacccaggctggagtgcaatcgcgtgatcttggctcactgcaacctccgctttccgggttcaaaagattctcttgcctcagactcccgagtagctgggattactggcgcccaccacctcaccccgctaatttttgtatttttagtagggttttcccatgttggccaggctggtcttgaactcctgacctcaggtgatccacatgcctcggcctcccaaagtgctgggattacaggcatgagccaccgtgcccggccgagcatggcgatttttagaggaggtcactcttaagtcagtacacaaggtctgagctttccttcccgttacagtcccgagccttcctgaaggactattaccgggaccacaacatcgagctctccaagctgctgtataagatgggccagacacttcccacttggttacgagaggacttccagaacaccaggtagccgtggccaccacagccagactgaacgtttgtgaaagctgggacatcccaccacacgctgagccagacctgcagagtgggaagctggaccagggcagctgcgcacttatgagcaatactctgtggaggtctggtggggctgggggagcacccaggcggatctgcaagcacctcggagcacccaccgctgggtctgcggcctaagggacctccctcgccagcagaggtccattccgttcccagctgctcctggggaggccgcttcctggtaggagggagtccacgagactcttttctgtccctcactgtgttccgccgactgtcccctctcgtcacccatcactccctgcttccgcagggcgcccctcagtattcgctgccatatgtccctgtcctccaggctgtaggggaggagagcctggccgggggagacagactggacatttccctgtttcgagccaggctcttccaaggggccagctgggtccccggagtcagtcctaggctggatgggagggtggccccctcaagaggactcccagcctccacatctggttcctaccttcacatctcaccctcccgttctggggaagaatttctggttcctacagtatccactccatcctcaaggcttcccgcagggccttggggcactgccttgccatcgggcccagttctccgggccccacctgcacccctttcttccccctgggatatgatgtgtggtgtttcctgtggtaaaagactgaggcaggccaggggtctgccagtaacatgttcccatgtacagacacggtccccacaccctcccagcctcaggcccaggcagacatgggcgagctggtgagactgccagccacggctttgcttagccacctgtggccgagggctctcagagacccccttaacctcccaaatactaagaagctaaaatattttaatattttgtttttttttttcttggtgccagagtttataccctgggtgctggggtcgcactgtgttatatatatatatatatatatataatgtgtatatatatatattctattttttttggttgggttcgtttttaattcagtcctacaaaatggtggtaagccccagtctcaggggtcaccctgtcttagagctagagatgaggtggcagggagggaggctgtgtcctcagtggcctggggctgagcagaccttaggaaggggccctccccagtgccgtggctgctctggggctaccccaggtgaacagaggtggtgagatgcgcagggaagaccagctctctccaggacatcgggctgcgtgaagtccagtgaccctgaggggattttggccaaaggaaacagccagggctgggctaggagagctggggtcaaaagctgccccacccactctccctcacatggtgctaggctgggagctgccctgagagctgggatgcccaccaaggcccacagaactgtctccaggcccttgtagacagtgggatctctgggctgatttctggttggggtctgctcctaccccaccccatttaacaatgtgaagtgactgaggctggggtgcctctccctggccccctccaactgccaaattctgcttccctctgaaccccaggaaatactttctggagaggcttgtcttgttcagaagactctagcatcttggggctggaaggtcctttgacgggtatgaaacaggtccagaaaggggaggtggcctgcttggccgacgtcatggagccagctgggagcagggctgagcgttgaacccgaggctcccggttccaagtcccatcgtgctcctcttccaatgccacactgcctctgagcccatccttgggaccctactctgtgccaggttcctgtcccttcctccgtcacagcatggtcattccaggatatggggacaaaccactccttcccagccagggtgcctttgagccttctcattccgaggtctgcgtttgcatccctgtcgtgttctccctcgaggggtccttccccagcctgtgggggcctgggtctgttctgagctgattcccttttctccagttctctgctgggatgaagaaagttggacactcagtgggaccagctgcaggtggtttcactgtgtacacagcagtgtccccatcatgcctctcaatggggcctgcaagcctgggaacttgggcatcgttgggccagcaggatgagcagcaaagggtctgaggacagggtggcatgtctgcttgtgtgctcatgaagacatgcccacgccatggagccaggggcttatagagaggggcagtgacttccagagtcccatccgtcagtgaggggactgggctgcgggatgggtgaggatcttacagctcccaggttcggaaatctaccctctaggcctggaggcctctctcgcagagcatggaaggcaggagaggtgggctggcctagggcaggagctccacttctctctgcctctggctatgggaaggagcaggcggttggaaatcctgtgacagcagagatcttctggatttttgcctggacccttctgcaagcctggagactggacctgccacatgttccaagtctgtctgcctaggtcactgctgccacttctcctcccactaacagacctttcttgaagacccactaggtccagacactgccgggacttgcaggtatggggggtagaaggagaggcagataagctgcctggggggctgttagctaatgggtacaaggacaccccctcccgagaagagaagccacagatgagtgggccagcgaggccagtcttcaatgtccactaattcactctaagcatttggccaaaaaaaggagagagaaataactgaaattgttcaggtggctccatcgtctattctgtggtcccctccatgagcctttgccccagggtgggtgcaggtgcgagtgtcacctgcagctgcctcagtcattcagagttccagagccttctgtggtggagcatcctgctgcttggaggatgagtctgaagtttaaaaatgggccttttctgagcccccctgatgagcagtcagtgcttctgggcccagctaaggaagccatctgttcccagcagaggagagctgctgcgctgacctgcagaggttggtggtcccagcacagagctgtgcccatgggcttgttagtgggaaaagcaaatacaacaatgttttaccaaacatttaattatgaatgcccactccccagcatctagatctaaaattattaacattttgccacattctttttctctctctgtgtatgtatatgttttctctgtcctaatttaaaagtacattgcaaacatcatgaaacttgatccctgaaagcttcagcctgcatctcctaagagttagggcattgtcctacacattggcccagtatcacagccaagacgagaagtcatttcccagcgatgtctgctatctaatctgtattcaaatccccccaattgtctcccaggtaacttatgtgtctggttttggaatcagcatccagtcacggtgcacacattgcattttctaactatgtttttaaaacctctttgaatgctgaaaggtcttccctcagctcactttgagtttttaaatgacattgtttttgaggccctaggcctgctgtctttttgaagccccacattctgaatttgtcagattgtttgctcatggtgtcgcataaccacttcttctatcccctgtactttcaaggataatttaggctacatgagattttgccttttgtgctgacttgacagcttcacttctgcctaagatgcgcctccactgtcacctgtaccaagtgccaaaacagcagaggggccagttagagcaagagctctgggggggccggaaagtctccctggagaaggccgtaatatctgggccttggaaggaaggacacagggctctggaaggaggaggctgcatgcctgaaggctgggccttcgaccctggggatgggccacagggcaccaaacacatcatatgtctctctctttctattttggggtcccagggttttcatttcctggagacccgtggtctgtgtgcactggagcagagccaggctctcagttgcagcagggaaaagcctacatggggaactgcctcccgcaagctgtggtgtgagaagagccctggctggcagcaggagctgtgaagtttcatcccagccgggtgcatttagtagctgcctgaccatcttcctcccaggccctcagtttcttcatctgtagaatgagcagataggggccacagcagggattttcacacatcaaaggaggcagcctctgctctagttgatgtgaggatgagggggcggcctagaccccctgctgcccaggccgttgaggcaacactgggttcctggcttgacagctgtgggctggctgcccttgccagctcagacggctggcgagttttcagcttccctaagggactggcatagggttttgtggggtcaatgccaggaacctgggggaaactggatgcgttttatcctaagaagttcatccctcctgctcttactgtttccggccctggaggagaatgagggaggagagggttttctatgactgtgttagcttttattattagcaagagggctccttttgtaatttgtgcatgaaattcatgtcatttcctgggagaggagagggccgactggagagggtggggggcacactggggaagcaggcagaggtttccttcccttgtaggggggtggggagagtggggagagggggtgctatccagttcgcctgatgagggctctcgaaccagccgttttgggttgtgttaaaggtgagaccttcctccattaatgtacaatctcgaactaactgctaataaagtggggttctgtttgta

SEQ ID NO: 1490 - DNA, 988 bp, Homo sapiens
ggaaacacaaatgttgttgacagttaataaccgtactcactcagaacctggtgcaagtgtgttgagaatgccctcccactatgagtaaaggcctgcccgcattgcatgggctcagggctaggaaaggctgctttcctgtgctatgtcacagataagtgacacactcagctggatgaggggaccccaagagaaggaggaatcaagtcaccctccttggctccattcttgggaaagttttgcaacaagaatattccgtcttcactgtcgtgggagttgaaggtggagaagggaagtcagtccttcaccttgagggagaaggggccacctgctgaggctgtgggccatggtgtcagagatgcctgggttagggccccacatccatctcttcagcctttcaagcctcgctttcctcatctgtaagttggggataaagataataatccctgcgtcctgaaggccactgaattgaatgaaagcttcatgtggggctcttagctgagagcttggcatgcactaagtgctaaataaacggtagctgctattgtccttgtcatcatcatcatcaccatcatcatcgtcatcgtctatacctatcctatgaccctttcagaaatctctgttctccttcgctattcatgggaattctgttttcttgatgccctcatgctcaagaatctcctcatagttcctcatccagggctaaattctgatgtcagtattcctcccttcccataacagcttcggatctcatatcccaaaaatgcctttgaagacaggatgatgttggcagtcttgctgtgtcatttctgaagtttactccaaaaaatgaaattctccagtgacaggcatgcttaagtgcagctgtggatactgcatgttttgataaagatgaaatttattaaaaagcaaaagaacctccactaaacacccctcttcccattgacgctgggaggggtaaagaaggcttcttgggtttaaaaaaaaaaaa

SEQ ID NO: 1491 - DNA, 4618 bp, Homo sapiens
ctaccccagtgcctcgcccttgtgctgcattcccttagccccctcctcatgagttttgtctgtgagccgcctctctgggcttcctgcaggtacatggagttcttccccatcccttccaacaccacctccgacttctactttgagaaaagcgccaactactttgattcagaagtggcgccccggcgggcagcagccctcttgcccaaagccaaggtcctgaccatcctcatcaaccccgcggaccgggcctattcctggtaccaggtgagtggggctggggtggagtccctgtgtcgggaacacagggctccgtctgacactcagttactcactcactcaacagatattattagtaagcacctactgtgtgccagccctgagccaggcgcctggagcgtggtgatggctgagaatagagtccttggtggaggagacaggcggaaatggaaagccagccaccagttgactgtccacctgcctagtgtcatgcggggtcctgcctctacttctgacactgacaagaggtggaggctggttacgcctagaggaagcttagatttggtgaacagcaatgcaggatcatactgactatagcttcctcgctggacacgggtgggagtgggagctcatggaaggacaagacacaagactgccattcacagtggagaaggcaggcacctgaccaagtgaggcagttacctgggctgtgatacatggagagggtgtggatccaagcccctatctggggcatgtatgaaccagagctgtcttttttttttttttttttttttttgagacagagtcttgctctgtatcccaggctggagtgcagtggcctgatctcaactcactgcaacatccgccttccagtttgaagtgattctcctgcctcagcctcccaagtagctggtattacaggtgtgcaccaccacgccaggctaatttttgtatttttagtagagacagggtttcaccatgttggccaggctggtctcaaactcctgacctcgtgatcttcccgcctcggcctctcaaagtgctggcattacaggcatgagccactgcgcccagctgaaccagagctctctttaatgcctatggcctgacttaatttcctgcctgccagcccactgagcctgcaggaatgcttttaggccttccctggtggggtaggcggagtccctcccctggctgccagcattcctgtgattatgccacacagccaagcactgtgattcagaagtggcgccccagcagaaagccaccctgttgtccaggccgaggtcctgagcatcctcgttaacccagcagaccaggcctgtgcttggtgttggggagggggtggggccctgggtcttagcccatggttgccagagaagtgtcccctgtcctggctgggacagcctcttcaggcctggccactgtcatagttcccaccctgctttgaggctcttttctcagatgtgacagtggctgtctcccgcctgggaccttgcggtctcccgcagggctggcacctgcctcctctttgctcccatggaagtctctcctcctgccactctctgaggctggtgaggaagccccttcttactcttgttctctagggcttctgtttatgccctgatgtctgctttcctgtggctttttctttaggagaagaaaaccgagaaacacttgtcaagtgtttctgttttctgccgtgctgtgtgcccccgcctcctggcgctgtgcagggaatgggcagtctgctttcatgggggaacgtagggtagagagagagccgccacaggttgggtcagtccctgttctgcactgacactgctgtacatctgcaccttactggagagtcacagctggtttctagaaggcagaggaggggtttcacgtttgtgtccccttctcaaagattagaaaaccaagtttcagcaagtttcatgtggtggcatttgaatccaagtcttctaaatctaagaccctattcctttttctgtccatgatcaagaggggtaagggatagaaggagaagggagactcattctccccaggaggacctgggaagatgttggaggagaggaagggtgggggcctgtctcagaaggaggtcgggacgaggaggacgctgctgtgcaccatattgccccagccctgggctgtgtgtgatcctcaggggagggggttggcggctgggggatagtgcctgtcgcacaggtgcccgagctctggctttctggacttagtgaattctgcagattcggacctcccatggcattattttaagtgattcagaccagccagtctcccttttatagttctttcccagtccttctgatttccataaaggagaaatgctcactttagtgcaagtggtcttacgtcctttctaacactgtcaacctctgctttcaacaaagagagcatgttcagggcctgttgcacacatttgtgtctggctggagtttgagaacattgtttttattgccatttgtgagtggttgccttctatatatgacaacagtgcagcagcgtgatcttggctcactgcaacctccaccccccgggtttaagcgattctcgtgcctcagccttccgagtagctgggaccacaggtgtgcaccaccatgccagctaatttttgtatttttagtagagacggggtttcgccacattggccagctggtctcgaactcctgacctcaagtgatccacccaccccagcctcccaaaattctgggattacaggcatgagccaccatgcctggcatcaggaaaccctgatttcgtccagttcccgtatttcaaagatggagaagttggggctctgggaccagtggcttcccttgacactggacacagtgagaggcagagccaggactcagacccagagctcctgggtccagctgaggatcttctggccaccttgcgggctgctgtccctctcaggccacttcctttgtgtcctccaagtggcatgctgaccctctttccttgcctgcagcaccagcgagcccatgacgacccagtggccctaaagtacaccttccatgaggtgattaccgccggctctgacgcatcctcgaagctgcgtgccctccagaaccgctgcctggtccctggctggtacgccacccacatcgagcgctggctcagtgcctatcacgccaaccaggtagctgctgtccctgacccttgtgagggcagtcacagtactggcttgctgtggttagcggagagcctccaactctttctcaccagccgtggggacagatatgccctccttggagagctagacccttgggtctataaaaagattttattattattattattattttgagacagggtctcactctgttgcccaggctggagtgcagtggtgtgatctcagctcactatagcctcgatgtcccgagctcacgcaatccttccacctctgcctcctgagtagctgggactacaggtgtgagccactgtacccagctaattttatttttttaagaaataaggtcttactatgttgcccaggctggtctcaaactcctgggctcaagcagtcctccctcggtcttccaaagtgctgggattacaggcatgagccactgcacctggcctaaaaagactgtagacctgtttatcccaaggttgatacatgagaactccccaagcctgtgtcccatcaccacaggccctgtagccctaaagggacccagaaagccctgaggcaggcaggtgggagcaaggagactgggcgtggtgatggagggagagcctgatcataccaggctgtttatgtatttatttatttatttagagacggagtctcgctctgtctcccaggctggagtgcagtggcacgatcttggctcactgcaacctctgcctcccgggttcaagcgtttcttccacctcagcctcccaagtagctggaattacaggcatgcaccaccacgcccagataatttttgtatttttagtagagacgggatttcaccatgttggccaggctggtcttgaactcctgacctcaagtcctctgcccaccccagcatcccaaagtgctgagattacaggtgtgagccaccgtgcccggccatgcccagccataccaggccttttaggcaaacttgcggagtgtttgagcaggagagtgacatggactggaagctcagagagaggccagagagggatgtttgtagggacctgaggggcaggcagggtttggtgagagcttaaattctaggagaaatggcattgggcagcagaagctggtggaaagcaggcgtgagaccacagaggcctgagcttggggatacctgcccttcaacaggggaggaggagccagttctagagggtgcagggtcccatatttataagcaggcccattcctgctgccgtggctgttgcccttgtttgccaccgaagtcaaagcaggtcccgatcccctttctccctttccagattctggtcttggatggcaaactgcttcgcacagaacctgccaaagtgatggacatggtgcagaagttccttggggtgaccaacaccattgactaccacaaaaccttggcgtgagtgttgccttttcctttctgcaggttatttccctgataaggcacctggg

SEQ ID NO: 1492 - DNA, 365 bp, Homo sapiens
atttagttcactggtaccagcatgattttgtaattagatctgggctctaactccggtgatgctgatgatcactgtgtgatcttggccaaattacttaacttccctgagctccagttttctcatttgtaaaataagccataaacagtatctgcatcaggggactattatgagggttacatgagataaagtatgtaagtaaatgttaagcccttaccatagtttatggcacatagtaggagttcagtaaaccttaactgttgtctttaggtcagagggctgactgtcagtagcagaaaaccccgtggatctgatgcttttagcttctgcttacaccagagactgggcaaattctcagtcctgctgca

SEQ ID NO: 1493 - DNA, 365 bp, Homo sapiens; identical to SEQ ID NO: 1492

SEQ ID NO: 1494 - DNA, 321 bp, Homo sapiens
tgagagaagaaatagaaaatgaagactcactggagctttctggataatctgtatgtgctctttctcatttagcactaatcatatagttctatctgtctgtggccccttgccctatatgctggccagtgttgggaattaatgaatgctatctggctccctgcgcagctgtaaaacaagttgggaaaacaagaacattccagaagttctgggaggaggttcccaaaccaaaatattttacccccggcactgtggcagcagttcgcacccacagcccacaatttggctttctctttgcagggggactactccccgtgttgatac

SEQ ID NO: 1495 - DNA, 16825 bp, Homo sapiens
tgaggagaaacaaagcaatagcacagcctgccaggacctttatgcttggactgatggcagcatatcacaatttaggtaagtgtgtggaacccacagctgctgactcacttgacataactcaaaaaagaggcaggctggatccacagtgccagatcagtggggaagagaagaccaaccaggcagatctctgaagggaaagtagcaccagaatagctgctgacctaagcagtgcaggtggtgaacttagccttgatttgggcccaactgatgtccaaggaactctgttcaggtgagtgcagcccagcagccttgtttcaacagcatataatgcttgaagccagttgttctggctctctggccttttggaccagaacctcatggagagactgaagatccaaagggctatgactcagggtaggactccagtccacagggaattgtaataatgggcaagaaatcagagccaagatctaactctgtggattggccaaaagtggggacctcaggaagcctgcagtgtatagggccctgctaaacccacagcatcaagactcactcatcccctaccctggaaacatgacattgccatcatccctccctaagaaatgcaatgacatagacaaacatttaaaaaatatcaaaattaaaagacagacatgagactaggagaatgcgtgtaacagatccaacaaagagttaatatctttttatgataaagagtttatatgtcaataaaatactaagaccccaaaatataaagagacaaaagacctgagcagaccgtttataaaataaaaaatctaatggtaaacaatcatatggggaaaggtctaaactcatcaaaagaatgaagattttaaaatatattctttaacatatacctactatgtacccccccaaaatttaacaaatatatatatatatatatattttttacctattacatttaaggcagcacatcagcatctatcttagtccacccattacactgatcaggtgcacatcttcatataagttctgggagtagctcctccaggattctcatgagcctgtcttcctgggagaaactttagaaaggagggttagtaggatgaactacacttcctatcagtgcagctggtcccaaggccacagatggtacttattgacttccctactctattagccagtccagattcccttaccgtctgctggtctcaacggttgaccttgtggcatgatccacatcctcatatctgaagaatctggggtcctagttgccttgcccttatcatgctagagttagtgcacttttctattgaccatcaaaattgggcaagcaaattccaagaggtacccaaatagataactccttgcccataatacataacagcaggcctatctcctcccgatggttagggccactttcctcctgccaaaacaatgtcttctctttttctctgctggtccctggacacaaagattccagagtgtccaaatgacagtgataactcatcgtttagtaagattcttgtatcttctgacagtcccctgtgggaaccaggacctctaaacttccagatcccagtgttgcagagacaagaagcacaaattcctacgtgggtcactgccagcgattctaaaatgaggctactcctgcttccacccctcagctcccaaacccatgtattcttattcttggaaacacaggactgtataaagggcacgtgagttattgcctttttcagaagtcccatgtaatcaacttgccaccaagtgctatgttggtgtcctcaagtgttggtgctgtgtcaaagacttagcattggtttctgttgctggaagttgaacattcggcagtagcaatagctagattagccctagtgaatgagagccaatctgttgaggccatccatagccttcatctctgccactacctattagtatctattgtactagcactggggtggctaataacaggctggctggcattacctagctgagttattttgtctccctgcttgttcagtgcctcttctaagtagatgtttcctggtggtctttaatatctgatgaaaagagttgcatattttatgttcactcttctatgtatagtcacatccctctatccaaaacctcctagtccacaatcttccagtctatttccatttagactcttgatcagctgggcatgctatttaccttacccctagttcttatataatctaatctccaataatttccctttccttacaaagtggttaactagatgtaccaactaaagctctggccattgggaagatgttcccttactggtctctttcaaggccacctcagtgaaactgcagtgcagctgctgtccatttcactgtgtactcccatacttagctgacctacccttgaaccaggctcaggctgcctgtatcagctagtcacaagggattcctccatgcagtcacagatgtgagctaaggaagaggctctggtccagcagtggcagatgtcatggaagtctgctttacctgcttatgcagtgctctttggtcctggatgtacctcttccatcttacaacggatctattccaagcttgcctaatctccgattaggtgtgtctgacagttccttgctcatgatgggcaggttgtgcttcatggtctctggtgctccttgcctagtagccagccaggaattgtttctcaaaaggtgactaattttcagctacagatggtatggccttgcttcaaaatcctatgggtctgcatgtgattctgtcattgaggcttgtcacaaactctgtatggcataatttttcccaccactgacatctctaataataggagctgctgcatcatatggcccaagtggcaaatctgcttgcacacagcctagatccacttcagagttcttttctgctgtgactcctactcaaaatggctgtattccatgtcacctggtttatgggccagagcaatattcccaggtgtgaaatatgctgcctctagagcccaaagagacctaccatgtgctatgcttcattcttcaaattactgcaagatgcaatagtttgttcttcaatttgaaagggatgttctggtattccctagatcactagacacccacacattttattgaagtggtaggctcctgaatcttcataagatttatctccaaccctctggagtacataagtcttaccaaggcatccagtgtactaaccacttcttgctcatctgttccaattagcatgatgtcagccatatagtaggtcagtgtgattttctgcaagatgtctaggaaatccagatctctttacaccatattatgacagaggacggtaaaaattaatatagccttgagtcaagaccataagtatatactgttgtccatcccaacaaactgtttcagattatctttctgatacagaaggaaaagaatgtgttcaccggatctgcatactaggtacccaagggcatgttaacctgctttagcaaagacaccacatatggcacaggcagccacaatcaggcttccacttggttgagtttgtgctactctattatcaccttcaggatctgcctggtgttttcaggagtcaagactagtgaattaactagagatgcaatggggaacaccactcttggattctttgggtctttaagggtgacactacttcctgccatctttccctggataagatattgttgttgatttattatcatggcaggggtggggaggagtgcagtttcaaaggcttccccacttgacattctccaccgtgatagctcttgccccacaggtaagtagaccaagagacgacgcagctcaacctgcccatcataggccaaggaaccaatgtggaactgtaccaactaaaaatatgtctgttcaattcatatatttggggactggggaatgatgactggctgggtgccactatgagctgatcctgggccagacctctacttaatacctgtccccagtatgctcccattctaatgggtagctttgatgacactttaagtctgagtattaatgtcaacttgcaccctgtgtccaacagcccttgtaatatttggatattccctcttccccgctgtatggttactggaggaaatagccatggatccctttagggaaaaacgggaagttattaccatgtgcacctgccgtggtgttgcaaggtccttcttactggaaacctggcctctctatcagtgagttctgggtctgaaaattggctcaagtacagaaattatacaccagacataatattcaacctataagacaaaataatgtaaagccataaggccagtggggaggggaacaaggcaagtcagggtaggaggcccaacagggctggaatctggactggagataactaatgaggtgcccccagctgtccagtcatagtatccaaggagtgtttattgtaagctaagctattttccaggaaattcaatccagtgagtgcagcaaaggatgttccttttagtagacaacaatacaggacttaagcagagccttactgtggcgctacagggagagctgtctcttgctgtctctttcctgaagagggctctgacaagagctaagcagagcagcattgcctgctctgagcatcagagcaagatctgagccctagaaggaaacagctcaggcaactaaccagggaggttacaaagcccagccctgagtcagcacatggggtgggtactcacagatgtaaacgctccataagatccaaggctttaacctggcacccacatatccaactgggtggcagcaccatttagtttcaagtgccactggatagtagtgtaaggttgctaatgcacccctctagggggctagggagacaaagacaagacatctggaggtagaggctgaggggctcatcagccttatcaagtggaaacaacttaaaaactgaaaaagaccaaatggtcctcctgcttttgtccccaccctttcacctgttttgacagcctctatgtttggaatgtcttgctcatgtgcttgaatttcttatctacttcccagggctgaaaaggcagttggtggctgttgaaaatcatggagagatgagagcagggcaagctctggatgagataagccatgtctcttctcagtgcatctgagatctaaaaaaagacaaacaaacccaattagcaaaaagcaagaaagaaataagatcgtccagactagccctgctggctgctttttctcataattactttacagacatcatatggtggcatgttcctccctgcaaagagattgtggcaaatgtcagatgattgattgtgatgtccatatgagaatgcgtgtggttctgcttactggcagtacttcaattcctacctctctctgtatcatgttctgaggcagaatcttatgtttatggctcagtgagacttgacgggaaaacaaaggctttgaagtctcaggggatccttctccagttgcctctactgctgatcccttccctacaggaactggtatgtggatgagccatcctgcggcagcgaggtctgcgtggtcatgtaccatcagccatcggcacccgctggcatcggaggcccctacatgttccagtggaatgatgaccggtgcaacatgaagaacaatttcatttgcaaatattctgatggtaatgaatcctctcccaagctatgcggctgaattctcaacttctctcatttcatgagctgctgctagtaccaagaatttgtcatgtggtctctgagaaagcttgttgcaaatgccagcaacataaaaccttaagaattcttgtaaagggcaatgtaatgacaattcctcaccgaggagtaatcctagcaaaggaaaggttatcagatgttaagagaagggatgagaaaaagaaaaggtctaatttatgtgtgataaagcaagtcttacaagaacgtcaggaaataagccctttaagtggacagccacaaattattactctttccacatgtgaggttggctgtaggggcttagaataagctggccattgctcctacaagtcttctaacagcccagtgagattattttctggggttttaaggaagcacgatacatatgtaaatgataaagtacaccaactgcactttcactgggcagagatagcaggtaatttgatgagcagatttaaactctcagaccaccctgtatttaatgccttgcaaattcaacttacgtttgcttccagatctgttagggttttgaactggctacaagcttgtagttttgctatacttgggtttcccagacttctccattataactgacagatttgaatttgaactgattcttaatctgcccttgaagtttctcacttccctaaagccaactgcttagccccaattctgcattctttcttgataggagtagagtgacttgttagttatatctagtttgggactaagtaatcctgtcattttaaaattgtttgaactggactatggtttggtggcaatttttgctgctaaaagatgtttttctctctctttgtcctctcggatgaattcttctctccagtgacctggccctccccaccatacagcgttgtctcaggcggggagattgcaaagacctagactgacttagcaagtcacctttatgaagcagtgaaagcaaggcacttgttacatactggctttccatcacttttgttaattatattctattattaatagctccatggtttaaatttttgcacttcctttaacagtttttgaaatgtgaggttttgaaatttgctttaatatccttttattttggacttggcaccttcttagaaaaaatcatattcttcattacttttgttattgcctatattagtcacactaagtcctggcaagaaaaagatggcacacacaaagggtttaatgaggaaagtgtaataaaagggacatttgctgaggtgtaggccaagagcaagagatggtaaaatatccagggactagctacaatggggaactgttatgtccaggcctgaaggaataaaaggagggaatggttttagcagaacccgggaaaagcttggggtcatgaaagaggacccgcccaacaggagctattaccacaaaatgcagctactatcaaaccatgctgacgtgggatgggggcatggggaataaatactgagacttctctttccttctatcctctgaccttctgcctttgcctctcattggctaagtccaatcagagaccaaagaacaagggaacaaggaagccccattgaaacagtttatagacctcaacctcccaaggcacagaggacagagaatggatccaacagagggaggtgggcacatggagaaaaactaacacactgcctgtttttggccacccatgcccagaatagtttacacaccttagcatgccagaagaggatcggcacaaccagacccttgccgacctgtccagctcaattctcaccactttaactcctctcctcatcctattccaacacctttgtaccaaatggaatttcccaagagctcttaatttctgtttcctgtgcttgaaacacccctttcccagccaactcattctcaccctttggcttcagattagacaacaccttctctcctaacagctaagtgcaaccagtgatcctgggttggatcctgaacatgatgtgatgatttcctataaatggcattattaggaaaatcggtagaatctgaataagatcagtagattagaaaatagtattgcatcaatgttaatttcttgcttttgatcattgtactgtggttatacatgaaaaggcccctttccctttgtaaatatggacaaaaatctttaggagtaaaggggcaccatgctggcaacttgtttgcaggaaaaatgttatgtatgtgtatgtgtgtgtgtatatatatatatatatatgcatgtatgcacacacacataaacgtgtgtatgtgatacaaagatagaggagagataagaaagagggagaataattaagtaaatgaaatgtgatgaaatgataaggtgaaggatatgggataattctttgtaccattcttgcaaattttcataaatctgaaatatttcaaaataagaagttaaaaaaataacttcctttggaaagccttccagagcccctcaaagctaggtttggtgtctctcctataaggatcgtagcacctcacccacacagtactttaactacctatttataaggctgtccccttcactacatgattggcatgaagtctggaaacttacctgtttaaccacttgatgggctggggaagctcactcctgtggttccagcaggagggcgcatcatcccattatgtcagagtggcaaggaactgggtgaatgataatatgtaaaactagatttgagaaaataatcatgtagagtaggcagcatgctagccatagctgaacacttgcttacttctggggtgtgctaaaggcacaggcatattcagtgaatatcagaaacaaatcatgaggcaacacagatgcacgtgcagggattgatggaaatgctgcaatgatgtgccgtttttaactttgcaccgtggattgaagtatggagggacaacagtatgaatagatcatgtgttgaacagatcatgttattacgtattccagtgtaatatcacaaaatcaatgttcattaatattttcctgtatttccagattttatggctatcctgtagaatataagcttcttagagggctgagattctttcttgtttgctgttttatctccgctacctagcacagttatgtctccttactattttaattttcgttagaatgtgtttggttgaaattcctttacagctacttatcagctgtgagatttgggcaagttacttaatctccccgaatcttggtttcctcatgtacaaaaccagaataataataaggccacctcccatcctggctaacactgtgaaaccccgtctctactaaaaaatacaaaaaattaaccgggcatggtggtgggcacctgtaatcccagctactcaggaggctgaggcaggagaatggcaggaacccaggaggcagagcttgcagtgagccgagatcgcgccactggactctagcctgggcgacagactgagactccatctcaaaaataaataaataaataaataaacaacaataataataaggctgttatcaggattaattgagtttgattttataaaacacttagaacagcccaggcacagtggctcacgcctgtaatcccagcattttgggaagctgaagctggtggatcacttgaggtcaggagtttgagaccagcctgaccaacgtggtgaaaccccatctctactaaaaataaaagtacaaaattagccaggcatggtggcgcatgcctataatcccagctacttcggaggctgaggcaggagaatcgcttgaacccgggaggcggaggttgcagtgagccaagattgtgcctctgaactccagcctgggtgacagagcaagactctctcacataaaaaaaaaaaaaaaacacacttaaaacagtttctctcatatagtagacactgtataactgggtttttttaaataaatggatatacatcacctatacacacacacacacacacacacacacacacacacacacttatgggaagatgactaaaagtttttgtcctttctgagtgaaacttcagaatgggcttgacatcctggccttaagactgtgatttttaaggtctttcccttaaagaccctgtccctacgaacaccagagcatctgattggcataagagactcattgccaatacaacaggtggacacactcccagtcaaaagcaaaaacatttgatgtcaattatctgtacaacctgatattctcaagacactttgaaatatgtacaaaagctcagagctctagatcaccagcctctgccttggtgctggccagtggtctactgagcccctaaaccactttcactacttggagatcagtgtttgttgccctctaaaacatccccattatgaactgaaaaaatgtcttagactgctttaaaataatccaggccaggagtgcaggggagaggagtagggattattgttgaaactagatgagctgtacattgataggagttgaagctgcatgacgatacacagggtacattataccagtttttctacttttttgtatatttggaaattatcatatttaaacgtttttaaatacttttttaaaaacaaaaaagcaccaaaataaagctggggaaggttagtctttgtgcaaaagcaattattttgatttactagcccagttcctgatatctgataacaacaaataaagtttatcggaggaatgaatcagcaaataaatggatgccatgaggctgtggttgatttcattcagatgccataaaaacttactacttatttttgtttttgtttctttctactacagagaaaccagcagttccttctagagaagctgaaggtaagcctgttacttgagatttgggttaactggggctgtttcatagcccctcttcacaggtttaaagccctatgtcctttggactggattattcaacagaaaaactagtggtattaactcaggcatttgggacaggtatacaccacacccagccatgacagctagtttagtcatctcattttctagtgttctcacagctgaaaagcaacagttacaaattttgtttggggtgttacttgtcatcattgacaatatcaaaggaataatttaatctaatgagaccaaaaaaaatgagccaaactgttaatttatggtcctagaagtgagtccttggcccttccccttgacaccttggtattttatgtaccttgatgtcagctgcttcttgattgttttagtactggattcttgacagcaagggtctcaccaaaaagacaaagataatttaaacctctagtgcagcaaattcaaccctttacttttctacgtttatagatggtgctggcaaaatttctacagcttttttgcatcccaatttgaacatggtaggacctcaaagaatacctgaattatgcctttcttcaagttcacaagtccatgtgtctctctccaggtgaggaaacagagctgacaacacctgtacttccagaagaaacacaggaagaagatgccaaaaaaacatttaaagaaagtagaggtatctacaaaactctcctgggaaagatgaataatcaggctcccttgattacaaattacccatggttgaattccctactttgttctttcccacagctacctaaaaatagaactagacagggcatgtgtggctttgcaaaagctgtactaaatgctaggtttcatcaatgaaatatgcagatggaactatcctaagatgactggggaaatcagacagcaggtgaaaaatttgcatgaagacagagccttgggagccactcagaggtcatgtggggtaaggtggagtgaggactgagagagaaaatgtagagaaataagagcagaaagacccaagctgtgatgcataacatctatgattaatattcatctgcaaaacaaagagaagaaatagacaaaaacatttaaaatgttaaatcataaaaggtaaaagaaaataggatgacacattggagtgctaatggatttcaaactcactcttgccctgaagttcaataaggacatctgagtttttgtcactgggcaacttttaaaaaccactttacttctctgtgcttcagtttaattgtttgcataatggaagtaataatatttttcttgcctacctgagagcacaactgtgtccataaaatgaaataggatattgcaatagtgcagttcagttctgacactaaattccagagttggcacacactccagctcatgagcacaactcataccaagactgccctcacttcagacattgactgcaagtttaggggtccccaggccacctgcatttctgaccaattggctacaaatccaggagtgcccatgatccccacctcttaggtttgataattcactagaacaacctacagaactcaggaaaatagtatatttatgactagattgattgtatgggatacaaatcaggatcagccaaatgaaaagacacacagcaggacgtctgggaggagtttccttgtcatcccccaccccatggaatcaggatgcattagcatcctggcacatcagtgtgttcaccaaccaggaagctccacagagctttcgtgtccagaggttttattgggggtatcaatgcatagcagtctccaaaagaggtcaggctgctatcactaggctcaaagccccaaccctatcatcacatggttggtctttctggcatggccagcccccgtctgaatcatctccttataaaccctcttatggtctgaggggctcatgaataacaaattcactcctattactggggagagtccaaggatttagagcctctctcccaggaaccagggacaaaggcccatcagattctttattatataacatatatgtgaaaaaagtacaaagtgctctgcaaaggtgggtggcatttctattgctcattgttattatggtggtatttaaagtgggttttgagggtttaggggttttagtggtggtcaggtttgcaatctcacagaagaaaagccaacagcctctggatagtcaggaagcttgggtcagtgggagtaggaagagggttagcctccaatccttgattcctcccaaagccacttgaggggaacatctttggttctaagtcttaaaggactagaaagttcagaaaagtaagcctctaagtgctcttcacagtcatggctcatggacccaactgaatctaattggtcttagaaatgtcagaaaggttttacactgtaatttacttgcttcctgtgacctctttcctggtaatgacactgaaacttctggcttgcttctttttccctctctttcccccatcccatcgtgggaactccgtgactgtccttggaggcaaaagcatcaacactgccccagcggcccctgctttactaagggaggacaagaaaagagagactctcttttctctgaaaaaaaaaacaaaaagcttaattaacaaaagtgcccttctgatatttggaagacctaaaaatttaaactgattttcattatcacttagggtaataggacaggtagaaaatgctcatccatcgaaaccagaagactctttgctaactggctagatgtgtcttgatcactcaggaatgagctctttggaatactctgtgttgattagccttttcctttgttttgttttttaattttttaattttaatagatttgggggtacaagtggtttttgacgattatgctttttttaagcctggtttgaagcacagaaaaacaaaacaaaaaacagccaatgctgatcatgtgctttctttcttttcagaagctgccttgaatctggcctacatcctaatccccagcattccccttctcctcctccttgtggtcaccacagttgtatgttgggtttggatctgtagaaaaaggcaagtaaaaccttcattgtgtaaacctttgcatcttctgctctctttgagatttggatattgccttgtttacttcattaaaacccacggcagcaccaagagtatcaccattgcagattggagagtgggttctctgacaggtcagggcattcagaagtactaggcatttgtgcttagttgtgattaagagagtgatcttacttgctttactgtctgtacgtggaagattttaaaacaacttgaagggtgaaattgcattattcacctcccgtgcactcacacgtcacccagcaaaaatgctctcatgaatgtatgccctcactctgaaaatgtttgtggactgagtgaaggaatgaatagtgagccatatgaaaaatgactgctgcaaagtattctggtaaacatctgaaactaaaccacttaattcaaactgaaagagccaaattccttttaactgacttttcttttaattcagtacacaagtatagagtgctataaaatagctacactaggtggcatcaacaatttctgtatatggtcaggatcgtgtgccactattttattttattttattttatttttagtactgaaagctcttctcagttacctttttattctccatcatcatggtatatggagaagatgtctagtattcccatttacaacaggaaaactaaggcccaatttaagatttgactccctttaaagaccaatttgagatgaattagtaagattccaatgtaaaatctatttcagttaattgtaacttccttgtaggattattataaggattaaggcagttaatacttgcagaataagtatatactaagcacttgaatgttacctattattgggattattttattagttatttcctttgaatcttaaagtagaatttagttcaaaaaattacaggcatattttccagctgcctactctgcctactcagttggttcttgatttcctttcctgactctctgttttgtactttaacaggatttgggaattgtgactctaaagctggggtgtctgtctatcccaagggtttttaatcttttttgtgccctgcagcagtctggtgaggcctatggactccttccagaacaatattttattttatttattattttatttaaaaaaatatatatatatatatatatttgagacagagtctttctctgtcgcccaggctggagtgcaatggcgcaatctcggctcactgcaacctccgcctcccgggttcaagtgattctcgtgcctcagcctcccaagtagccgggattacaggcacataccaccatgcctggctaattttgtatttttagtagagatgggtttcaccatgttggccaggctggtctcgaactcctgacctcaggtgatccgcccacctcagctgccctaagtgctaggattacaggcatgagccaccacacccggcccagtacaatattttaaatgcataaaataaaatacattgggttgcaaaggaagcaatcatactgttatatagtttagcaaaatatttccaaaaatgaatatgtgattagtaatacatgtactcctttattaatgcttctttatttagtgctgggtataattattataattttgaagtagagatgaggttaaaatatttcaaggcatctataactgtgatatgaaaacatctataatttctagtagtgatcaagtcaaagatattaatcctgctgttttatctcttacattcataatggaaggacatgctaaatttcacttatggatgagtcgtgttttttgttgttttggttttattttattttattttattattttattttattttattttatttttgagacagggtctcactctgtcgcccaagctggagtgcagcggtaccatcacagctcactgcggccttgacctcccaggttatcctcccacctcagcctcccaactagctgggactgcaggtgtgcaccaccatgcctggttaatttttgtatcttttatagggacggggttttaacatgttgcccaggctggtctcaaactcctgggctcaagtgatccacctgcctcagcctcccaaagtgttaggattacaggcgtgggccactgtgcacagctgaggtgtttttttgtttttttgggttttttttgtaatgtggtattttttctctattcagttctatccctggacactccagggactctagggaaccccaggataataaccctgcccacacttgggcagcagtgaatgacagatacacaatcactttgaacataacatctccctgtttggttccctcccactccgaagccctggcctgtaagttacatagacgagacatgcagctgggtgactgcccagggctgcttcctctcgtctcaacaggaagcacaagggtattctcaatcacctggtctaaaacactcagccctggttttctttcttcctagaaaacgggagcagccagaccctagcacaaagaagcaacacaccatctggccctctcctcaccagggaaacagcccggacctagaggtctacaatgtcataagaaaacaaagcgaagctgacttagctgagacccggccagacctgaagaatatttcattccgagtgtgttcgggagaagccactcccgatgacatgtcttgtgactatgacaacatggctgtgaacccatcagaaagtgggtttgtgactctggtgagcgtggagagtggatttgtgaccaatgacatttatgagttctccccagaccaaatggggaggagtaaggagtctggatgggtggaaaatgaaatatatggttattaggacatataaaaaactgaaactgacaacaatggaaaagaaatgataagcaaaatcctcttattttctataaggaaaatacacagaaggtctatgaacaagcttagatcaggtcctgtggatgagcatgtggtccccacgacctcctgttggacccccacgttttggctgtatcctttatcccagccagtcatccagctcgaccttatgagaaggtaccttgcccaggtctggcacatagtagagtctcaataaatgtcacttggttggttgtatctaacttttaagggacagagctttacctggcagtgataaagatgggctgtggagcttggaaaaccacctctgttttccttgctctatacagcagcacatattatcatacagacagaaaatccagaatcttttcaaagcccacatatggtagcacaggctggcctgtgcatcggcaattctcatatctgtttttttcaaagaataataaaatcaaataaagagcaggaaacagagtgtta

SEQ ID NO: 1496 - DNA, 321 bp, Homo sapiens; identical to SEQ ID NO: 1494

SEQ ID NO: 1497 - DNA, 408 bp, Homo sapiens
gagagaaagaagggggagagagagacagggagtctgggagggagaggggaaagtctcacaagattattttatttttaggtggtgatgttttaaattctaatcttaagaagaaatgctgttgttccttaggtcaaattgactatatagattatgtactttgatgtgatatatgaagataggaatttcagtgtcaaacacaaaagagccataaggaataaagttcttttgagcgccatgtaatgctgtctaattacgagtggtatccagattttcactggaagatacagtatgtaagtagctatgaaagcaattttaaggcaaaattttacttacactgcaaatatatttcccataaaacaaattaaagtcaagttttaaaaatttctttaatttttgatttttaaagag

SEQ ID NO: 1498 - DNA, 115 bp, Homo sapiens
tcacacctgtaatcccagcactttgggaggccgaggcgggcagatcacaaggtcaggagatcgagaccatcctggctagcacagtgaaaccctgtctctactaaaaatacaaaaa

SEQ ID NO: 1499 - DNA, 344 bp, Homo sapiens
gttagacaggatggtcttgatctcctgacctcgtgatccacccgtgagccaccgcgcctggcctgaaatattttatttttgttcatctttgttgtgcttataatactcctgttttctgtttattcccctgacttgaaccagatgttaggggagtatttgaagctcctcgttccctctcttcatcaatatcttctgtctagaaactaaccaagcaccttatctggctccagacctctcagtgatctgtgggaggccaactcgcaggatttcagcagagtttgcactttctaggcctaaaagataagtccttccatgtgtaagttcagattaaaggcaacatattg

SEQ ID NO: 1500 - DNA, 1017 bp, Homo sapiens
tgcaaactgtagatcccaaacttggaagttctgggaattctgccagtatccccaagtaaatctcttgggaagtttagaatgctgcatggcgtagctgtgcctgctcttatagagtggtgcagactctgcttctccacgtctgctaagtaaaatattccaaacacagatcagccttatctagcgaaccatcactctgctcttgaattttcttttggcctcaaactctagagctataacatgttaacggtttaacaccagaggagaaagctattcttaaactactcaaacatggtttttttttctatttttcagactcctgaaacagactactctttgcctttttgctgcagttggagaagaaactgaatttgaaaaatgtctgttatgcaatgctggagacatggtgaaataggccaaagatttcttcttcgttcaagatgaattctgttcacagtggagtatggtgttcggcaaaaggacctccaccaagactgaaagaaactaatttatttctgtttctgtggagtttccattatttctactgcttacactttagaatgtttattttatggggactaagggattaggagtgtgaactaaaaggtaacattttccactctcaagttttctactttgtctttgaactgaaaataaacatggatctagaaaaccaaccagcaagttttcagtgccagataaaactctgcgctctagaggtaactcctcatgggaggcagctaggagtgttacctgacaccagtttcctagaaaactgtgacaagcaaagcaataacacacgtcgagaaatatctgatcaagcgggaaatcttctgactgtcggggatctctagtaagatctcttggaatgaagtgcactgtgtatccaaaactattttccagcgccagtgaagttgctcttacctaaaacaaatgggtttatgctagtttccaccaaggaatgagtctcgatggccattaaactttctaaggcccacagggctaggaaaagtcgctctt

SEQ ID NO: 1501 - DNA, 11607 bp, Homo sapiens
gcgaacctgaggaggaagaaacggggctagcgcgcaggcccagaacggtccgagccgcggcagtcggcgacgccccagagcggaagagggaagtgaatcaggcgccgggtagtgggttgctgggctgggcttgctgaggtagaggcagcgccaagaagaggcctttgccgctggtcgggattgggatgtcgaagaacacagtgtcgtcggcccgcttccggaaggtggacgtggatgaatatgacgagaacaagttcgtggacgaagaagatgggggcgacggccaggccgggcccgacgagggcgaggtggactcctgcctgcggcaatatccttgcattcaccgccctccccaccccagcccagcccagcccgcccttctcctgggacccgggagcctgcaggatccgcggggcaccggcgcggagctgccctctcaacctgcggcttaacctgtctctttgggatcgcccgctctgagagggcaagggggaagcccccgtttcctacccagtcggcaggagacgcgagggtcccactcttggaagcctgccctcccccgcgcgccttccacgcccccagattcctcaggttgcacccgagtgcctgcctgcctcgggaactggtcccgccggccgcgccctcgcggcgctggggaaggcggccccggctggtggggaaggctggtgccgagcgccttagtttttcttcctagaactctgatttcctggggtcacattagctccagaaatttctgattgtggggaacctgcatctttccttagtggttttgttttttgttgtgtttttgttattggtagcgttaaggtagtttattccttaccggggggcggggggagatgggactgttcgaaaattgagggtccctgtgctttcagcccattggccttttttaaaaaaaaaaaaaaagaagaagaagaaggggatttggcaaaatatacattgtacagaatttgttaactgggggaggggaatgaatacaaaaaatacaaaactcctagaaggaagcttggagccttttacctgctaagaaaaggacaatagaaaaaacaacggggaatgcgtgtggagaatccttggaaatatttaaaataaaccccaatgaataagatagaagatgagtcattcgtataaagcagaatcatttttgtaatcctaaaattgtttccattttagttaaaatatggcagtcagttcccggtttctgtttttgcatatttgaatattcataactttggcttcgcatttgcattacatcttttttagaaaaatgtaaatgttgcaaaaaaaccgaagctgtagttttagaaaatctcagacactgaatttgtatgcatttctaattcttgggtgtattcataaggaagactctcaacaatgtcctgttatagtggggaaatatgagagtgaaaatatttaatggcaacaatatccttttttaaaggcacctaaatagagcattagacatttatcaatatatagatagtgctttgccacaactttcacaattaattagctgttgctcttttgcattatttaaatacttaagtgcttggagtcataaaaaatgagctaatctacatcaggcatgcttctctagaaatccctgcagccttgaaaataacagcttgtcaaccagagattttgtgtaagaactttttctttagaaaataaatggtgaacatgcttcctaaaaacattatttgtgatggatagatggtgttttatgaaaccccagtgtattttaggtaatttgtggtgacttttaaatggtactgctgtatccatatcagtggatctgctttttgatcagttcatcttaaaatataaagatactgtctcttcttaccgttacatacagccaggaaagacagccctagtggtggggtactagagttggaggaacaagtgaactctgtggttttccttttaggggaatgtttgtacattctgacagtctgattggccttctgtttctcatgcttgctaactcactagtgctttcaaagagagcctgaatttaataggtatggtctaacacagtttgaataacctttgtgaaatatgagagaaaatatctaaagcaaaaaattaagctgccacctaagggacatatgaattattacatcttctgtgatgcctcttttcatcaatattgagagactgctaatgtgtatcattcagattgctaatctgccagcatgttctaccagcatttcagataatacagaatatggttctagcaaaagtttggtctttattttttcaattagaatcacaggaaaagacatattttggttgataataggttatttcatttgggggactaataattctgatatatattttaggatttctttaacaccactctaggtaatgtttgcatatgtatctcactgggaaatgaaagactatcaaggtgttcacttgatagttagaaccaagggtgaaacagtctttgctttattaaaaaaaagtctaatgttctattttgcttttgatattttgcctttgattaacatcctggaaaccaacacattgaatttccagtattgaacatagtgaccaaagtaattttctttttatatgtaaatcaagtcataagaaccagtggttataatgctttcctgggggccatcctttgctgttacacccttaacttccatcacaggaaacatgacagctgccctacaggcagctctgaagaacccccctatcaacaccaagagtcaggcagtgaaggtgagtcgcagactacaacacagtgatctctgctgatatcttattcttagtaaaatcctctgcagttgcaaaaaaaaatcaatattttaactgtttgctatctttgacatagaagagtttataatgtagtttgataggtaaaaatttcacgtgaaaaaatagccctataatgtagttatgataatgctgcatggtaagatacagtaagttcaaacgatagtgaaatcatttgtgtgtgtttttagaggagaccactcaggctgaatttgagcaaaggtttgaaaaataagttaaacctttacaaaaataaacattgtaattgctttttaaagattttttaaaaccatacaaatactaaatacttatagaaagctcagacatatgagaaggttaaaaagatagtggtttgtggtcccagcacccagagataacagttactactttggggccttgctgtattgttacagagttcccttttgtttttttaagaatgaaattttataacgtgctttttcagctatatgcaatgtacatgagctttccttcgcaataagtttatagcatttttaacacttgtatatggataagctgcagtgtatacataactaatcttttgttatatatttagactgactttttttttcctattgtaaaccactgaaatcaatattttttggtaaatttttaattgttctctttgagtaaattgctagcagtgaattactggatcaaagaatgcacttttttttaaggcttttggtatgcagtattgccaaattgcccttcagaacagttgtgcaacttacattctctgcagtcttttactaattcttaacctatttacgtatttatttaaaatgatgcccatagcatcaaccccgttgtccatagctattcatacatcctaggagcttcaagaatctcaattgaatagtagtaagtaataacttaggtaaatgcataataattatctaggtaacataattttttattggggaaaatttctttggtttttacaagttgtaaagattgtcgttgaaatttcatttttaccgtggatgcaaagatatttttctaaatctggtaattgcagtctttaaaccaaagataacagtaggtggtagaaacattctgtgaaatcctgaccagtaggaatgctggaggtatcactttgtgttgaatggaaggagaaacgaattgttgaaaaggtcagttaagtgtttcctttgcttggccggatgggtaagaaaataactgcttttgaagcaggcttttgccaaagaaaaaagatcattattaatgaacatcactatatttcatatctacagtcaattcatataaattacagtcaattttcttttaagacagcttggtttattaaaatttttaaataaaaaagtttttaagaaaaaattacttctgaaggataattcaaggtgaaactgcaaatctgcctccttgttttgttgggaattttttttttttttttttttttttgagacggagtctcactctatcacccaggttggagtgcagtggtgcaatctcaactcactgcaccctccgcctcccgggtttaagcaatcctcctgcttcagcctcccgagtagctgggatcacaggcacacaccaccatgcctggataatttctgtatttttagtagagacagggttttaccattttggccaggctggtctcgaactcctgacctcaggtgatctgcccatctcagcctcccaaagtgctgggattacagctgtgggccaccacacccggccgttttgttgggattttttttttttaagatcaagacataaatttaaatgttgttttaataaattgttaaattatcacattgatctgttagcaaatcctctcagctctgccttcaattatgttaatagtctgtctagtttcttaccacctccactgctactatgcttaccacatccagcctgtattattgcaattgcctcctaattgctctccctgcttctaccttatcccctactcccacagcttattttctgtaacatagatgccaaagcaatcctgttaaaatgtgagtcagattatggcactgctcttaaaaccttccaatgtcttctcatttctctcagtaaaagccaaactccttacaatgcctgtaggccttacacgatctgtcctcccataacctctgacttactcacgtgcttttctcccaccaatccactccaaccacattgggtttttttctgttcctggaacacactgaacacacactaatagcactgttctttcctctgtctgaaacactttcctcagttatcccaagccttctttcacgtccttcaggtccttactcaaatgtcacattcatagtgtagactttctgaaattctaaaccctcctcatacagatatgtctaaatgttctgttatttattgacccaccaggaccgggcaggcagcattgtcttgaaggtgctcatctcttttaaagctaatgatatagaaaaggcagttcaatctctggacaagaatggtgtggatctcctaatgaagtatatttataaaggatttgagagcccgtctgacaatagcagtgctatgttactgcaatggcatgaaaaggtaagttatgaattataaatctatatgactggttcttttacaatagggaatgacaatgacaacctctctcacctaaataaccattttgatttgttgtacatttttgttattacaaataaaatgcatgaaaaggatagttcatatttatgtttactagccttggtcttaagagattctgattccaacacttgtgtttattcaacaatgattattagtaattaaacataatcttgaactctgaattaaatcaaaactttgtaaaagaaaataagcaatacaaatcaagaattctttcacagtgaccaaaaggtgaaaacaacacaaggatcataacagatgaacagctaaattgtggtacatacatacaatggaatatgattcaaccattaaaaggaatgacattctgacacatgctataacattaataaaccttgaaaacataccaagtgaaatgagccaaacacaaaagaactaatattttataattttacttatatgaaataatctaggataggcaaacacaaagggacagaaagtccttagaggttactaggaagtagggaaagcaaggaatagggagttagtgcttaataggtacagagttcctccttggagtggtaaaaaagttttggaaacagatagtggtgatggctacagtacattgtgaatataattaatgccaatggattttacacttaaagatggttaaaatggcaaattttgtgttagatattttacaacttttttaaagaattaggagtttggaggatcaagaattcttaaatcatgtttttctattttcatgtgtatattttgcaatgtaagtagatgctggtacatcatctgtcaaaagagtataagtgattttgagctttgggtaaaaaactggataacatgtaaatagaaccagtcataaaaatattgagtgtttgaagtgtatctgagtgaaaacacaaacataagaaaaaagcacatagtaaaacaatagttcccccttttactctaaaatgcaccaatttgggtagtaatttatatggcaccctattcatggaacactttctgttgccaggtaccatactattaatgttttatttaacctttacaacaaccctgtgaagtatataaatatctttatcatcctcaatttacagatgaaaagctagctttaaaacccaagcagcgtagttctagcatagcctcaagattgcagtgaacattgattacttattatattccacatattcttcaaaggactttataaatattaactcatttaatcctcataaaaatggagggaaatgcttgctattattcctcttttgtcactgaggaaactgaggcatgtgtgaagtcttcatttcttccaaatgtcagtcaccagtttttaccaatcttcgaagtatttctgaaatctatctgttcaagcgtatctaatgcagctgttcacagcatctctcccagtctgttgccatagcttcctgactggtttcccagttaacagttttgcctccttcaaatctgttctccacccagccatcaaaatgatatctttaaaatcaaaattgcccttgtcagtcacctgcaggataaagtcaaagttcccaagtctagcttcatcttccatgtcattcttcccctcaggctatagcaatgccagcctttttcctgaatgcaccatattgtttcacacctccatacatttgctcatgattttctggtgttagcctgtcacctactcattcttttaatgtgtcatttcctccatgaagccttagctgaaacattcctctatactgttaatctgggtataagcctctccctggtgctttaatagcacctgcagcacaactctcatttcatacattagattaaaattacctgtttatatgtctgtctcctcatgctagaccagaaaatgctgtatttgttcacttttgtatccccagcatctagcacagtactcagtatacaaaggtattccataaatattttttgaacagaaagaaaccagagctcagattcctaatacttgatcattactctctatttttcaaattagagtcagagttaaagtttctaagttcttagctattaaacaataccttctttctttgggagaaaaaaaatctgacaaaggctgactaatcgaagtggaagttgggatggttgatcccagtttgaattttcttctgactatgtggtgagaatgagaaatgcagaatgtccacctgttttgagcaggaacactatgctgcagattttttttttttttttttttttttttttttgagacggagtcttgctctgtcgcccaggctggagtgcagtggcgcaatctcggctcactgcaagctccgcctcctgggttcacaccattgtcctgcctcagcctcccgagtagctgggactacaggcacccgccaccacgcccggctaattttttgtatttttagtagagacggggtttcaccatgttagccaggatggtcttgatctcctgacctcgtgatccgccggcctcggcctcccaaagtgctgggattacaggcgtgagccaccgcgcccggcctatgctgcagattttttaaaacattatttagaattaatgtactaaaatgtaaactagtatctcactagaatgtaacttcatgagggcagggactttcaaggttttgtttattactgtaacctcagtgccaagaacagtacctggtgcataattggtgctcaagaatttattatttgttaactaataaattcagggtctatagcagtgcccattccttctttaagaaaaatgttttaccaaatatgagaattgaccttttattattctgtcaacatttacatcttggtttgtttttaggcacttgctgctggaggagtagggtccattgttcgtgtcttgactgcaagaaaaactgtgtagtctggcaggaagtggattatctgcctcgggagtgggaattgctggtacaaagaccaaaacaaccaaatgccaccgctgccctgtgggtagcatctgtttctctcagctttgccttcttgctttttcatatctgtaaagaaaaaaattacatatcagttgtcctttaatgaaaattgggataatatagaagaaattgtgttaaaatagaagtgtttcatcctttcaaaaccatttcagtgatgtttataccaatctgtatatagtataatttacattcaagtttaattgtgcaacttttaacccctgttggctggttttttgttctgttttgttttgtattatttttaactaatactgagagatttggtcagaatttgaggccagtttcctagctcattgctagtcaggaaatgatatttataaaaaatatgagagactggcagctattaacattgcaaaactggaccatatttcccttatttaataagcaaaatatgtttttggaataagtggtgggtgaataccactgccaagttatagctttgtttttgcttgcctcctgattatctgtactgtgggtttaagtatgctactttctctcagcatccaataatcatggcccctcaatttatttgtggtcacccagggttcagagcaagaagtcttgctttatacaaatgtatccataaaatatcagagcttgttgggcatgaacatcaaacttttgttccactaatatggctctgtttggaaaaaactgcaaatcagaaagaatgatttgcagaaagaaagaaaaactatggtgtaatttaaactctgggcagcctctgaatgaaatgctactttctttagaaatataatagctgccttagacattatgaggtatacaactagtatttaagataccatttaatatgccccgtaaatgtcttcagtgttcttcagggtagttgggatctcaaaagatttggttcagatccaaacaaatacacattctgtgttttagctcagtgttttctaaaaaaagaaactgccacacagcaaaaaattgtttactttgttggacaaaccaaatcagttctcaaaaaatgaccggtgcttataaaaagttataaatatcgagtagctctaaaacaaaccacctgaccaagagggaagtgagcttgtgcttagtatttacattggatgccagttttgtaatcactgacttatgtgcaaactggtgcagaaattctataaactctttgctgtttttgatacctgctttttgtttcattttgttttgttttgtaaaaatgataaaacttcagaaaataaaatgtcagtgttgaataatttatttttctctgactttaacaattatgaatgtatggttaattaagaggaaaggttttctgcttctaccaccaagtactgtactcttaacaagaacagtttggtagggtttttataagactatatagatataagatgatagagaagagagtcatgaatgatgtcagagcactactgaagcctttggagtgattccatagccttctggatggcagctgaatacctatatgtagtatcactgcccaaagacctagactagaaagtgcaaagtagcttagcagctgcagtcattcattcccagcctccaaaattctctttctttcacctcaaatctatttcttgtacttacctactcacagcgacttctgtttgctttcgatcttcacctgactagattcccactttaaaacacttccaggcaattcagggtcctatgggtgaagataagctaagcaataggtattattcttaaatattacttagagatggggacttgctatgctgcccaggctggagtgcagtggctgttcacaggtgtgatcatagtgcactgaggcctcaaactcctggcttcaagcagtcctgcctcagcctcccgaaaaggtggaactacaggcacatgccactgtgccttagccaataggtattagaggtagtcaagtaggtatagcataaccaattacaaactttaaaatcaaatgatactgaatgctttttcataaaatccttcttaacatcactttcataactgaagcgtttggaaaaattctggagttcatatttgttcacaagaatgggtgggtgtatttagaatctgccagtctatcagctttactgaggggagatactaaaaatatttaacaagtagtataatatagagaccgagtcaaaatggatactagctggaaacaactggttcaactgttgcctcctgactaaatgtcagcccagggtatagtaaccatgacacagtactatccttggtgaagagttgggaataggattaattgcggaaaaaatatatataaatgccataggacacttttagcacaaaagtagttgtttacctcccattctcctcctttaatctcagtgcttttactatttggtttcttttttggcattttacaaaagggaagaaatggaaaacataccccttcttggtcattgggtaacagcaccatttcggtaacagtcatacttgatgacaagtatgatgatattttaaggacatgaacatgggtgaaatcaatgtgtagatggtacaaattaaccgaattctttttaaagcatttcctgtggatcccaggatcatgaggacataacagaagaataaggtctgaatcttgttcaccagtttgctctcagcctaattgggaagtaaggttaagcacctgaaaattatgtcatacaaaaaaaaagagaattaacgtcatacaatttagcatttgactgtaaatgcagttagtcaatgttgggagaacaacaaaatcaggtggatcagagtatttaaagtgagacattaatttgaactaatcctttggaggggcagaaaggacaaacggtccaagtgaaatgaacagagtagaaagagaaagttaaaagtgggtttaatagtcactgttcctgcagttttaatgttttttgttttgttttgttttggtttggtttgttttttttgagacagagtctcgctctgtggcccaggcgggagtgcagtggcgcgatctcggctcactgcaagctctgcctcctgggttcacgccattctcctgcctcagcctcccaagtagctgggactacaggcgcccgccaccacgcccggctaattttttgtatttttagtagagacggggtttcattcaccgtgttagccaggatggtctcgatctcctgacctcgtgatccgcccacctcggcctcccaaagtgctgggattacatgcgtgagccaccgcgcccagc

SEQ ID NO: 1502 - DNA, 12650 bp, Homo sapiens
ctgcaaatatttgttcttcagtgtaatacacacagcacaactaccatttccttcgtcttagtgcctttatctcctacattccagaaatggggatgtcaaatatttttttaaatctggcctagatggaatcatataaatctcaaatcataatataaatcttaaaggtctggtttccaccaatccttccacattttgttttcccccagcactagagagcctaacctaccctcacccctttcgagcattcttgctccaaacgaccacctattttaagatgtcaatgaccctttcccaaattctacaaattcaccccagttttgccacccgaccccagcgcctgcccggacacgttcccctccctcccaatagatttgataccgagttcaggttctgcagatcccgttgcgatgctgtcacacagcactgacagataagatttgacctttcgactccgtccttggggacttcccgctggccaagaagggtagttccaatcccaggaaacgggcttcctgctcaggaacgcagcctctagcagcgcacagtctgaggcaatgtctccggcaattagaacgatgctgggcgcccgggtgtgcatcactctgcctcatactcctaccaactgcagggcactcggtccggcagccagtccatcccacccacagccaagtcccagccagccggaccttacgcaggaccccgatgataggtcgttgacggctgcagcaaaagccaaggccacctgccgctgctgcccatccccgccaatctgagaccccctagactggaccgcagaaaagcgtttctatgggaacccccccaccgagaatcacgtgacgcaatcggacgaccaatcgcttcttacctctgcccgcggtccagcttttggccctccctctcgcccccgcctccttcgcccagccccgccccttgcctgcggagagcccgcgcctgcgcgctgtgtcctgcgcgctccttccctcgcgcgcgctctccgtggaagagcaggggcagcgtgggaggcgccaagggagcgcgaacctgaggaggaagaaacggggctagcgcgcaggcccagaacggtccgagccgcggcagtcggcgacgcctcagagcggaagagggaagtgaatcaggcgccgggtagtgggttgctgggctgggcttgctgaggtagaggcagcgccaagaagaggcctttgccgctggtcgggattgggatgtcgaagaacacagtgtcgtcggcccgcttccggaaggtggacgtggatgaatatgacgagaacaagttcgtggacgaagaagatgggggcgacggccaggccgggcccgacgagggcgaggtggactcctgcctgcggcaatatccttgcattcaccgccctccccaccccagcccagcccagcccgcccttctcctgggacccgggagcctgcaggatccgcggggcaccggcgcggagctgccctctcaacctgcggcttaacctgtctctttgggatcgcccgctctgagagggcaagggggaagcccccgtttcctacccagtcggcaggagacgcgagggtcccactcttggaagcctgccctcccccgcgcgccttccacgcccccagattcctcaggttgcacccgagtgcctgcctgcctcgggaactggtcccgccggccgcgccctcgcggcgctggggaaggcggccccggctggtggggaaggctggtgccgagcgccttagtttttcttcctagaactctgatttcctggggtcacattagctccagaaatttctgattgtggggaacctgcatctttccttagtggttttgttttttgttgtgtttttgttattggtagcgttaaggtagtttattccttaccggggggcggggggagatgggactgttcgaaaattgagggtccctgtgctttcagcccattggcctttttaaaaaaaaaaaaaaaagaagaagaagaaggggatttggcaaaatatacattgtacagaatttgttaactgggggaggggaatgaatacaaaaaatacaaaactcctagaaggaagcttggagccttttacctgctaagaaaaggacaatagaaaaaacaacggggaatgcgtgtggagaatccttggaaatatttaaaataaaccccaatgaataagatagaagatgagtcattcgtataaagcagaatcatttttgtaatcctaaaattgtttccattttagttaaaatatggcagtcagttcccggtttctgtttttgcatatttgaatattcataactttggcttcgcatttgcattacatcttttttagaaaaatgtaaatgttgcaaaaaaaccgaagctgtagttttagaaaatctcagacactgaatttgtatgcatttctaattcttgggtgtattcataaggaagactctcaacaatgtcctgttatagtggggaaatatgagagtgaaaatatttaatggcaacaatatccttttttaaaggcacctaaatagagcattagacatttatcaatatatagatagtgctttgccacaactttcacaattaattagctgttgctcttttgcattatttaaatacttaagtgcttggagttataaaaaatgagctaatctacatcaggcatgcttctctagaaatccctgcagccttgaaaataacagcttgtcaaccagagattttgtgtaagaactttttctttagaaaataaatggtgaacatgcttcctaaaaacattatttgtgatggatagatggtgttttatgaaaccccagtgtattttaggtaatttgtggtgacttttaaatggtactgctgtatccatatcagtggatctgctttttgatcagttcatcttaaaatataaagatactgtctcttcttaccgttacatacagccaggaaagacagccctagtggtggggtactagagttggaggaacaagtgaactctgtggttttccttttaggggaatgtttgtacattctgacagtctgattggccttctgtttctcatgcttgctaactcactagtgctttcaaagagagcctgaatttaataggtatggtctaacacagtttgaataacctttgtgaaatatgagagaaaatatctaaagcaaaaaattaagctgccacctaagggacatatgaattattacatcttctgtgatgcctcttttcatcaatattgagagattgctaatgtgtatcattcagattgctaatctgccagcatgttctaccagcatttcagataatacagaatatggttctagcaaaagtttggtctttattttttcaattagaatcacaggaaaagacatattttggttgataataggttatttcatttgggggactaataattctgatatatattttaggatttctttaacaccactctaggtaatgtttgcatatgtatctcactgggaaatgaaagactatcaaggtgttcacttgatagttagaaccaagggtgaaacagtctttgctttattaaaaaaaagtctaatgttctattttgcttttgatattttgcctttgattaacatcctggaaaccaacacattgaatttccagtattgaacatagtgaccaaagtaattttctttttatatgtaaatcaagtcataagaaccagtggttataatgctttcctgggggccatcctttgctgttacacccttaacttccatcacaggaaacatgacagctgccctacaggcagctctgaagaacccccctatcaacaccaagagtcaggcagtgaaggtgagtcgcagactacaacacagtgatctctgctgatatcttattcttagtaaaatcctctgcagttgcaaaaaaaaatcaatattttaactgtttgctatctttgacatagaagagtttataatgtagtttgataggtaaaaatttcacgtgaaaaaatagccctataatgtagttatgataatgctgcatggtaagatacagtaagttcaaacgatagtgaaatcatttgtgtgtgtttttagaggagaccactcaggctgaatttgagcaaaggtttgaaaaataagttaaacctttacaaaaataaacagattgtaattgctttttaaagattttttaaaaccatacaaatactaaatacttattatagaaagctcagacatatgagaaggttaaaaagatagtggtttgtggtcccagcacccagagataacagttactactttggggccttgctgtattgttacagagttcccttttgtttttttaagaatgaaattttataacgtgctttttcagctatatgcaatgtacatgagctttccttcgcaataagtttatagcatttttaacacttgtatatggataagctgcagtgtatacataactaatcttttgttatatatttagactgactttttttttcctattgtaaaccactgaaatcaatattttttggtaaatttttaattgttctctttgagtaaattgctagcagtgaattactggatcaaagaatgcacttttttttaaggcttttggtatgcagtattgccaaattgcccttcagaacagttgtgcaacttacattctctgcagtcttttactaattcttaacctatttacgtatttatttaaaatgatgcccatagcatcaaccccgttgtccatagctattcatacatcctaggagcttcaagaatctcaattgaatagtagtaagtaataacttaggtaaatgcataataattatctaggtaacataattttttattggggaaaatttctttggtttttacaagttgtaaagattgtcgttgaaatttcatttttaccgtggatgcaaagatatttttctaaatctggtaattgcagtctttaaaccaaagataacagtaggtggtagaaacattctgtgaaatcctgaccagtaggaatgctggaggtatcactttgtgttgaatggaaggagaaacgaattgttgaaaaggtcagttaagtgtttcctttgcttggccggatgggtaagaaaataactgcttttgaagcaggcttttgccaaagaaaaaagatcattattaatgaacatcactatatttcatatctacagtcaattcatataaattacagtcaattttcttttaagacagcttggtttattaaaatttttaaataaaaaagtttttaagaaaaaattacttctgaaggataattcaaggtgaaactgcaaatctgcctccttgttttgttgggaattttttttttttttttttttttttgagacggagtctcactctatcacccaggttggagtgcagtggtgcaatctcaactcactgcaccctccgcctcccgggtttaagcaatcctcctgcttcagcctcccgagtagctgggatcacaggcacacaccaccatgcctggataatttctgtatttttagtagagacagggttttaccattttggccaggctggtctcgaactcctgacctcaggtgatctgcccatctcggcctcccaaagtgctgggattacagctgtgggccaccacacccggccgttttgttgggattttttttttttaagatcaagacataaatttaaatgttgttttaataaattgttaaattatcacattgatctgttagcaaatcctctcagctctgccttcaattatgttaatagtctgtctagtttcttaccacctccactgctactatgcttaccacatccagcctgtattattgcaattgcctcctaattgctctccctgcttctaccttatcccctactcccacagcttattttctgtaacatagatgccaaagcaatcctgttaaaatgtgagtcagattatggcactgctcttaaaaccttccaatgtcttctcatttctctcagtaaaagccaaactccttacaatgcctgtaggccttacacgatctgtcctcccataacctctgacttactcacgtgcttttctcccaccaatccactccaaccacattgggtttttttctgttcctggaacacactgaacacacactaatagcactgttctttcctctgtctgaaacactttcctcagttatcccaagccttctttcacgtccttcaggtccttactcaaatgtcacattcatagtgtagactttctgaaattctaaaccctcctcatacagatatgtctaaatgttctgttatttattgacccaccaggaccgggcaggcagcattgtcttgaaggtgctcatctcttttaaagctaatgatatagaaaaggcagttcaatctctggacaagaatggtgtggatctcctaatgaagtatatttataaaggatttgagagcccgtctgacaatagcagtgctatgttactgcaatggcatgaaaaggtaagttatgaattataaatctatatgactggttcttttacaatagggaatgacaatgacaacctctctcacctaaataaccattttgatttgttgtacatttttgttattacaaataaaatgcatgaaaaggatagttcatatttatgtttactagccttggtcttaagagattctgattccaacacttgtgtttattcaacaatgattattagtaattaaacataatcttgaactctgaattaaatcaaaactttgtaaaagaaaataagcaatacaaatcaagaattctttcacagtgaccaaaaggtgaaaacaacacaaggatcataacagatgaacagctaaattgtggtacatacatacaatggaatatgattcaaccattaaaaggaatgacattctgacacatgctataacattaataaaccttgaaaacataccaagtgaaatgagccaaacacaaaagaactaatattttataattttacttatatgaaataatctaggataggcaaacacaaagggacagaaagtccttagaggttactaggaagtagggaaagcaaggaatagggagttagtgcttaataggtacagagttcctccttggagtggtaaaaaagttttggaaacagatagtggtgatggctacagtacattgtgaatataattaatgccaatggattttacacttaaagatggttaaaatggcaaattttgtgttagatattttacaacttttttaaagaattaggagtttggaggatcaagaattcttaaatcatgtttttctattttcatgtgtatattttgcaatgtaagtagatgctggtacatcatctgtcaaaagagtataagtgattttgagctttgggtaaaaaactggataacatgtaaatagaaccagtcataaaaatattgagtgtttgaagtgtatctgagtgaaaacacaaacataagaaaaaagcacatagtaaaacaatagttcccccttttactctaaaatgcaccaatttgggtagtaatttatatggcaccctattcatggaacactttctgttgccaggtaccatactattaatgttttatttaacctttacaacaaccctgtgaagtatataaatatctttatcatcctcaatttacagatgaaaagctagctttaaaacccaagcagcgtagttctagcatagcctcaagattgcagtgaacattgattacttattatattccacatattcttcaaaggactttataaatattaactcatttaatcctcataaaaatggagggaaatgcttgctattattcctcttttgtcactgaggaaactgaggcatgtgtgaagtcttcatttcttccaaatgtcagtcaccagtttttaccaatcttcgaagtatttctgaaatctatctgttcaagcgtatctaatgcagctgttcacagcatctctcccagtctgttgccatagcttcctgactggtttcccagttaacagttttgcctccttcaaatctgttctccacccagccatcaaaatgatatctttaaaatcaaaattgcccttgtcagtcacctgcaggataaagtcaaagttcccaagtctagcttcatcttccatgtcattcttcccctcaggctatagcaatgccagcctttttcctgaatgcaccatattgtttcacacctccatacatttgctcatgattttctggtgttagcctgtcacctactcattcttttaatgtgtcatttcctccatgaagccttagctgaaacattcctctatactgttaatctgggtataagcctctccctggtgctttaatagcacctgcagcacaactctcatttcatacattagattaaaattacctgtttatatgtctgtctcctcatgctagaccagaaaatgctgtatttgttcacttttgtatccccagcatctagcacagtactcagtatacaaaggtattccataaatattttttgaacagaaagaaaccagagctcagattcctaatacttgatcattactctctatttttcaaattagagtcagagttaaagtttctaagttcttagctattaaacaataccttctttctttgggagaaaaaaaatctgacaaaggctgactaatcgaagtggaagttgggatggttgatcccagtttgaattttcttctgactatgtggtgagaatgagaaatgcagaatgtccacctgttttgagcaggaacactatgctgcagattttttttttttttttttttttttttttttgagacggagtcttgctctgtcgcccaggctggagtgcagtggcgcaatctcggctcactgcaagctccgcctcctgggttcacaccattgtcctgcctcagcctcccgagtagctgggactacaggcacccgccaccacgcccggctaattttttgtatttttagtagagacggggtttcaccatgttagccaggatggtcttgatctcctgacctcgtgatccgccggcctcggcctcccaaagtgctgggattacaggcgtgagccaccgcgcccggcctatgctgcagattttttaaaacattatttagaattaatgtactaaaatgtaaactagtatctcactagaatgtaacttcatgagggcagggactttcaaggttttgtttattactgtaacctcagtgccaagaacagtacctggtgcataattggtgctcaagaatttattatttgttaactaataaattcagggtctatagcagtgcccattccttctttaagaaaaatgttttaccaaatatgagaattgaccttttattattctgtcaacatttacatcttggtttgtttttaggcacttgctgctggaggagtagggtccattgttcgtgtcttgactgcaagaaaaactgtgtagtctggcaggaagtggattatctgcctcgggagtgggaattgctggtacaaagaccaaaacaaccaaatgccaccgctgccctgtgggtagcatctgtttctctcagctttgccttcttgctttttcatatctgtaaagaaaaaaattacatatcagttgtcctttaatgaaaattgggataatatagaagaaattgtgttaaaatagaagtgtttcatcctttcaaaaccatttcagtgatgtttataccaatctgtatatagtataatttacattcaagtttaattgtgcaacttttaacccctgttggctggttttttgttctgttttgttttgtattatttttaactaatactgagagatttggtcagaatttgaggccagtttcctagctcattgctagtcaggaaatgatatttataaaaaatatgagagactggcagctattaacattgcaaaactggaccatatttcccttatttaataagcaaaatatgtttttggaataagtggtgggtgaataccactgctaagttatagctttgtttttgcttgcctcctgattatctgtactgtgggtttaagtatgctactttctctcagcatccaataatcatggcccctcaatttatttgtggtcacccagggttcagagcaagaagtcttgctttatacaaatgtatccataaaatatcagagcttgttgggcatgaacatcaaacttttgttccactaatatggctctgtttggaaaaaactgcaaatcagaaagaatgatttgcagaaagaaagaaaaactatggtgtaatttaaactctgggcagcctctgaatgaaatgctactttctttagaaatataatagctgccttagacattatgaggtatacaactagtatttaagataccatttaatatgccccgtaaatgtcttcagtgttcttcagggtagttgggatctcaaaagatttggttcagatccaaacaaatacacattctgtgttttagctcagtgttttctaaaaaaagaaactgccacacagcaaaaaattgtttactttgttggacaaaccaaatcagttctcaaaaaatgaccggtgcttataaaaagttataaatatcgagtagctctaaaacaaaccacctgaccaagagggaagtgagcttgtgcttagtatttacattggatgccagttttgtaatcactgacttatgtgcaaactggtgcagaaattctataaactctttgctgtttttgatacctgctttttgtttcattttgttttgttttgtaaaaatgataaaacttcagaaaataaaatgtcagtgttgaataatttatttttctctgactttaacaattatgaatgtatggttaattaagaggaaaggttttctgcttctaccaccaagtactgtactcttaacaagaacagtttggtagggtttttataagactatatagatataagatgatagagaagagagtcatgaatgatgtcagagcactactgaagcctttggagtgattccatagccttctggatggcagctgaatacctatatgtagtatcactgcccaaagacctagactagaaagtgcaaagtagcttagcagctgcagtcattcactcccagcctccaaaattctctttctttcacctcaaatctatttcttgtacttacctactcacagcgacttctgtttgctttcgatcttcacctgactagattcccactttaaaacacttccaggcaattcagggtcctatgggtgaagataagctaagcaataggtattattcttaaatattacttagagatggggacttgctatgctgcccaggctggagtgcagtggctgttcacaggtgtgatcatagtgcactgaggcctcaaactcctggcttcaagcagtcctgcctcagcctcccgaaaaggtggaactacaggcacatgccactgtgccttagccaataggtattagaggtagtcaagtaggtatagcataaccaattacaaactttaaaatcaaatgatactgaatgctttttcataaaatccttcttaacatcactttcataactgaagcgtttggaaaaattctggagttcatatttgttcacaagaatgggtgggtgtatttagaatctgccagtctatcagctttactgaggggagatactaaaaatatttaacaagtagtataatatagagaccgagtcaaaatggatactagctggaaacaactggttcaactgttgcctcctgactaaatgtcagcccagggtatagtaaccatgacacagtactatccttggtgaagagttgggaataggattaattgcggaaaaaatatatataaatgccataggacacttttagcacaaaagtagttgtttacctcccattctcctcctttaatctcagtgcttttactatttggtttcttttttggcattttacaaaagggaagaaatggaaaacataccccttcttggtcattgggtaacagcaccatttcggtaacagtcatacttgatgacaagtatgatgatattttaaggacatgaacatgggtgaaatcaatgtgtagatggtacaaattaaccgaattctttttaaagcatttcctgtggatcccaggatcatgaggacataacagaagaataaggtctgaatcttgttcaccagtttgctctcagcctaattgggaagtaaggttaagcacctgaaaattatgtcatacaaaaaaaaagagaattaacgtcatacaatttagcatttgactgtaaatgcagttagtcaatgttgggagaacaacaaaatcagggtggatcagagtatttaaagtgagacattaatttgaactaatcctttggaggggcagaaaggacaaacggtccaagtgaaatgaacagagtagaaagagaaagttaaaagtgggtttaatagtcactgttcttgcagttttaatgttttttgttttgttttgttttgttttgttttgttttgttttttttgagacagagtctcgctctgtggcccaggcgggagtgcagtggcgcgatctcggctcactgcaagctctgcctcctgggttcacgccattctcctgcctcagcctcccaagtagctgggactacaggcgcccgccaccacgcccggctaattttttgtatttttagtagagacggggtttcattcaccgtgttagccaggatggtctcgatctcctgacctcgtgatccgcccacctcggcctcccaaagtgctgggattacatgcgtgagccaccgcgccc

SEQ ID NO: 1503 - DNA, 528 bp, Homo sapiens
ttctgtggcatcaccttctaagagcagagatgtgacccaataccccttgttttccttaaagataaccattaaattatatccatgaatttatatcaccgtccttgactttatacgtagatttttctaattctgtcaacccttagggtaatgaataacttaaatggccaatgcctctgaataacatcatacttccttttgtttctccaaaaattgaatcaagatgccagggcaactaagattttcttcaatttgctaagttaaaggtcagtgtattcattagccaatggttctgtattttattcattttagtttttattcgttttcaaataatttgttcatattgttcaatattcaaaaggtaagaaatatgtactgtggtaattttccattccaccctagttcctcttttgacaaccaactattgtcacttaattcttaggcatccttccagatacagtgtatgcatttacaggcaaatacctatataagattttacccctttgtgtacataaatactaacatactata

SEQ ID NO: 1504 - DNA, 528 bp, Homo sapiens; identical to SEQ ID NO: 1503

SEQ ID NO: 1505 - DNA, 540 bp, Homo sapiens
  SITE (180): n equals a,t,g, or c
  SITE (297): n equals a,t,g, or c
  SITE (332): n equals a,t,g, or c
  SITE (333): n equals a,t,g, or c
  SITE (344): n equals a,t,g, or c
  SITE (450): n equals a,t,g, or c
  SITE (483): n equals a,t,g, or c
  SITE (489): n equals a,t,g, or c
  SITE (500): n equals a,t,g, or c
  SITE (521): n equals a,t,g, or c
  SITE (527): n equals a,t,g, or c
tagggactgcagcccagccccagcttctctgcccactcatttctagtccagccgcatttcagcagtgccttctggggtgtccccccacaccctgctttggccccagaggcgagggaccagtggaggtgccagggaggccccaggaccctgtggtcccctggctctgcctccccaccctgnggtgggggctcccggccacctgtcttgctcctatggagtcacataagccaacgccagagcccctccacctcaggccccagcccctgcctctccattatttatttgctctgctctcangaagcgacgtgacccctgccccagctggaacctgnncagagccttangaccccggttcaagtgcactgcccggccaagccccagcctcagcctgcgcctgagctgcatgcgccaccattttttggcagcgtggcagctttgcaaggggctggngccctcggcgtggggcatgccttcctgtgtgtnctgtantgtctgggatnttgcggtgctcaataaatgtnattctntgaccgtggaaaa

SEQ ID NO: 1506 - DNA, 1184 bp, Homo sapiens
acacctcagttcatcaaccccttaataatatcagcttaattttaatgacaactaaatatgctgaagtgaggatttagtattttttaaaaaagcaaaacaaggttcagtagtcctcagcaattctccaagtttctctctttgcctaaaatggtcatagatcttgatttctctgaatcgtgatgaccacacccagtcatcttcacagcataattgcaggtggcagtaaagagagtgtgctgggtaaggagcagttgctgggtcattccttgggccccgacctgcccggggagtagccctgggggagagagggcagtgttgcctatcccagaggtcccagcagtcacactgctctgcaggccgggctctctttatagccagagaaatcaccttaatgcagtctctttagttgtctgctgaagctgtagttattatgggccacttacatgaggctgagaagtacgtgccggagctcacacactgcctgttgcggttctcttaacatcagttatcacagctgcctgtgggtcccgggtatttccattcctgccccttgttggcccgaggaaggatgtggaaagagcacctggtgggatgaaggtccaacagcctgtgcctctccactgctggccctggagccggcagcagtgaggcattcattgtctgtgttgcggtgtattcccagcttcagtgctcttttcctttttgcctgaaatgtttatgcttctctgcagccagtcctctaacaaatctcaagaacaaaggtaagacacttggtttttgtttccaggacccttcagaaggtgacatcagatattccctaaattcagacaatgagggatacagagcgacttggcatgtattatttctcccatgtaaggacaaagggacagattattattgttatttctgagacagagtcttgctctgtagctcaggctggagtgcagtggctcaatctcagctcaccacaacctctgcctcctggcttcaagcgattcttctgcctcagcctccccgaatagttgggattacaggcacccaccaccacgcctggctaatttttgtatttttagtagagatggtttcaccatgctggccaggctggtcttgaactcctgacctcaggtgatcctcccgcctcagccttccaaagtgctgggattacaagcatgagccaccgcacc

SEQ ID NO: 1507 - DNA, 1184 bp, Homo sapiens; identical to SEQ ID NO: 1506

SEQ ID NO: 1508 - DNA, 1184 bp, Homo sapiens; identical to SEQ ID NO: 1506

SEQ ID NO: 1509 - DNA, 1738 bp, Homo sapiens
gagaaacagcatgcaaaacatttgaaccattttctacatctcccattgttgcatagagagtgtgcaccgctgctatcttgccagatccacactggtcctcccgaaagccaggttcatacacagcaactttttaattattctaacagttacccattaacagtcgactcctgtatttctgagagtcttgtactcacctctgaaatttaaaaacgtataaagagagcctgggttaatcagttctgcagcccctacgtgacactgtgctagttctccttcttctgtctcctccttaccctggccctgcacccctgtacttaagagggagaggtgggaggtgctgtctggtatcatttgctgcctcgccagtagagggtgccgctgtgcagggtaactgcccgcctgctcccttcctgacctcccctgaccccgaagatcactacctctgtcattcaggcattggggtacatcctgataagtcgtgtcagaactgccaatttcaggactgagatgtgtttttaaaaaacaaatccttataaactccactttgtactttagattttaaaactggggaaaaatgtgatattctttggaccacttttttaatttatataagccttaatgaacagtgtctatacatttgcatacacacacccccaccccagagtgttctcagtatgtcagagaaagtgccacagcattaggacgggagcttggagaacgttttctagaaaagggttagcttcctgttggcatgaaattttccaagcaaacctcattaaacatctgttgtttgttaaagatgttccactgaaagcaacgcatgtttcaaaggcacgtctttccgttcgttggttttctgtgtgtaaggagtagcattgctgttggcgcctaacctcgcgtgcactgcattctcaaccccgtaccagtgcatcatcagaagccttcctcgtgaccataactctgtgtctgcagatatgtgttcccgtgtaagccagttttccccttttactcagactgatttcacctagattgtcacggtttccttcatgttaactttgcgtgactttgttcttcctttactactctgtatgtaatatatatacatatatacgtacatatgctgtccaaatatatttgtatatatttgtatagcatttttacacctttattgagtaatctggtttcgaaaggaggtgagagtttagtcccttctgcagttttctccaagctgtgtcctgtgaatttcaacccttggagcctaagaaaaccctaggaagatgatgttaatttgctgtcatttcctaattcaggatctatcatcaaatgaaacatgaaaaaaacagtgacttttaaggtgaaaagagtttcaagcattccaaataaattatcaatgtttcataactttttattataaacccacctcctaataggaagccaagtactatttgatacagtggtaaaaaccaaactaccttgaatttttttaaggcaacttatgaataatgctcattttcacagtcagaatagctttaaaatatggttgaatttgatacacacaggaagttttcttgaagaacaatcctttcgcttttcttttttcttgagagatctaaagagaaactgtagattgttttcctgacagcaaaagactaatgtgacaaaatgaagtcattgtaaagaagcgatgcaacttgtcaaatatttaataaagaattatggaagctggaacattttctac

SEQ ID NO: 1510 - DNA, 1738 bp, Homo sapiens; identical to SEQ ID NO: 1509

SEQ ID NO: 1511 - DNA, 304 bp, Homo sapiens
caaaaaaaaaagggggaaagaaaaaaaaaaaaaaaaaaaaaaaaaaaaaaaaaaaaaaaaattcccgctcatgagttttgactattggtgagatgttttccgctacagttaacatgacaaatgtctcagtggcaaaaatcccctttttgtaagcccccatagtctagaggcagttttctttttaagaatcatgccagagcctgagtcgagcagtatgctttcttggtttttgagagtaattgtgtaattgtagagggagaaatccaattctaacctaagaactgggattcttctgtcatcttgt

SEQ ID NO: 1512 - DNA, 32195 bp, Homo sapiens
atgactacttcaggaagaaattaaagaaacctgtgagtaatcatgccttccaaaaatgctttgtgttagtcatttgtaagttaccacagtcacttcagtgagaacaacttggttgttacttttatatgaatgctaaaaatattaccttccttttctctctgcactttgatcctcctggttctaaaatctgaattttctttttaacagaaatggtaagtgaaaattaactcagtgttacatatcaaatcacctgaagggtaatttcctatgtaatacataaaaagacaggaatgatttttatgggatataaaataattcagaaccctagtcacaaaatctgtggaagcctattcaattatgcgcagttatcatatttaattaacctggatcccggtaagaaaaatgttcaagtccttccttgtaaatgcaaaagcttagtttcaactacagtatttataatatagtgttatatttaattataataattggcagtattacgtccaaatgtaattttctacttataattatccctggcagtttaaaacctagaaactctaaaaatttttatgggcaacattttaaattataacattgcattttctaatgacacaccatccccaaattgttcaacattgcatcctctgttttactttccgattcctccttagcagttttctcttcaattttctccatcactatggttacacctctagggaggggagagaagcggctgcagctcagaccccctctggtggcctgggctccattgccatctctccctgcctcctcccctcagctggttcctcctgcccgggaacatctctggatggggcacaatgtctgctctcatttaggggttttggtctctgttccaaagtcctgattcaagagcttgcgggtaactgctattgaaatgattctttgccttcaaaactcaaatgatcactgaaaattccacagttttctttgtgagtcatgtcccctggtaatgatgatgactgtggtcatcacccagtctcactctatggctctcacatagcagtgtctgctacccggaaaccatctctgcacattcattcttacagccagaccaagcctggaccgcctctttgcaggaggcagttgccacaaccttggtcaagtgttttgttattttcatgtcagcgaaccatgctttgggctgctttccccacacttggcataatcaggatcccactccccatggcaacaaaatggacttgaggcagcgtggattatatctaccacctggcggccctgccacagttgagcatggataggcccaacctggccaggtggggattattacaggttttgactacctgggctaaagtctcttgagtgaagcaacagatacagtcgactgcctttcggttgccctatgctggagaagtgcccacagttgtttattaaagggggcaaggaggatgttctccttcgcagcagagttctaactttcctgagcatcgctagtggatgccgtgtgtcccatcgtgacacagcaaggctttctgtctgcaagggaaaacccctaaaggagagaatctcagttggaaccatttgtcactgcctgtttctttgaggactgccaacttttctaccatttgctgttgtttttattagaaaacaaagtgtgtatttactgtatgattatgtgttttcttttgtcttttgtgtaggctgatatccccaataggtttgaaatgaaacttcacagaaataacatatttgaagagtcctatcggagaattatgtccgtgaaaagaccagatgtcctaaaagctagactgtggattgagtttgaatcagagaaaggtcttgactatgggggtgtggccagagaatggttcttcttactgtccaaagagatgttcaacccctactacggcctctttgagtactctgccacgtaagtatatggccacacccagtgtgtgtcccccactgagacagttgtatgaatttaaacagaatgaaaggataagcagctcatgagttcgagatgcattaactctgctgagtttgttctctcctcaccccacagccccttgcaagtctagaacaggttctgactctacgtggtgaaatagtgtactctgcgaacatctaacattgattttttttcttgtctattgggttcatggagttgaaattgaaaacgtggataattatgataaggaacaggaggcgattttcatttgcagtgttcaagaggaggacttgtcagtgttagaattcaaaaacaaaggaggtgttttttgaacaagagtcgtttctgaggtctcctgtgtaaaggcaaattgtaaggactttgaggacctaggaccatgccctgctcctgtaaggaaagaaccaggtttccccttgcattaggatttcatcattgccaggcttggaaactgaggcagactaaattgctttctgagcaattaaacatcagctacttccaggccagccattcctccttcagactctgaatcctccaagggttgggcagtacccaagcccccagtagaatagtcattgaccttgctgaagggcatttgtcatcactccagccctgggctctaaggggacgtgggttcccccacatctcccacctggtaccagtctcctgggggctcatttggaaggccgcctcagtacattcttcctggttgctctagccaagaattgcccaattgatttgttgttactgagtcccatgagaaagcccactatgtacaatgtatccaactattgaaggtggagggcagggtggagagagacaagatctttacctcttctccacattttcaaagatacccccaccccggaggaatcagtctgtgatcccagtttgaaaactactgatccacatgattgtgaaccaagcaagatcatttggacaaatctaaaaatttgcaggtttgcatcattgagagagccatatcctgttcctaatcccctcgaggccttttcagagcagagtagtggtcagaagacagaccaagggttgggcccatagcaaacatcttatggccaagccaaaagcctctggaaggaattaaacttccttcatcacagagacgacctaaagtactcacatctttgggaatccctgcacagcccctttattatgtggcgtttctcatctccccaagatatttggctgaaccatatgaaatagacacttcgtaggtcaaaaacagtcaaacatcagcgtctcttatggtttaattgactttagagggcacatgcgtcagcctccatggtgggtcacggttgagcatgtggtaagtcaggtcctctagcccacacattttcccactaggtacagaatgctcgcagggacactgtaaaagttgagtgacaggtggcaaacaaatatgcaaaatcttgcatttgaaagtgtgattgggcttttcttctctttctcctcaaaagggacaactacacccttcagatcaaccctaattcaggcctctgtaatgaggatcatttgtcctacttcacttttattggaagagttgctggtctggccgtatttcatgggaagctcttagatggtaagtcttgaagtaataaaaataggtcagtgctgcttgcggtttgctagtaggtgtcttatctttcgcatcatgggtttttaagcaaaagcttcactggtttactcataaagtatttttatgttttgcccataatggatgtccttttctctggtagcttattttgggcactgaagacatagtgtctacacacagttaaaaacaaaagtttttttttaacttcagtgtaaaacacagaacattatgtatttatacatttgtatgttttctggaataactttagtgaaagcaagatttgataacagatggaaaaactaattgaaaagttaattaaaatgatctcatctatctaatatcctgtgattattgcgtttgtccccaaattattttttaatttgaagggactaaataatttcaaaataatgttactgcttagctaagacattaaccctgaaacaaataacacaaaataatttcattcttatttaaagcatatagatcatggaagaatttcaaggtaccttgaaagttagaagtcaaaccctctacctggcggtatctataggcttagagacttctaaaagatttggccaattcaaaatagtgtccttaagaaaacactacagaaatcatcagtgagaaaaaagcatcagaaatactttttaagagcctggaggtagagtggttgaggatgggaagagggagagtaggatttgagattgacattgcagtaacttataagaaagatatttccaagggaactgtgttcattgcatttatagagccttagctattctaataaataatttgtataccctctgtacttttcccatgaatatgtttttactgttaattggtagctgatattgatgctctgattttgttgctttatttggtagcagggcgacagtaaacactttttttcctctagaaggaaactaaaccacacactctttccatgtatgtatagtgtgaatatattttaatttccagctttggagtcatgccatagattgtttcagcctgctccaattcactccaactttctcagaaggtcagtttagtcaccgtatgcaagtgagaagatgctgttagttgctacagtgtctttaataccctctctaacagggggtaatagagaagcataagatatgatcctgaccttagtcagcttatattttagcggggggaaaagagatgagaacaaaaccagaagaatcacagtgatagtgtctgagcagaagggagtgcattgagtcctcagaggagaaagtgacttggctggaggctcagggaatctttcccaggatgagctgcacctcggaggtggggtagcatttgagcgttcaaaggctggggtcatttcagatgagtgaggaccagcccagagtcaaggccttgtggaagaagatgggcggaagcaggaaccactcagggtctcaaggagctggctaaagtgaccccgacaagagtgatcacgatataaacctggaattgcacatttaagagtccaagtgcacatagatgggcctagtcagcagtgtcttcaaatttcccacagatgggaatgtccctgtcggcagggctcattctgcacatctgtccgatgggaatgtccctgtcggcagggctcattctgcacatctgtccgctgctccccctggtcggcttcatgcttttacttccccagacactggagtctattggagcctgcatagggccacgctgagccggggagaattggcctgtactgcagagggtgggtgcctggtggggggatgaaggagcagaagcaggagcctggggtgccaggtctggtggggtcaggaccccctgtgaggaggtgcgtgatgcctttggatcaggtgaaatggaggcacctgcaggacgcctgaatggtgggaggccgacctcgctgctgttgcctccctgaggcctctgccgtccctccgcggggggttgcacaggccctctccggggccttccccatttccagcctgtccccttcctgtgctttctccccatcgctgcccaagcaatgataacagaagacagatggaatttcacctggcctttcactgactccccactgccctcagagagcaccccaactctccagcaccccatgtgggctctgcactgccggccccttctctggcctgtctacccgccctggcaaacggctggcaagtccccagccttgttcctctgcttagtgtgcccttttctcccccaattcctacgcctgatttgcactgcggactctgcttgaccttgaagctcatctgtcacctcccagaggcctttctggccccactctgctgcgccatctctcttagcacagctgccctcctcatgccactctccccctgatctcgcctcctcgcttgtgcaatactgtagaaggcccttggttactccttcatggtttctcatttacattgaaagcaggttaatcttttctttcatgctctgatacatagcagtgtcaaagacctgaaactaaacccagtgtttaccgtgttttaggtttcttcattagaccattttacaagatgatgttgggaaagcagataaccctgaatgacatggaatctgtggtaagtaaatgcacgtcacacactggccatcaccgggcactcgtgtcttatgagaaggtattggagagccatatttgtagtctcagccacttttatgggtgttgcattccatgtgaacaacaggagacatttaattgcttgaaaagttcattgatctaattcttgtaataaatcattgttcacatttcctggaaccatggtacctagggtggatacatccaaatcccagttgcctctgcttacccggcataggacttgtgtgaacttactaaatccaagagacagctgaagatctatggtagcctgtgttttctataaaaactgctgctgctgaatgtttagagcttcatccgctctccctctgtttcctgacatcataaaaatggcagaggcaaaggtcaaaacaataggaagagtatcaggcagacgtcctagacatggatgagtgacgccacagctcaggcaagtgaacacttgagacgttctccaagtagtgatttgggttttcatgttgcatttaacattaattttacctagacagaccattttagagttggaaggattttattttttttttattttttttattttttgagatgatgtcttgctctttcacccaggctagagtgcagtggcgcgatcttggctcacttccgccttgcggattctagcaattcccctgcctcagcctctcagatagctgggattacaggcacacgccaccatgcctggctaattttttttttttttttttttttttgtattttagtagaaacgaggtttcgctatgttggccaggatggtctcgatctcctgacctcatgatcctcttgcctcatcctcccaaagtgctgggattacaggtgtgagccaccgcacccagcacggatttgctataaaacaaaaattgatgttctttttataatatacttctgcttctgtttttcttttaatgtacctataccccacatctacctccagagtgtatgggtgtttgcccacacgccagcacacacacagggccactgggaagcgcgtttgtccatttggggtatttgcagctcattcgtgtttgctcacttgagttaaaaagcccctgcatgatgtcacctgcctgtgataccaactgtattttgggcacggttgggtagatgagctgtgtcctcggccctgaccagcgctgactcagtgtttctgttgctcctcattgtatgaaaggagaggaagaggccagcagtgcccttgaacccactgctggtttgccagtcatggtgggttgggatgcacacctgtgattccggtctccactttgaccctgtgtttgtgctttctgctttcatcactgtatgatgaagcagctaggagcacaggaatttctcttaacgtctaactttataccacatgctgacagttagtgcctaaagtacagtgcgtgtattatttttaccctcttcacagcccgtcgtgtccccagcaggagagaccgtggagggaccagggacaggcgcttaggcctgtgactgatcctctggattctgaaaccagagcagccaccctttttgctgacattaacctggagagtgatcaaagcacaagaaaggggataacttaaaactattggtatttacttagttggaacattattttacttatttatttttttggcgatagaatcttattctgtttgccaggctggagtacagtggcacaaccatagttcactgcagcctctatcccctggcacaagtgatcctcctgtctcagcctcccaagtagctaggaccacaggcacacaccaccatgcctagctaatttctttttttttttttgtagtcatggcgtcttgctatgctgcttaggctggtcttgaacagcctcaagccctcctcctgcctcagcctcccaaagccgaggattacaggattataggcatgagccagcaagcccagtctagaacattctttatccttcctgttttcctcagatactttcactctttttttaaactttatttattttttatagagacagggtctcactatgttgcccaggctggtctctaactcctgggctcaagtgatcctcccaccttggcctcccaaagtgctggaattacagcgatgatattttcactctaaaaagatagaaagtatattgaccagcctggccaacatggcgaaaccccgtctctactaaaaatacaaaagtcagccaggtgtgatgtcacacgcccgtaatcctagctactcaggaggctgaggcgggagagtcactagaacccgggaggcaaagattgcagtgagccaaggtcatgccattgcactccagcctgggtgacaagagcgaaactccatctcaaaaacaaaaaaaaaaaaaaaaagagagagagaaaagaaagtatacttatgtctgtatgttaaattttgtagaccagtatggcagctccatccaccatccagagtaggtgccttccactgtgcatcactaaggacaggatttaactgcaagctcattacaactaaagcagtttgtttgtttatagtttaaagaggaaggtttggtttaggtggagcaggaaacattgcattagtaacatatttcttgagcattctgcacagaattacattagaatgtaattaaagaagtcaaatgagtttgtattttggggaaaaaatgctgaattttcactcctgtgtcattctgtaggatagtgaatattacaactctttgaaatggatcctggagaatgaccctactgagctggacctcatgttctgcatagacgaagaaaactttggacaggtacatgtgggtaaccctgggaactcttctttagctttcaaggggcatttttcttcttgacgggctgtaacacaactttgctggaccatcagaaacaaccagcaggagctgcaggtgttaattttcatctcattgtagcagcacctttttgtcatgccaagacgccacactccaattacaaccatttctctcttccagcaaagttacagaaattccaagaggccttggggcatgaaccagcacctcttctaatccaaagcaaatgtgaatgtttcatttgtgcctcggttttagaatttaggtacttgaaaaaatagtgagattgttgacttagcgatgtaaatacatgaccaggagtgggtgatgttggaagggccattggtttttctctctgttttatggttctgttgtcatggcgacatttgtcttgtgaggctcagcatggcaggctccggtttttctaccattccctctgctttgcccccacgctgttattcaggctggactaatcctcaaagtcagtttcagactggtcagcagggatttggatgggccactgaaagtggatttcaaaggtaaagttgcctgcttggaataattctcatcatgctaaggatctatgcgatgtatttgtctcaattctgaagcctttgcttcatctgccactcagtaataatgatgcagcttgggaggtgttctcaatgtattctctgaccctggtacctgtccttccgcaaaagcccagaggtatttcccatccttcagactaaatctccacggctatgaaattaattagaccatagaactcattgtaatggttgccctctgaaaaatgaaatagacgtgttctttattgctagatgtcaaagattgctagagaatctttgagaaaagaagctgatgccactagaggatttaatgacaactgagggtaaaaattgttggataagaaaataatcacattaatatcagaatcacttgttattcccatgtcctgtgtttgagccaggagagttcagtctctagtgtgagtcctggtgtgggtggaacctggggagtccatagggcccttcagtggctaggcaaggctcagagaaggacttcaggcaccagaggcaagagaccttgtggcttaatgtaaatgatcaagtcctttaaaaatctccttttgtgccccctccccactgcccccctttcccggcctcctccccaccccactgtgttgtgctttatgcctgagaatccttacagacaggcggacactgttctcctgcacggggaccttgtgatggggcagggaggggtcttttcagctgctgcccctctggtctccagcagcctccccaggaccgagagtactggtgtctccagccctgtctacctccttcctctgctgcctttgacacaaatagctcactccccccagagacacctgcaaggcacagtgcctttcactccgggctctcacccctccccactggtctccagtcccctggaagtgcatgctcctctgctggccctgtggatgcaggtgtcaccctgccagctgtcctgcacccgctgcttttttgtctcacccttgctatctggatttcctcatcctacctgtggctccggctgcacccatctccgctcaccaccagcctcttatctcaggccggcgtctgccttccagcctccagaattcccaggtctaacggcctcctcaactgcttctcctgagaggctcacgggtcccagtgctaaagccactttttcctccccagcccccacatcggttatggtctcatcagtgccaccactgtcccctcccacctgacacttgggcatcccctcagaatctccctctctcctcatgccatctcccctcctcatgccatctccccgtgcccaggcttgctgtgccccgtgactccccgtccttggcacgtccctgtctgtgcactcccctagccctgctccgatcacttcttgactgctgttctcacagcctcctgtcggccgccccctttcctgctttgctgttctccagtgccctgttctctagtgcctaccctgttctccagtgccctgttctccagtgcccgcctagctgtgagccccttatggactatttctgaaatgcagccctgaaaatgtccttcttctacttggccatcttgtgaccttcagcataaatgaaaactgttagcatggcatatgacccctcataatccagacctacccccctctggcattaccctctgacacctccttcctgtcaacctgtcaacaaacagtgtgccttcaagggtttccccagagatgcttcagtgccacattgctggctcgacactgcccactctgtaccgatgcattctcattctctctcccatcacctctttccctgccatcctcgaggtattgactgacgtgctgtgtgctgtatgccccctgaggtcttctgggtctctccagggctcagcatgtagttgatgcctgccagtgctcattgagcaaacgaatgaggagtgctaacctggcttattaaaaatatgaataaggtggtaagtaatagaaatcctaagtgtgagaaaacaaaatcagtcaagtcttggtggctttttttaaaaagccggacctattgaagggtcttaaactgccaattttcaaacgattagacatggttagtcaccctggaagtatcttcctttcatttttaacatatgaaggaaggagtggaagtaaagaaccaaggaagactgaaagtcagtcttgtgtgtcacatgcattaaaaaagtcttttcgtagattcattcatagaaaaccatatgaccaaattaacccaattcagaaaactattaagccacaatcagaagcaaatgatctgggaaaccttcctaattacatttaaatgtaattgtttccacctcataaatgaaagtcaaacacagggtgttggagtttttaagcaggcctctaataaatcttctgatgatcgttcaggccagattttcattaaaaacagttctcagacctcctcgtttaatgttgtgaattcttctgacttttgggtaggatcaagtagagtaatgcattaatcaaaacagacccatgagatgagtaagataagaattaggtgcccagtttgttgaattactgccttgcctttttgagagagctatcctgattaacagggaactcacgtatttattttgcactctgggaaggaatttagagcaagttaaatagctgcatatggatctcatctcccatatccagtccatcagcgagttgttcacacacctcccaaacctttctcatttctgtgcattctgccgatctcttctctcactcacacccaagtccaagctcccatcttccccactagacccccgacccgtctctacatccaatatggcttcttataatggcagagtggtctttttggaatataaaaatgagcatgtcattcctctgccagaaaccttcaggggtctcccctgcccttgagataaagaccccaaccttactttgtcccacaaggtcctgcgtggcctggctctccctgctcctcctccagactcactgtgaatcacaggccccactgggcttgtccaacacaagccccttcctgcctcaggccctctgctttctcttccatctgttgggagcatactccctcccagtctcagttcaggtgtcccttcatcagggaagccagcccttgacccagaccctatgcatcttccatgcctgccctgtggcatgtaccacagacgactttgcatttgtctgagtatgtttgtgtttagtgcctgtctctcctgctcagcttcctcccgatgatggcagccgcatgcctgccctgtgctcactcactgtcgtgtacttcccacaagcactttgcctggtgcatggtgggtacttgtagttgttgatgtggaaatctaggtgttagcatgatgcccggacaagcctctcacctctttggccctctgcaaaactgttgactctgacccagaagaaagcccattcctccccaatgccaaacagtcaagtcacttccacagtggggcaaagcaagtgcagttgtcatggggtgaaacagacatgcagtcagccttccacggtgtttcaaccttctttttttttaatttcacagttagaaatatcagaccatgaagtttggtagctgttccttcatgtaatgaagctgcagctgttgccattattttgcaatttgttttctttctgattggtaagaatctggggctgctggtttctagggcctaatatgaaagtttccactgaagaaatgtcagtgtttgaactatgatcctgtgccaagcaggaagaataagccgtacccccattcactgctgtgcacacatacctgcccccaccgggaggaggggcccttttagggctgtaacaagtgaaaattctttattgcaagttcagcagagcaacgtctaatttggttatgggtttgtttgtttgtttgttttttgagacagagtctcgctctgtcacccaggctggagtgcagtggcagaatatcggctcactgcaacctctgcctcctactttcaagcaattctcaatgcctcagcctgctgagtagctgagactacaggtgcaagccaccatgcccagctaatttttgtatttttagtggagacaggacttcatcatattgcccaggctggtctcgaactcctggcctcaagtgatctgcccacctcagcctcccgaagtgctgggcttacaggtgtgagccaccgtgcttggcctgatttgattgttttgaagagctgccagaagtttcaagaggctgtgcagtagttggagggagaccatgggcagcagccatataggaaggttctttaggatcgggtcgagccagtctccataggaatgattacccaaagggaacaaggaggacatcatctcagacattgaagtggttagtggccctcccagaagccacagcacattccacaggtgtactgtggatctctctgttaagatttcatggagagaggtgggccactggcagaaagaatctaaaaaggctctttagggggtgataatgaattaaaaggtagagaaacacttgggggaaggcagtgagtgaaaaggcagaaatggtcaatgagggagagggcagagcatgtcctggcggaagccaggagccagacgaagagcccggagctggaggtggctcccaggagcgctgaggccccggccccttcaggccagtcagggacacagaggggtggcacctggggagacgggaagtgggaaggctggcatggacttgctgcctccctgctgtcggtagttgcgctgctggagaggctggggaggatgaggaaggcctggttggtggagtgatgggggtgcagggtgctgactgcccccgaggccgtgccctgcaggatttgtgagcacccatcagtgggcgtttgcccagcagtgctccgtttccaagaatggagtctgacaagcagataagccttgctccacccaagtccagcatattccatatgagccaagctgtttctcagcagcttcccaggcagcgcaaagcatttatggagggtcagggagatgtgtgggaatcgggttgttaactggccaaggcagggagtcccccagaagttcctctgatctctgtgaggaagagagccaagtttatgctggggccagtagacttaaagaggaatttttctactgcagtgttctcccacgagctcttgctgagcgcctgctgtggctgggcattgtgttccttgtgtggggtcctccaggagcccaggcacaggagggcgatggcccagaaagccctgggagggcggggtgtgcgtttcgtggctgaaggtggcaagaatccaccccacagagcaggctctgcagactgctcaccagggagcagggcccctgggtgccagcaccagctccatctgcagttcgctgtttctccttggtcactttgctggatttctgcctccgggatgctgtccaccctcatgacgggggccagggcgctgccgcagcacctataggagatgcgcagggcagagagcagcccctgtgtgacgctgccccgatttctcccacttagggttgacactgtcacggtaccacccggtgttcagtgctgaggacatacagtccctcccctcctgtggtggcaacagctgatgttaagaagggacaaatttgggcgaaaggagaacacaggctgtagttagagtgatggtgagacaggaatgaaggcccgcagggaatctgtgtgcctggaggcgagcattagagtcagatagccgcctctccaacccccatggagcctcgtgcccaaccagcaaggactctggggcatcggccagtggcagtaagccagtgtggtgggctggacaatatgcctgcactgcaggagacggtgtcacgatcagcccccgacagccggtctcaaaagtggaatttgaagagtggtcattgcttctcatgaaagtgtcgccgtaactcatgaaagtgtcacctgtaacgaatcctagagggatgcatttctgtaccacggagggctcgagccgagacaccgagatctgggggcgtgacccctaacctagtagcttagggagcagaattacaaacccctcatcctgtgcccatccttgggccctctcctcactcccccacagagaaacccagggtcagaatcaaccatgagacttgacggctgcccacaggatgatttactgctgtgacctcatttagcatgggttagtgtgggcccattttttcttttctttcaaaaattatttatttatctaattataaaatattaacctccataataaaaataaagccagtataataaaaatatgtaaaataaataaatgtcacttattcccagtatctcaagaaaactcaggattaaaatttttatttacattttccagaattattctctgtaagcacaaaacagatttttttttttacagaagtggaattgtactctgcatactgttttcttttttattttatttatttatttatttatttatttatttatttattttgagatggagtctcgctctgttgcccaggctggagtgcaatggcatgatctcggctcagtgcaacctcagccccctgggttcaagcgattctcctgcccaagcctcctgagtagctgggattacaggcgtgagccaccactcccagctaatttttgtatttttagtagagatgggttttaccatgttggccaggctggtctcgaactcctgacctcgtgatctgcccacctcggcctcccaaattttttttattatactttaagttctgggatacatgtgcagaatgtgcaggtttgttacataggtatacacatgccatcgtggtttgctgcacccatcaacccatcatctacattaggtatttttcttaatgctatccctcccctagccctccaccccatgacaggccccggtgtgtgatgttcccctccctgtgtccatgagttctcatcgtttaactcccacttatgagtgaagctggaaaccatcattttcagcaaactaacacagaaacagaaaacagttttcaaattaatatatcacacataccttttcatgtcactgaatatcagtctataacattctaatgactgtgctgaattttactttgtagacgtgccatatatttttaaccatgccctgttggtagacgtttaggctattttagtattttctatataaacatataattctgtataaccctggaatactcacatatatacataatatatatagcatacaaatgtataatctggaatatacattttgtgtacttgactaatttttttccattgctataaactccaaaagagaaattactgtgagaagggatatataattttaaaattgtgatgcctattgccaaattataatatcttcagaaaaagattgaaccaattagactcccacccacagtgaaggggagaaccagttctctgcactcagcaacactggcttattttctctctcatccctgggcgctgcttttggaggaagcagagtgttttcctccttagccctcccctccccactttgtctgtggccgacccgctcattcagtagctctctggaaattacaactttcaggcaacaccaaagaaggctctgtgatcaaagagagagggctggatgaatgctggaaggagtgtattacagggattgtggatgcttatctacttgacctccttccccttccctgtgcgaggggaaagggtgggaggaaagattcggcttgagtgtagccgagctgtaccgaaagccttctcgataccaatgcctgggctgggatttattaacttgtcattgacgtggatctgataagaaaactcttaccgaaggaacaacaaggcagtctggggaggaataaatggggaaaagaagaaaagccaacctgggtttattaacacatagaacaaaaggtatggatgagcactgtccacgcacctctgagaaccagccacgaactggcagagtttcactgtagaaacatccccaccccacccccaagtggaagctgtttggcatcctccatccccaacacggcctgtacggggcaggagcagatgacccctgggagaaaatgggatgcactgggaagatggcagctagaaagggaaatggagaaatgaaggatgtcagcaaaaccggaaacgcagcaaagggattaaaattcacattgggcacagtgaagagttcagttgactttgcagaaatggaaagcatagtggaaaaatgagattccttcctgaataaagagaaaaagagaatgtcgagggaccggatggatgatgaatgtgttttacgttgaaaagccatctcagtgtgaatgggaacaagagccagtgcgtggagaagccgcatgagagacccaggtgtgagtgctcgggtcagaggggctcaggatctcctgggtgcaggtggcaggaccaaggaacccctggaggtggcctctgccagggcatagagttcatcacaacatggaacctccatccctcctgggtaccaccctaacacttactttggaaaaccctctcccctggcttggtttactctataatgcaaccagcaggcagaggaaaaaagatttagagggaaccccaccaaaatagtggcatggctttctttcagtaggagaggtgtaggtgctatatttttccaccttttttccccaaaatttctacaatgagaaaaaaacattttattttaaaatagtaggcctctctcccttccctcacgctggttactgtgctatgtggccttatggtaagctaggtctgggtcagggcataggagaaagggctgccctgattgcagctgcttttttcatgatcatgggtggtgctaagggaggaagcttcagggcagatgagtgaggagaaggcgtccaatgcaaataaatgccttcaaaaaccagataaatctgtctcttcagcctggatccttaagcttctttcttgtctttaagtttctgtttgcatttttgaaagaaataccatgcatcctttttttatgactagaaaatataattttcagaaacagaatgcattagaatttggatttctggagtcttgatgggtgtaccctgttcttttctctgttaaacataattagtttcctgataaatgaatagcagaggaaaaaatgttgctcttcattattgctaatatatgaagaataattaaaagtcataaataaccataaaacaatttgcctttaatgatagcatctttaactgtgtaacatcctagcaaaaaagcctcattggacattctcttgtgcacagagcccatttgccgggaaatatttctgaatacatgttgtcttccctttatagtaagacattgtcactcaataataatatgcaagataacttcgtgatagtaattgttgttttgtctttgtaattacagacatatcaagtggatttgaagcccaatgggtcagaaataatggtcacaaatgaaaacaaaagggaatatatcgagtatgtatacacatatttactgccttttctttgaataattgaaatgcatgtttggtcactgtcccttgctgaaacagctcatgcatttattatgggcatgagtttattggtcagttttcaacaaggtaagttcttttctggcttgggctaatgggaagttgaatatgggatggaaagtctgtcttgtatcatgactccattgagctgccctataaaggagcagaggagggagaaaaggtctatattattgagtaatacggcaaatactcttttggaatatgtggatatcaactaagatttagaattgcaacggagaaccacggtgtcagtgaccagcagggcaaaattaggaaccaacaaagaaaaaatattttgtctctctcccaacttcttttccataatagaaatgtatagaaatagttaaaatggataggaagaattcagcatgtgcaaccctaaggaattctttctggtatttgtaatattcttaactcaacttcagcctcagtggaacaaaatgttgagtctttttggaagtctagctgttaagtgattctaagacatttgtaccaggcagaagtttttctctgttgggcacgttacgttttcttttttagtgtatatgtgtgcttcaaatgcataactctgggatcttccaaggagatcccctggtgcaggggtgaggtgagcactgcagtgtgtggttcctggcacctggtttctgctctcttgtgggtcgccacagtggccctgagttcctcgtttgcattcagtgcttcgtttcaacaggctaggctccctcctttcttctcatttggaattggtcagaggtcttgaaatcagacagctcttgcattgactgtgggtcttagcacctttcagtgtgatctgcaaagaaaaacctactgtccttcctaattaggaagaaacggagcgtgttagagtctctactcagagatcctggcaaggagtggaactattacatggcggactcttttcactctcaagttgaaagcttgttatgctgaatacatagactagaaataaggtacctcggttcttacctggccacattaattggcactctcgttctgaatatgaacaatcttagctgatgacatcctggcagacaccattgtcttccttcagaaagtacagactgtgagtggggtttaaaaaatattctagctcagggtgacccaggtctcaagtctgaggactctgacatgcgtggtatgtgtcttgcatcattctttgcagttaattcttttagggttcaaacgtggtgggagtcagggccaggcagggttccagctagctttacttttaaaagtataattgaaatcaccaactgctccctgatacctctgctcccctggtgccagaagaatgctgttgagctgttcattgtagcccaggaggtgccacctgagaggccgcacagtggttgtgctgcaggctggtcctcagggccattaccatggttacagtgtaccaccccgaaggtgagaacccttcagaatgatggaatgcctgagatgacatccagagtacatttgccttgcgatcagttttgctgtgcattaaacactgtcgcagggaacttggttttggtgaacttcagttgcataaggaggtcttaccattcatcctctaaattttggcattaaattatgagtgcaaatcattttgctgataaagcttatatgttattgttgaatattagcacattggatactagaatgaaatattagataactaaatgcattgtcctgagtacactttacaaatatgtatacatatatgtgggtgtgtatacgggtgtgtgcatcttatacatgtatacctgtgtgttcataccccatgaacttttcccttttctccatgttgtcacattttaaagcagttaaagcatttaaagcattttaaagcagttaagcatttaaagcagtttaggtcagccaaaccttgatgtgggggaagttaattactcttttgaaatctccagtgagattttaggtttttcacgggtgttccagggagtcttgaaagaagccatgaataaactaaacagtgggggcacagaggagaccctcccctctgctctgctgtcgtggatggaggagaagcactccctgttgcggagaaagcagtgagcactagtgatgatggaggtggttcaatattgtcctcttttctcctgcagcttagtcatccagtggagatttgtgaacagggtccagaagcagatgaacgccttcttggaggtaagccatgctggccagggttctctgccatgtgcctctggtcccgggtcgatgggggatcgcgcttctcctttagctagtgtggtggagctgatcagagacagaggcgaggctggggaccctgcaggaagaccgggatcgcacagctcacaccgctggccagtctccagcacaagagtgttcagccaccgtgccgccacctccttttccttttcacgggttctcctgcttgacttctcttatttttacatttgtcctgtttttaaagaggacgttttacagacttgatctagaaccattgtcttggagtttcaggcggtacccaagagaaggctgccttttgctgcagtgacaggttccaagaagcccgagggctcagagctgaatgatgaagcgcagtccccaaagtgcctggccacccctccctccctggatcactgctgcctgggcttgattgattgattgattgattgattgattgattttgagagagattctcactgtcacccaggctggagtacagtggtgcgatctcggctcactgcagcctctgcctcccgggttcaagcaattctcctgcctcagcctcccaagtagctgggactacaggcacgcgccaccacacccagctaatttttgtatttttagtagagacggggtttcaccatgttggccaggatggtcttgatctcctgacctcatgatccacccgccccggcctcccaaagtgctgggattacaggcatgagccgccgcgcccagccatggacatttttttttaatcccctgccctttttctttgtggcataattcattgcaggttctcttctatacagatacatggaaaacacattttcttaagctgagtttttatttattttatacccagccacctcatgacagcttttaccctgttacagagcaaagtgggcactgcccagatcgaacttttaatatcagggatgctcccaggcccctagcagtgggtgagggattcatcattttaaacagtattccacttggaccaaaagcaaaattctttcttaaatatgatatagtattagttacctcaaagatcacacaggaaacagcctcgtgtccacgtgactgattttctctgcactgaggcagagctctcgtggggtgatgctttcccttcactcaggtacctacacaggatgcgtgaaagcccgggcagcacactcagaaacagctcggggccttagggacttaaaatgggaggacagaatggcaggtttcactctttatttagataagaaatcccaggaagcagattcctgggccccaccgcaggcggtccacaccttcagaaacgcggcgttcgcagcgcgcagggcccagcagagctgagctcatcctagatcacgccacagttagtggtacctgggaactggagcatggttttctgtacgcacagtgtctgcacccatcacctgcctccctctgtgtttcttctccctgcctccagcacgttatttttaagcgtgtctcttacacatctgtagcctgtgcatcttaggacgcactgactcacagcagtgttataaatggcttttggaatccaccctgcctacagtatcccatattttcatcaggtttcagaaattactccactacttgaatcttctagattctatgctttttcgaaactgttatattgtgactgtgctgtttttactggaactatagttacttgatactgtcactgacataggaatcatcaggagagattatatttttttctggctaaccagaaaagtttgtttttcctgtgaaattttttttttttgaaggcaataggtgtttaagatgttttttttttttctttcagggattcacagaactacttcctattgatttgattaaaatttttgatgaaaatgagctggaggtttgtattataaacattattttatgtaaagtggattttttaaagtatctctcattactttacaagtaatattttaatattcttggatccataatgtcctagagagtaactttagatgaattatattacatgtctcttatagggcttatttgccaatgtggttctattacatgtctcttatggggcttgtttgccaatgtaggagtaaggaacagcaaaaataatcagctgtagttgccttgtccatcagagggcagttctggaacatgcctagtaagtagaggccactgagcagagctgggatcatggccctatgcaccaggcgaggcaaattgccacaacaagtagaaacaaggtttgcagtagccctctggacagcagaaacctgcttacactaccagactggccaagtatcctctgctgcatccccatccacccccaccgtggcagccaaatgggggtcttggccacaaggtggccgtaagcatctacttgggcctgtagaacgacgtctcattgaacttgaagtggtttatgttgagtgaggaaaaatgtcagaaggcaacagggttgtagcaaaaggtagtttagtgattgtctagttcagcttcttggtgttgacatagttgagtaacagccattttaaaaacaaaggaatatctcgccctttgttgtgtcgagagaaacaggggaaagactgtctgttgagaagccgttggtgggactcggccatttgccccgtccatagccagtgagtgtttcccatacactggccttctatacttttatctcaaaacagaaagttcaagatcgatgatgtctatagaaatcatatacctcaagcctttcctctgataggtgggaaactgaggcagagagcagctgggtttacccagcaaggttttggcacggtcaggcctaggaactttatttccaggcttctggcttagttctgtttccatttcattctggtacctttgcataaatatcttccatttgtccacaggaaacctcccctgatggagagttgcataataggaacggcaaaccttagactaaatgctaagtcgaagacccagttgtgccttagcgtatgtctgccattcttaggcctctgggcagatgaggtgatttgtcatcactggaattgatcaacctggaggagagtcataagcactaattcttttgtgggtagggagatgcttttagatattcagaggaataacctctcaggaggagaagcagccagggtaatgcacagatgctgctggagcgtgagagaatccacaggtcccatgcgtaagactagaggggtagggaggacgactgtggcatttttatatccgatacgacatgccgtggcttgcgcaaggttcgaattgagctgccctcgtgactgctgcctctgtgatctgctatggcaggtggagcctggaacaggtgtctgccttcctctgttgttatgatttgctagcttaccttcgcggcacagtgaccacatgctggcactgagggtggtcatttctcagtgtgtgatctcgcacctttcacatcctgcttttacatctggtaaattttcttcctagttgctcatgtgcggcctcggtgatgtggatgtgaatgactggagacagcattctatttacaagaacggctactgcccaaaccaccccgtcattcagtggttctggaaggtaactccggggcccagccccagccggtgtcctccacctgaggcaggattgagggctgtgtggcgccctccattgtggtctgacttcaggactgatgctggctttggggtctgttagagcttggactgctgggggagggaagaggcaaactgagccagcagccccgtggtggctcctctgtaactgtagcagacagctagacttgaatgaagttggtccctacaaaagcacactggccttccttgaccacctcgtgaaagtgacttttatttgagggactggtcctccaatgcgtaaatagaaatggggggcttctcagggcagaaacaggcttcagggatggctttgcaagatgccactttctgttaagaagtcgttttctcaatttttaaaatatattccaacaaatattttgatctgtgtatctttcaaccaaagataacacaacatttgatttattatcttagggccactgtttgtatcctgttcagcttaggagggaagtaaaataggaatgggttagtccaaaggagatatagtaaacaaacttaaaaaaaaaaaaacagttatcccccaaaaaggctgattatttacttcaccccaaaaaggaatcatttaactttttcaaatttatttttatttatttatttatttattttaaagatggggtctcactgtgttgcccaggctggattcaaattcttgggcttaagcaatcctcctacctcggcccctcaaagtgctgggattacaggcatgagccaccatgcccggcctttttcacatttctaaatgccttttattactatttcaaatgccagcaggaatacagagataaaaaagcaaaatcttcaaagcctagtccaggtctcacttggcttgttttagatgtttgcctacagcagtccaagtggcattaccagtaaagccacctggattcccataataatgcagatatgtaagatacacagattattttagaaccccatctttgcctttgttgttttgtttttgttttgttttgttttgtttcattttataaaatgatgtcttctagggaacgtgtctacaatctgaaatcccatctcataacctggcttccccttgtgatgacaaatcttaaatactgtatatttataattggcttagggggaactggtaagcctcgaacacagaaacatgagcttggtgccatcagagagtttgctttttatatcatttattttggcctattggcagaagaagaaagagacggacattgtgatcactcagtctcttagattagagaggccagctagtattgtggccataaaaaacctactcagttttcagagtcaactgtctaggtcttacattgcaatataaataagattaagttctgcctgcctgcatgacagcagcatgtgccatgggtcacgtggggggtataatgaccttctgcctctgttcataggctgtgctactcatggacgccgaaaagcgtatccggttactgcagtttgtcacagggacatcgcgagtacctatgaatggatttgccgaactttatggtgagcaggataccattggattcagttgtcctcctgggaatttccagccaggcatgaactctggcccaagaaccctgccgccaggcctctgcagaaggctaagtttcaggacagtgtgccatgcataggttccatgaaagttcaatgaaagtactgttatctatactttatatagataacatggtgcttctacttcgagggattggggggcagtttgtgaagaggtccataaggctgctcttttttttttttcctagtttagttttttagtaaatcgttaaaaactaggttttgtagggtcatttatatggtcgtaaactgaggtataaagtcacctccagtaggcagaatttttcagtgtttaccatagatttaaaaatcactctgtactttgcatactgaaagtcacatttcattcaccctcccacccacaaaactagtttgaagtttaaatttccagggcccagctgagaggctgtagctgcctgcctttccacgtaactgttgtgtttgttaatcttggtgcagttccattctggagactaagcagagtctttctgtgaggttgtgcagacctctggcttccctcaacattaaatatcaatgttgcagcagaagagagtgtcttgggcctcacccctgggggcaaaccctgccctgacagtagctggactgcagaccacaccatagcttcattcttctgccccaagcaatcttaacatttctttttcttttcttgtctaggttccaatggtcctcagctgtttacaatagagcaatggggcagtcctgagaaactgcccagagctcacacatggtgagtgacaaaaacacatgcatgtcaatgcaatatctgaactgcttagctgggtatggtgctgggctcaaggctattgaatgctctgtttcctgtctgtaagtagcttagagaattaaaggacagtgatgtggatgaaaatagaaattgtacagtagtgctaataagacataatgcactcagtatgtttggcacataaagggctcaggcctccctgctgtggggaatttctcctctgagcccagtccttccctcattattctaggtagtggagctttcactgttcagcatacatagataaggcagctctcaacctgtataataaacacgttgggtttttactccaaccttaaattggttgagaagttaggacaaaataccctgtagaaacatcctttttcaaaggccttctatgcccatgaataacctgtaattccctggaattgagcagtaacatgactgtggtcggaggagggtaagagggctgacacgtggccagggatgcccaagcgtggagcgtggctgccctcagaaggccctctcaggaggcacagtgacgcagaagggtcccagttgttttctgaacagttgcatgaaacccagcacaaatgcagactggatgggatcagtttcttgaagccgggttcagggagctcttgctaactcaaactcccatgtccctcgtgttggtttttctgcaaaggcctttatttcttgctcctgaggaagcagcagaagtgggccttctggaaaacggtgagcagcgtagccctgtgtttctcatgcagcgggggctgcaaagcctgctctggccatagtgagctaacataagcaaccaaacactccctgcaggaaacgccctcccttacactagaagtgctggccaggagagaattctcatgaacatgtgtttgcgaaaaattggctgtgaaaggtttttcacttctgtcggattcccttgcctcaccagaaaggtgttttttttttctattcgtaccattcacgtgactctccagatggaaacaatgtggtcattgcctgtcagagccttgaaagcaagctgactccagcctaaaattcatgaatattcagagcagtcattgtccgtggttctctggctttattctaagggaagaatgtttgagtagttcagagcttttatccaaatggtgtccaagtcatatgtggttttctgggttctactggcctccatatgaaggcaccagcgttgagccaagccccaggactgtgggtggtgatgcgaaactcaagctcataatactaaccaggatgaagattaggaaaagcgaaattattgggcacagtcatcatctgtggtcaggcactgcttaatctttatggcagccttatgagatatgttattcccttgggctgtcagaaggctggcccagggctcaccagagtcacagattcccagatcacaggatttgaactcagagctaccagaattagagcctgcaccctttaccactacaccagatacactgcctctgttgatatacccactttctttttagacttttccaaggaaaccaaattagtgaaccaatttcatgttcattcagcccatgtttctctgtgacttcagggacacatatcttactattgaactgtcttttttatttcggagcccacatgattctgccacaagtagaacttcccagataagacctctgaactcagtggttctcaacctcagctgcatgttggaaccatctagagagccttaaagaaatcactgatgcctggaatttggacttcattggtctggtgtgtgacccaggcagtgggattttcaaagctccccagatgatttttataggctggcagggttgaaaattcacagctcttccctaggaagggcaaagatccacctacaggaagggaacaacccagctggctcttaccagaacttattttcctctttatgtgtcacggaaataaagcaactgtgtagttttcctaatgatgttctccccagactaacttgacccggatggagaggactggcagttgcaagcaacactggctagcatgagtgggactgttctgctgtttcttctaaatggctttcctccctacctgaccctgactgtattttgacataggaaacagaaacttcactggctgtttcgtggcaacagttctgccataaaattttgccatacataggtttaatttcttccacgttttatgatacacaattaaagttcagaataaaaatctgatttcctagaagagcagaagctgaaggatctggttctctgtgatgagggtacctttcattaagctttccaatggtgattattgagtgtctgacattcaaaggacttcatttcattgttctataaaaggtcactactcagacatttaaaattactcttcattaagaatcacaggcccacctgcccttttaggtagactctaaagcaaacaaaaatcatctcgttcagcccatgcatcttccacgtgaggacgctgaagccctgtgaggacaatgagctccttaaagtcacccagctcattagtgcagagcaaagccaggtccgtgtgtcctgacctctgaaatgataggaactcacactcaccaagcactctgttcattccggggatggtgctcagcacttgatgcgattgactcataccatcatcacagtggccctaagaggtgggtgatgttatgacccacttttttacagataacactgggatgcaaagcggtgaagcattaagcagcatgattcagaacctcagatcttgacatcccgtctttgcctctctcttcatcatgccagtgtttctcaaacctgaataatctgtgcaccttttttaaagggaaaaaatggtcacagattctcaagaatgggcctgagacccccatagggattgcaggcccgggactgtgaaaccccagctgaaaagcctgaagccactttcggtgaaaggctcttttaaatgccatctgtagatgtgaagtcctgtctttattaatatgataatagaaagttaaaagcctgtattagtacttgctcttttaggattcctgggttcctgagaaccccagtttgagaagcacagtgttattctctgtcttttagtgtttagtggctgttagagaatccaagtggaactcagtgggacttattcaatatttagtggttgttaaacggccctctacggtatgtgtttcttttctgttgctgtgacaacggttagcttttagtatatgtgcaagtgctgccaaagcgagcacgtgaatggttagcttttaaaacccaagaagttactttgctcattcttggaatcacacatcaatacctggagggggcggttttaaacacagtttgagcactcgcggcagaggcagcacaagtgcacttcaagagctgggctttggagcaccccagggctgtacctggccccgtgtgaccttgggcaagttacctaaccttgctgtgtctcaagctcctcctctgtgaaataggggtgaagcattagctgccttacaaagtgattgccagggttcataacattgagacaaggctgatggggcatggtgagcactccatgaacatgagctcttacgtcataatgagctgtggcaagtgtgcatgccattttcatgacagatacacatcagcaatcaccccccaacacatacacacacacacagaggtgcaggttctgtggctaaaggctctggtcttgagccccatgtagacatacagtaaatgttgaaaggtgttaacactgataccatctcttgagtaattgagcccttgctgtatgccgggcccactgatccgatccacttggcactcatatgtgcagtttccccatgtcacagaagcacagaggccatccatttgtctgaaaaccctcactattgccagggcgatttgcagcccccgcccccacctgaagcctccagatatgtagggactttttctaaatgcaactttacatagcaaatgtcaattttgcctgactttgatcagaggaggtagcttagcactggtgttcccgagccccggacagcctgggttctgtttgtgggtctgccgtttgacaaagactgtgacctcaggaaccttgccctatgtctctgctccaggagctcctgtgcagaatggagataacatgacctgcttcatagggttgtgatgaaaatgaagtgagttaatagggagaaaagcacttggcttgaggcctagtgtggaataagtaatagtattagagatagacacagtcttaattcgtgggtaactccaaaagcatcagctctgtgttccaagggtttggaaatcttgccggttactcccttcccaccaggattcctccgagatctgcatctgactatagcaaaggtttcatggaccatttgaaaatgttctttctctgtaaattacaagagcttatttagtgtggatgtttcatagctagaggtttttggggtttttttctccaggtaatcaaaattgttggttaaggcttttttattctcttactcaaacctcatgccctattaaccagatcgaggaagtgctgttgtggcttttcacctacactttttgttccttttgcagctttaatcgccttgacttacctccatatgaaacctttgaagatttacgagagaaacttctcatggccgtggaaaatgctcaaggatttgaaggggtggattaagcaccctgtgcctcgggggtggttgttcttcaagcaagttctgcttgcacttttgcatttgcctaacagacttttgcagaggcgatggcagagagcagctgcaggcatggtccctggagccgagccttcaccacgcactcgtccaagttcggatgcgggaacctggtcccagcttgagttcctgcctttcccaccacaaattatcaactggttgatgtgtacactaa

SEQ ID NO: 1513 - DNA, 1738 bp, Homo sapiens; identical to SEQ ID NO: 1509

SEQ ID NO: 1514 - DNA, 23378 bp, Homo sapiens
tatatatatatatatatttttttttttttttttttcagatggagttttgctctgtcgcccaggctggagcgcagtggcacgatgtcagctcactgcatcctccgcctcctaggtttaagcagttctctgcctcagcctcccaagtagctgggattacaggtgcccaccaccacgcccggctaatttttttttgtatttttagtagagatggggtttcaccatcttggccaggctgatcttgaactcctgatctcgtgacccacccgcctcagcctcccaaaatcctgggattacaggcgtgagccactgcgcctggccaagattttatatattatcagtagcctgaggtttccccctttctctgactttcattactagagtcaccagaaggaacatttacaacattttaaaaataacaagttgcccagcatactcctatttcctctagtttcaaacataaaggggaacccagcccagacaagaacaagccttgctgcatgcctgccagctcgtgcatcctcctttttatttcaagaggtgccagctccaaacaaagttacaaggttaagtgcaactccaagttcctgacacagctaatccctgctcggtcttcaaaaaatagaggtctgtaattcctttttgaacatgccttcgaagtggaggtctttggccatgagctcttcttcgacatcatctagtgcccactggtgatccgtcagctccaaagcttcccactctgtctgtaatggaagagaacacccaggcaggaagagagggaattgttactgacagctgtggctaacctttagtgaccacttactctgggccaaaagctggagtgagctatctgcatgtataagctcattcaatcctacaagggaaatgctgctaccccaatcctctcctccccctcttcctgccacccctcaatttatagataaggagactaagactaagaggtcaaataatttgttcaaggccactggcactaggaactaatggagctgagatttaaattgtggtctgactgcaaagtccccagcgcttaacccgtctatcagctcacactcactaagcacctttgtgccccacagtactcttgagagatgtacaacagacaaattagtgcagattctcagctctttaatcaagggacttgccatctggtttaaatggtgcatggtccacaatgctttgacataaatggcccagggtatcttcagtgggcctaagaacacttcctccaaccttatgtccagacacacaatggcacttcattacagtttgtgggagtccagtaatttttaatcactggaataaagactttgatgatgtgaactaaaaaactgtttttggcatataatcatttagatgtaaactagtaatatgttgagcagaaataaatttgcagaattttccaagaaattacatttctcaaatattctattaatctgactactttgccttaaattagtgagtgtctaaaaaatgctttatgagttgggtgcagtggcatgcatctacagtcccagctactctggaggctgaggctaaggatagcttgagcccaggagtttgggactgccctggacaacctatctttagatgagcctagagatagtaatacctcgtctttaaaaataaattaaaaaaaaaaaaaaaaagcttgcgagatgtggtagctcacacctgtaatcctagcactttgggaggccaaggcaggaggatcacttgaggatgggagttcaagaccagcctgggcaacacagcgagatcccatctctatacaaatttaaaaaaaaattagttgggtgtggtggtgtgtgcctgtagtactggcttctcgtgtaccagtactgaggctgaggtgggaggaatgcttaagtccaggagttcgaggctgcagtgagcaaggattgtaccactgcactccagcctgggtgacacagtgagaccctcgatagatagatagagatagatagatagatagatagatagatagaacaagcttatttaatgtgaaatacaaatgttagctcatgagtgagtttttcagatataatttacatgtcatacaatttacccctttaatgtgtataatttagtgatttttagtatattcatatgtgcaaccaccaccactatctaattgcagaacacttttatcataacaaaaagaaaccacataccaaacagtagacagctcccattattcacctcccacaacctctggcaactactacgttatcttccgtatctttttttcacttattctgggcatatgtggccttttgttattttctttcacttagcatgttttcaaggttcttccctgtttaacatgattcagtattccactcttatttatagctgaataacactccattgtatatattctactgtacatacaatgtacattatattccaaaatattccattgtttattcattcattagatgatggacatttgggttatgtctactttttgattattatgaatcatgctctgaacacattctcacataagtttctgtgtggacatacattttcagttctcttgagtatttacttaagagtgaaattactggatcatatagtaactatgttttaactgtttgaggaaaggcagaaaaactgttttccaaagtggctgtaccatcatcaacaatagggttccaatttctccacatccttaccgacacttgttattgttgatctttttttttattaattataaccatctgagtgggcatgaagtggtatctgtttttttttttttttgagatggagtctcgctctggcacccaggctggagtgcagtggcgcaatctccgctcactgcaacctccgcctcccaggtttaggcaattctcctgcctcagcctcctgagcagctgggactacaggcgcccgccaccacgcccggctaatttttgtatttttagtagagatggggtttcaccatgttgaccaagctgatcttgaacttctgaccttgtgatccacccacctcagcctcccaaagtgctgggattacaggcgtgagccaccatgcccagccctctcactgttttttagttgtttatttttttgagacagagtgatctcactctgtcacccagggtggagtgcagtggcgccatcttggctcactgcaacctctgcatctgcaatggtggatctcggctcactgcaacctctgcctcccaggttcaagcaattctcatgcctcagcctcctgagtagctgggattacaggcaggcaccactatgcccagctaatttttgtatttttagtggagatggcatttcaccatgttggccaggctggtctcaagctcctgacctcaaatgatctgcctgtctcagcctcccaaagtgctgggattaaggtgtaagccactgcgcccagccaaatttttatttttttattgtggtaaaatatatgtaacataacatacaccacttttaaccatttcagatgtaaaattcagtggcattaatgacattcacaatgtgtacccatgtctactatcatttccaaagttttatgtccccttaaacagaaaatgtgcacagtaagcaattactccccactgccccccatcccatcctcagtaaactctaacctactttcttgtctctgtgaattttcctattccaaatattttatatgagtaatatcatgcaatattaaagatttgggactttgacccatttgatttcttttttcaagacagggtctcgctctgtcacccaagctggtgtgcagtggcacaatcacagctcattgcagcctcaaactcctcagctcaagtggtcctcccatctataggcatgcaccaccacatttggctaatttgaacctaatttttttttttcttctgcactaacatgcctgttgaaccatttggacttaacttttgtgcatggtgtgaaataggtgcccagcctcattcttttgcatgtagatatccttttcccagcaccattcgttgaatggagactattctttccccactgaatagtcttggtaccctctttgaaaatcaattgatgataaatagatgtgtttatttctgaactctccattttattccattgacctatatctctccttatgccagtttttattactgtgcagttttgattactacagctttgtaataggctttaaaaccacggcgtgtaagttattcaattttgccaacatttttgcctattgtgattcccttgaatttccacatgaacttcacaagcagcttgtcaatttctgcaagaatggcaagtaagatttttatagggattgtgttcaatctgtggataaatttggagtattgccatcttaacaatattaagtcttccaatctatgaacatggatgtctttccatttatttaagtctttaatttctttcagcaatgttttgtaatttttcagtatgtcggtttaaatctaacaaaaggccatttctttttttttgagacgaagtctcgctctgtcaccaggctggagtctagtggcgtgatcttgactcactgcaacctctgcctcccgggttcaagtgattctcctgcctcagcctcccgagtagctgggactacaggcaggcaccaccatgcacagctaatttttgtatttttagtagagatggcgtttcgccacgttggccaggatggtcttgatctcttgacgttgtgatctgcccacctcagcctcccaaagtgctaggattacaggcgttaaccaccatgcccggccacggccatttcttttgttagatttgttcctaaatattttattcgttttgatactattataaataaaattgttttcctttcatttccaattcttcattaccagtgtatagaaatacaattgatgttgaacttatttattagctctgttagttttcttgtggattctttaggatgatctacatacaacaccatgccatttgcaaacagagatagttttacttcctttctaatctgaatggcttttttatttctttttcttgcctaactgccctggctagtacatcctggacaatgatgaatagaagtggcaagaacagacatccttgtcttgttcttaatcttaaagggaaagctttcagtctttcaccattgagtatgatgttagctgtgggtctgtcatagatgtcctttatcaggctgagaaatttctctctttttttttttgagacggaatcttggtctgtcatccaggctggagtgcagtggcacgatcttggctcactacagcctccgcctcccaggttccagtgattctcctgcctcagcctcctgggtggctgggattataggcacatgccaccgtgcccagctcatttttgtattttttttttttttttgagacagagttttgctcttgttgcccaggctggagtgcaatggtgcaatcaatctcagctcactgcaaactccacctcctgagttcaagcaattctgtctcagcctcccaagtaactgggattacaggtgcccaccaccatgcccagcaaattttttttttgtatctttagtagaaaagaggtttcaccatgttggccaggctggtcttgaactcctgacctcagctgacccacctgccttggcctcccaaagtgctgggattacaggcgtgagccaccgcacctggcccatttttgtatttttaatagagacagggtttcaccatgttgtccaggctggtgtcgaactcctgaactcaggtgatctgcccaccttggcctcccaaagtgctgggattacacgtgtgagcccctgtgcctggccggaacttcccttctcttttagtttctatcatgaaacacagtgagattttgtcccacaaaaatcatactaaattttgcaaattctagaacctttttgtgaaaaggctcttagtattgtttttttaatgcaatttatatctgatgtctatggggttcaaaaaggttcaaattattctaaatgtttacctggcacctccgattggattattttacagcatcattgatagtgtggattaaattccagtgagcatttaaaaaccagtaaaagcaccaagaatttccatttacttaatagatgattctgtctcaggaaagagagacgtgtaaactatgtttttactaagtttaaattaaaacgatggaaccacacaacactcccttcaaggaagctatttttaaaatagctcttggtaacacctttcagagcattgctgcagctttgaaaggtgaaggagtataccttgaaagctttgtttgtgtctgcgggcatggccatggctgctcccgtcatctgctcctgcatcattcgtgattggtcagcggctgtagcataagacacacttacatgagtgccaggactcagcaagcaccccagcacccaaggggaagaatgggcttcacacagattagagaactggactacagcctcactggctggccctgtcacccactggctatgtgactctaggaaagtcactttgtgtctcctgaaaaatggggacagtaacagcaaaagagagatcactaaaggaagctctaaactttatttcaaatttcaacaataacagccaccagttattgagcaactactgcatgccaagtacttcactaagtgctttgcatatttttcctcatctgttcctaacaaccccacaggttaactaataaagtccttatttacagataagtaaatagagaattcgaagttaagtaacttgttaagtaacttttctgaggtcccagccagtaaacaagagagcaaggattagtactggcaagggctctagtcaatgaactgacaaaccaagccttctttaagctttaggttcacaggcttacactgctggtgctggatccctcacatgatggtatcagactctggggaatcaaaatactgtcccagtcattgccagagagaattgagatcttcagtttgacccccggaatttttaagactctttcagaatacctcagaaacttaaggaaggaaacattttatttgactatggtaacaaacagcacaacctacaagacttttctggctctaatatggatgattcatctatggaagtatttgcttagtaaacctgacatgcttcttaccattatcttggcccagaatcagagagtaaatgctccgaagcccaaatacattgaggaagtaccaggatgcagaactcaccctggcaaagcaaaatgaaaatggtgtggttagttattatatcagagagtaatgcagttcccacttccctaccacccaaagttgttcagtgtttgtaaagaagtcaccttggatgggctatattcatccaaagcacaaccacagaagaaatacaagttgttaaagcagtctcaccaatacagaactatatttcaaaaaatccaaaggtgactcccattctgaattccattccctagaggaaatcacaagtgttggtgtgttccatactttttttttttttgagacggagtctcaccctgttacccaggctggagtgcagtggcgcaatcttggctcactgcaacctctgccacctgggttcaagagattctcctgcctcaacctcctgagtagctgggactacaggcacacaccaccatgcctggctaatttttatatttttattagagatggggtctcaccatgttggccaagctggtctcgaactcctgacctcaagtgatccgcccacctcagcctcccaaagtgctgggattacaggcgtgagccactgggtgtgttccatacttacaagaagggatgagacatggatttcaggaaatacagtaccgaggactatagctactgggagagccattccaagttttgaactatatcactgaggcttcctttagcttaggtttcctactcaacctccataaaataaatatgcttgcatataataaaaactaaaaacaaaaatgcatatgggaagtgatagataaatggaaagatccacactcattccaacaagtgggtcacataagggcaagagtctattctggttactccataggctgcaggtaagtaaatggcctgtctgaatacaatgttgctgatctcaccacagtggtaattgtacactcaggttccagtctcgcgtctgtccatgactgcatttcagtcacatgcctctctggatgctgagaaaagataaataagcttttctccaacccatgaagtttttgtttagcccaatgagactgaaggtaaaagtagaatagactcatgctactcatataatgtacagcttttcttctctagcagaactgtgcatggcccagccttcccagcctctggcctttcctgctcctcccacacatcctagagggctctgctcaaaccaagtagtcaagattaccactagtaatccccattttgtccatttttcttttcctcttgtttatgccagtctttgggaagccacaggcaagagtctggagaggctacatgaagcagcattactaggttccagatattgtagcagtattttctaagagcttttcagattttaatttttcttattctgccattcaaaaaaaaatagtggtattcagaaggagaaatctcttttaaaaaattataaagagtggtaagtaacacatgggtgctggatttgaacagaccttgtcatcaaatgtcaattcctacacaggtttcataggttgctatgagggtaaaatatggaaaacgctaagcccagtgactagaactaatgaaaactattatcattagtagtaatgtactttggaaaaaaaaaaatacaaacttccactcccataagctcaagggtattactaaaaatgattgcctggccagaattcctggcttaaacttgtaactttctgggggttgatacatccacccctgcattcttaagcccccaattgtgatagaaaagaggtgacacattctttccttttgctagactcatgtaaaagttgccataaaccacccatggcattttcagtggagtttcaatgaaaaaaaaaaaaaaaaaaaaaactctggccaggcgtggtggctcatgcctgtaatcccagcactatgggaggctgaggcaggtggataacttgaggtcagtagttcgagaccagcctggccaacatggtgaaaccctgtctccatgaaaaataaaaaaattacccggatgtggtggtgcacacctgtaatccaagtactcgggaggctgaggcaggagaatcgcttgaacctaggaggtggaggttgcagtgatatcgcaccgctgcactccaagctgggtgacagagtgagactccgtcttgaaaaaaaaaacccaaaaaactttaaaaactgattccaatgaagtattgcaaattagaaatcctcatcttttttttttttttgagatggagtctcactctgtcgcccaggctggagtgcagcagcgccatctcagctcactgcaagctccgcctcctgggttcatgccattctcctgcctcagcctcctgagtagctgggactacaggcacccatcaccacgcccagctaactttttgtatttttagtagagatggggtttcacagtgttagccaggatggtctcaatctgacctggtgatccgcccgcctcggcctcccaaagtgcaggattacaggtgtgagccaccgcacccagccagaaatcctcatctttaagggacactggttttagattttggtttgtgaggtttttgttttcgttttttgtttgtttgtttgtttgttttcagacagagtctcgctctgtcgcccaggctggagtgcagtggcgcaatctcagctcactgcaagctccgcctcctgggttcatgcaattctcctgcctcagcctcccgagaagctgggactacaggcgcccgccaccacgcctggctaagtttttgtatttttagtacagacggggtttcacagtgttagccagaatggtctcgatctcctgatctcatcatctgcccacctcggcctcccaaagtgctgggattacagtcgtgagccactgcgcccggcctgttttcgttttcttgagacagggtcttactctgttgcccaggctggtctcaaactcatgggctcaagtgatcctcccgccttggcttcccaaagtgtggtttgtgtttttattaaacaaaagaaagttcttaccaggatgcatctaatgtgagtagctcgattccttgctgtaacataggcttaaaacggagggtcagtggaaatgggaccttggctgcagagaagaaaaagttcacaatcactctgagctgttttatttttagaataagtgtgactctttctcagaggaggtgggaactctgtgccacatagcttttggaaaacgacttccacaaggaaatctgtggcaatttctgaagaaaagacagtcaaaatgccactctgctctagtttccctgaataatatctgcctctagcttactgaggaagcagggactcaaactgagctgtgacctgaaatttggaaaaaacttgcagcaaactgtcaaactctaagtggaatatataagcatagaattatgttaataagaaaccaaattgattaaaagcgaatcaacttacaaacaaacagaaaactcaccctaacatctagcaaatgaagtcaaaatagaaatacgcttccctttatcctgctcaacgagaataccgtattagttttggaagtaagctagcaagtcacttgcttgaatctaatctggctaaaaagcatccacgtcatgaacttaggatcatttttgggcaaaagccgtaaaagtcatcacatattaaattttttgttcaaggactattatcagtttacaaaagaaaacacaggacctgtgatattagtgtctcactagcacttgaatttctctgggtaacatgaagtcggctgggtctgtaacttacttgtgacaaagcctgagaatgtcatgttgatccatccaccaataagaatcatagggaggacatttgttacattccctttcatcatgtctgtcaacatagtaggatctaagacaaaagcacaaacaagaaaccactaagttttacctctgttgccagggactttctcctgattttctgtaaactgtttttttttgagacggagtcccgctctgtcgcccaggctggagtgcagtggtgcgatctcagctcactgcaacctccgcctcccaggttcacaccattctcctgcctcagcctcccgagtagatgggactacaggtgcctgccaccacgcctggctaattttttgtatttttagtagagacggggtttcaccgtgtcagccaggatggtcttgatctcctgaactcgtgatccgcctgcttcggcctcccaaagtgctgggattacaggcgggagccaccgcacccagcgtttttttttttttttttttttgagatggagtctcactctatcgcccaggctggagtgcagtggcatgatctcagctcactgcaacctccgcctcccaggttcaagtgattctcttgcctcagcctcctaagtagctgggattacaggcacacactacaatgcccagctaatttttgtattttcagtagagacggggtttcaccatgtcggccaggctggtcttgaactcgtgactgacctcaagtgatctgcctgcctcggtctcccaaagtgctgggattacaggcgtcagccaccgtacccagtctcaatatttttaatgtctgcataggattccatggtgtggtcacaccaatcacttttgagtagacctatcgattgtttccattgtttttgccaataaacgataaatgatgctgccgacaattatcttgcacatacatctgcatgtttatgtgtttccgtaagagaatttcttagaatttctaggtccaaggatttgtacatttaaaattgatagatattgtcagactgtcagcaaggccccacctcttgccactcccgccaatggtgagggagcctaacttcctcgaccttgacaatagtggatcctgacaatcttttcaatcttttgacagcttactgggctaaaaaaaaaaaaaagagatatcttggccaggcacggtggctcacacctgtaatcccagcactttgggaggccaaggcgggcggatcacgaggtcaggagatggagaccatcctggctaacacaatgaaaccccgtctctattaaaaatacaaaaaattagccgggcatggtggcaggtgtctgtaatctcagctactctggaggctgaggcaggagaatcgcgtgaacccgggaggcggagcctgcagtgagccgagatcgcaccactgcactccagcctgggtgagagagcgagactcctttctgatgaacaaaaaaaaaaaaaaaaaagatatcttgttttaattgatattccatggattattagtgaggtcaagtaacttttcatatatttaatggtcttttgtttcttgtaaattttcttaaaaatttgttaaaaaattaactccatacaaccttagtcactctcaaaaaaaattaattataataccttccgtatgggtttaaaatagctggttatctcacctaaagaagtgaatagtactaaaatgagaggagtcaacacagaacaacaaattactttgttttacttttagttatttttatttttatttttcggagatggagtcttgctctgtcgcccaggctggagtgcagtgacgtgacctcagctcactgcaacctccacctcccaggttcaagcaatttcctgcctcagcctccggggtagctgggactacaggcacccaccaccacgctaggctaatttttgtatttttagtagagacggggtttcatcatgtaaaccaggctggtttgaactcctgacctcaggcaatcaatccacctgactcagcctcccaaaatgcaaggattataggcgtgagccaccacacctggcctgttttacttttaacatgctatatttttcacatgactggtatcagtggaagtagaaaatgttagagccaaaactgtagggtagaccaaacaatcacgtctaacaacaaagtcaacaaaatggcacatcttggaagtactgcactcttcctcatttaggcagaagctgggcagccatctattggaaggggatccaggcactgggtgacagccaggctggaatgctttaccaactgtgctccctagaatcctgggtcctgagaacagcaataaggagagacccagggacaatagctctggcctccccactccatcagctgagaactattttttttaatccactttatacattggggttctcagaaaatctaactgaaaaagagaattccacttccatagatccctgtatcagatgatttctaaggtctaagattactatcttttgcaatttaacatttaaataaaatgacaccctccctgcctaccccaccccactcaaatacccatgttaaaaatcttccttaaagatgagtgaagggaacaaacataccagtcataggagaaggtggcactaccttccgtttagtttttttgaaaaatccatcctctgggttgttgaaataatattttcgtgtcaagaaagactagtaaaaaaaaaaaaaagtgttttaagtctaagaactatgacacagcaaactgttaaattactccccagtggcttagtcagaaggcctttaggatatgctgttccgctcagagctgtcagcctacttggcaggcgacctgacactttagctgagtcacatttaaaaacaatttcctaagaagggtgaggtcaccatgagagcaaacaccaccaggccacagcttaattactaagttgccaacctttagctttccccagagcccccttataaaacattcagatatctactgcccaacagtgaatcgtggagctttttaataaaagataaatgagtacctgtttgggaatgtattttccattttccctgaggactctgcttcgaattaggacttgactgaaaaatacaaccaacacaatgagattttaaaaagtgaaacactagaagaaaatgggagagtcaagtagaagacctatttaaacacaagagagggcctatttggcaacagctctgtgtggaaacttcccaaaatacaagtatctttaaaaccaacgtaaacttatttaacctaactactaggttttcagaaaagtatttttcaaaagtgactgtgtttctgaacacataaatatttcagagttaggtacatttgggacattacactcagctttttcttatttgataataagctaggaagacactttctctgagtgaaaagaatagttgaacactgctcaggagatctggggtcaggagaaagggagaagagtgaggataaaagaaggaatttcttattacctacagagaaatgagaacaggccttgagagggttgctatctgatggacaaatagaaaatctacccagaagtcagactgttagaaagctctcagtaaacatttattgaataaataaatgaaattactaggtgatcttaaatcaactattagagccatagttgatcaataaatatcatgctaggccaggtgcagtggctcacgcctctaatcccagcaatttggaaggcaaaggcaggtggatcacttaagcccaggagtctgagactagcctgggcaacatagcaagaccctgtctctaaaaaaaaaaaaaaaaaaaaaaaaaaaaaaaaaaaaaaattagccaggctggtggcacgtgcctgtagtcccagctactcaggaggctgcagtagaaggatcacctgagcccaagaggcagaggttgcaatgagctgagatggcgccactgctctccagcctgggcaacagttaagaccctgtctctaacaacaaaaaaagaatacagtgttatgcaacaaatgggtgttgctaagatgcaaatgacaaaacagagatcaaaatattaatttttttctaggtactcaaaagttcattaaaggaggaaaagaggaaaaggcccttaaagtaatggaaatagtcttgaaacgtgaaaaaaaattatgaacagaaatgaacatagtaaaacctgtgcttggtaggggccaggcgcagtggctcacatctgtaatcccagcactttgggaggccgaggtgggcggatcacgaggtcaggagtttgagaccagccttgccaacatgatgaaaccctgtctctactaaaaatataaaaattagccgggtgtggtggcctgtgcctgtaatcccagctactcaggaggctgaggtaggagaatcacttgaaccaggaaggtagggggttgcagtgagccgagacgacgccattgcactccagcctggggtgggactccatctcaaaaaaacaacaacaacaaaaaacaaacaaacaaacaaaaaaactgtgcttggcttcctgtctctactcaatacaaaccacttgttttaaacagtcagtaccccggggtttcccctgtcacactacacatattctagtttctccacatgctgggaatgttccagtgccctttcctttccgagttctactccatcatgccttaacatcttcaagtctcagcatctccacgaagcttttcccaatgcctggagccctcgtggaattctctctgcttcctcctcctgagctcattatgctatacagttctctactttatctacagggcgcaacatgtaatacattctgctccctggatgctagtctaaagatactcaaagtgtggtgaatgctagtctgtgataagcacagacactgagagtaaggatttagagacttttataataatttgacattgtcacaacatccagatacatgatcaaaatattttacaaaagtattagcctataagagattagaaatttaaaaaacaaaaaaccccaaaactggtccttcaccattgacagtataagaagcactgggtctagagtaatgggtaaaaacttaagctctggagttgaacacatgggttcaatcccacctctgccacttattagccatgtgatcttgagcaagtcacttaaattccctaagtctctattcatattctgtacaagggtagatttattctttcattgaacaaatatttcttgaacttctaagtgccaggtgacatgaagaacggtgatcaaaatacaaatatcttacgatggtcaaagtctagtgagggggaaagacattaaccaaataaccagaggaataaatgtgaaattcaattatcatgtcctagagagagatggatggtattgcaagagtgcataaccaggaggtgatggagtctggaaagtcaaggtctgagagtttgctgaggatgtaggattaagctggactcttcaggatgagtgaggattaccttggcaaagtgctggtgtaaacaaaatgggcaaaagcctcgtagaagtaaacactctgcctctgaggacctgagaaaaggccacatgactggaaaaaggagaactatagaaaatgtgatgaaaacaagacttgagaggtgtgcaagagccagactatacaaaatcatgtggtctcactgtatttttttttttttttttgagatggaatctcactctgtctcccaggctgaactgcaatggcgcaatcccagctcagtgcaacctctgcctcacgagttcaagcaattctcccgcctcagccttcagagtagctggggttacaggcgcgcaccaccatgcccagctaatttttgtatttttagtagagatggggtttcaccatgttggccaggctggtctcgaattcctgacatcagatgatccgcctgcctcagcctctcaaagtgctgggattacaggcatgaaaaaccatgcccagccaggtcccactgtattttgatcactgtcttaagagcaaaaggaaactaatgaaggattttttttttttttgagacagggtcttactctgttgtccaggctggagtgcagtggtacaatcttggctcatggcaaccttgacctctggagctcaagtgatcctcccatcttagtctcccgagtagctaggactacaggcacacaccatgacacctggcaaacttttgtgttttgttttttttgttttttttttttttgtagagacagggtctcactatgctgcccaggctggtctctaactcctggactctagtgatccacttgcctcagcctcccaaagtgctgggattacaggcgtgagccaccacacccagccaagtggagaattttaggctgagttcttcacatatatgatcttatatgactgtacctggcacatcctaagcactagattaatagtatctgttattttttcctttgcatattttattacttgaacagaaactctgagagcagggtcgtgaccttgtcttacactgtaccccacagcatgcagcagagtgcaaggcacatgataggccatcaaaaggccattgttcacagccaggcgtggtggctctcgcctgtaatctcaatactttgggaggctgaggtgggaggattgcttgagccctggagccctggagttcaagaacagcctagtcaacataatgagaccactgtctccacaaaaaaatttaaacattagccaggtgcagtggcgtgtgcctgtagtcccagctactcgggaggctgtgggaggatcacttgagcccgggagatcgaggctgaagtgagccatgatcgcaccactgcgatcgcagcctcaatcactgcagcctcaacctctttagtccagcctgggtgacaaagcaagaccctgtctccagaaaaacaaacgaaaaaacacttgtccagtctacgataactcaagactttcccaggcagtgtaatcaagagaaattcatctaaatctcctacaattacactgctgaacaattttgtaaaaatgaagttgagtattgtgaccctgaggtatttcaagacctaaataagcaatcttaaattatcctgtattttctaacactcactttcttaagctgagatccatagctgtgttctctgaagtttgcaaattctaaaagaaatttttaattttgtatttttattttcatgaatatctaaaaataagtctctgtactgttataaagctttgtaatttgcaactgaaggacatcttttatttatttatttatttattttttgcagagacagggtcttaccatgctgccaaggttggtctcaaattcctgggctcaagggatcctcccatctcagccccccaaagtgctgggattataggtgtgagccattgcaccaggcctgaaagatattttcttggaataaaactttaaagtcagtacttctcaaaccagagttccaaattcttaagaatcagtgtttcttcctttccaaaatgtcagtagtatatttgtcaagtctgagaaccattttttacacataatctatccccaaacctagtctaatatatttcattcatgtattttacagctttggtttaatacctgttaaaaaaaattttttttttttttgagacattgtctcatcttgctctgtcacccaggctggagtacagtggcgtgatctcggctcactgaaacctctgcctcctgggttcaagagattctcctgcctcagcccgcagagtagctgggactacaggcgtgcaccaccaccccagctaatttttgtatttttagtagagatggggtttcgccatgctggccagccttgtctcgaactcctgacctcacgtgatccacctgtctcagcctcccaaagtgctgggattacaggcttgagccaccatacctggtgcaaatggaaattttcttttttttgagacatagtcttgctctgccgcctaggctggagtacagtggcatgatctcggctcactgcaacatctgcctcccagttcaagcgattctcctgcctcagcctcccgagtagctgggattacaggcgcgtcccaccatgctcgggttattttttgtatttctagtagagacggggtttcaccttgttagccaggatggtctcaatctcctgacctcgtgatctgcctgcctcagcctcccaaaagtgctagaattacaggtgtgagccaccgtgccctgctgctaatggacatttatagtatatttattaaaatgttttatatcgctgggtatgcctatacccagtggctcatgcctataatcccaatattgtggaaggccgagatggaaggatcacttgagctcaggagtttgagaccggcctgggcaacggaggagaccccatctttgcaaaaaatttaaagattagctgagcgtggtggcacacgcttataatcccagctactcgagaggctgaggtgggaggatccttgagcctgagatgttgaggctgcagtaagccttgactgtgccagtgctctccagcctgggtgacacagcaagacttgtcacttaaaaaaaaaaaaagaaaaaaaaagttttacaactaaaacacacctttttcttggacttaggctggttcagcatgtacagcattttgctcaagtcaaatgatgacctgatgagactgagccactccatgtcagagctggtataatccaactacctcacttaagggatgcagcaattatgagcagagacattttctctagagcagtggttggttcttcatgggggtgttactgccctgtagggggcgtaatggtaatctgtggaattttttttttttttttgagacagagcctccttctgtggcccaggctgaagtgcagtgcagccatctcggctctctgtaacctctactccttaggttcatgtgattctcctgcctcaggctccctagtagctgggattacaggcacatgccaccgtgtctggttaatttttgtatttttagcagagatggggtttcaccatgttggccaggctggtcttgaacccctgactttaagagatctgcccacctcagcctccctaagtgctgggattacaagcatgtgctactgtgtccggctgttacattccttcttaaggaagcgttcttggctgggtgcaatggctcacaccctgtctctactaaaatacaaaaattagccaggcatgctggcgcatgccgctaatcgcagccactcgagaggttgaggcaggagaatcacttcagctggggaggcagaggttgcagtgagccaagattgcgccactgcactccagcctgggcaagagtgagactctggtctccaaaaaaaaaaaggttcttgtaaacagactacactaactgtgaatttcattttgtggttacaaaagagagctttggatctgatataattcagaaccattgctctaatagtgaaccatgggcagaaaatcatggcagagaatctacgacagcaggaatcatggttgaagagggtttaacctgggagtgagactgatctgagttcaagtacaggcacaatatttccctactttgggaagactacttaacttttccaggctccctggaattgtaaaaatgggttaaggagtatctgcttcagtgctaatgtaaggctaaaataagaaattttacaggtgccagaaaatgctaaatgtctgagctttccccacttcgcacttttctacagcccttctttctgtggtaaatacacttttttttttttttttaaatgagatggagtctcgctctgtcgccaggctggagtgcagtggcatgatctcggctcaccgcaacctctgcctcccggattcaagcgattctcctgcctcagcctcccgagtagctgggactacaggcacgtgccatcacgcccagctaatttttgtatttttagtagagatggggtttcaccatgttggccaggatggtctcaatctcttgacctcatgatctgcctgcctcggcctctcaaagtgttgggattacaggcgtaagccaccacacccggccagtaagttgacttcttttctgtttttttgagacagagtcttgctctgtcacccaggttgaagtgcagtggcgcgatcttggctcactgcaagctccgcctcctgggttcaagcaattccactgcctcagcctcccgagtagctgggactacaggcgcccagcataccacgctcagctaattttttgtatttttagtagagacggggtttcaccatgttagccaggatggtctcgatctcctgacctcgtgatccgtccgcctcggcctcccaaagtgctgggagtacaggcatgagccaccatgcccggccagtaagctgacttcttaaggttcgctccagggtggggtgctggctctggtcagttctgaaactaatgctacagaaagataaagtgatcgctgtagtatagtggaaaaagcccaatacccagaaggcttggtgtgaagtcctaaatgtcaccctgtgtgacgctgtaacgcacctggcactcttctcaacgaacgggtgggatggaacttgttaaagcctctgtttctataaaatgagacaatatgtacctcatagagttgctttgaagttttaaataagttaatgaatgtaagtacttcacatagtacctgatatagagtaaatggttattattcttcttggcataattgggaagaactaactgaaaatgttacagtagtgcttcctaaacttcagtcactctcatgccatgttagaatttttgtccaacgcttgtatcattacatatttaatactttttatatatcaacttttttcccatctatatgattttaaaggaatctttaaattaccagcaaatggaaatccagtattgtcacaaaaaagaaagtaacttaagtacagtagaaacaaaacaacattattaaattttaactagacactgttacctgtgaaaagttcttagcctgaggcttactctctttattaaaacgagaaattaatgtgagagagaggtgctaaagatatagtagcacttacctgagatgatttctgaaagtaatcagaactgactgaaaattgcttgtttttctaagagacaaggtctcgttatgttgcccaggctggtctcccacaatcctcctgcctcagcatcccaagttgctgggagaaaactattactttaatatgaggggctacatgtctagataaccacctataatcatctcaaattcctttatctgtatataaatattgcaacgaggggctggttgccatggctcacacctgtaatcccagcactttgggaggccaaggcaggtggatcacctgaggtcgagttcgagaacagcctggccaagatggtgaaaccctgtctctactaaaaatacaaaaattagtcaggtgtggtggtgcgggcctgtaatcccagctactcggggggctgaggcaagagaatcgcttgaacccgggaggcgtagactgcagtgagctgagatgacgccaccgcactccagcctgggcaacgagagcgaaactccgtctcaaaaataagcaaataaatagataaataaataaatactgcaatgaaatatgtgaggaagttgcctccactctagtggggggaaataattacaattccttacatctctaatggcagttttacagactgcaaagcgctttggtacttggcatctcagctgacagtcccaccaggcccgacgcctggaacagtaatttggtagaatgcagattatcacactcacttgactggatgttacaaagactaaacgctgtaacgcacctggcactcttctcaacggaagggtgggatggaatagttcataggtaaacccaccgagggtcggcgactaacctaaaggattaacagtactgtttttttcaacactcaatacgtcctagatcctgtgctaagggacttacagacatcacctaatttgattcctacctgtctatgaagcaggtactgttatcatccccatttcacagaggacaaaagtgaaacacagaggtaacgggtaaggtcaccctgtcagagggggcgcgacgtgaacctaggcaaattgacacaactcctgcacttttttgcccaaggtcacggcggtgtgaggtaggctggagaagggagggcgctgacctgtcagatacttgttcctgggtgagcttcttgtcgctctgcagcaggatggacacgtagtggcggatcatgcctacgaagaaagtgatgataacgatgggtaggaccacccagaggcggatgttggagtcgagcaacagttctggccctgccatcttcactgaaagctggttcccagtctggaatgggcgagcttctcttctccggggcacagttgcttctcttcggcttcgcctccgggccttctcaagcccctttgcccgtgtaccccagaactctcctgcgactgtgagccgagcttactgccttcagctgggctgcctggtcttccact

SEQ ID NO: 1515 - DNA, 1312 bp, Homo sapiens
ttgctgattctgttttctctgcttggaatgcccttctacacagaggaagtctttcaagacccaggtcaaaggttagctctcctgtgaacacttgttccttttctatctggtataagcagccattttaactatcgttaaaggtcagggtttcttaacttgggtctgcgggtcattatgaataagttttagagggacatgtctgtatctatgtccacatatgttactctggaggccagggtcagagattccagattctcagattcggtgacctcaaaaaaaggtctcttttggccaggcacagtggctcatgcctgtaatcccagcactttgggagggtgaggcaggaggatggcttgagctcacaagttcaagaccagtctgggcaacatagcaaggtatcgtctctaaaaaaataataaaaaattttaaaaagctcttaggtgtctctctcttgtgagttgagggcaaggttcacatctctttcgtcttagactccccgcactgatccaagatagacagtcaactgctggcagaaggttgttagtgacttacagaggcaacactttcacaggcaaagaagagaaaacaggacggtttaatttgtggagtcgagtcgtttgttcttaattactgcactcaacatgcaaattatattcacctcttggtacagaaatggcaccgtcacttccctgggacctttaatccagacagaattattcttgggcacccttatctgtgtgtctaccaacaactgccgtctctcccttcttacagcaatatgtaaattctcttttgttccaagcaactgggaaatgaggtccttcatccaaaggagtagccatttccagtatagcaccactgatttgtcaatggatttgataagatttgatacactgacatccagatcaagattttgcattatttatagacagtctctgatgatcccaaaggcactttagaatctggcagtgcctcagggtcactgattttcactgggcagaattaagtgatatagaaggtttgctgagtctgtcctgaccctgggtattcactctgaagagagtttatttgaataaggttttgacatatttggtctctatgtctatgtaggctcaaaatgaacagggagattcattttgttcatccatagtttctaaacctttggtagtggaaatggtttacttgtgtaaagaaagttaacaatactaacaaaactaatggtaaaacacagggtgtttggatcccaagaaaacaggagtttactgtggctagatgtcaggctgactgcacataatcattagctataattaac

SEQ ID NO: 1516 - DNA, 294 bp, Homo sapiens
gtggctcactcctggaatcccagcactttgggaggccaaggtggggggatcacgaggtcaggggatcgagaccatcctggctaacaggtgaaaccctgtctctactaaaaatacaaaaaaattagccaggcgtggtggaggcgcctgtagtcgcagctactcgggaggctgaggcaggagaatggcgtgaacccaggaggcggagcctgcagtgagccgagattgctgcactgcactccagcctgggcgacagaggaagactccgtctcaaaaaaaaaaaaaaaaaaagaaaga

SEQ ID NO: 1517 - DNA, 1152 bp, Homo sapiens
ggtgtcaagaaggatttttacaacacttaatgtcaatgttttgttttcttataattaaaaagtaatttacattttttgtagcttaaaatattttattgttgattgttagtcttggtgtatgatttcatgtgtaagttttttaattagatgcacttctgtgaaatatcaaaagaaatgatttttttgatttacactggaggcatgcccatttggcagcagatgcatcaaatttgcttttgaaaggtgcttttcattggacagaaccataagacactattttgataacattttgagtacggagagagaatacagagcatttttattatagtgctagagggtttggaaggtcatctatttttctctgaggaaaaattgagctgtacatttatcagttcagagtaaatgacagaattgcaagagattatgctaatatgtacataatttgtgtacataattattaaaccatgttaacaatgcaagcttccgttaaacattgaattttaactattatttgcataccaattcctctgtttaaagactactgattctgtatttgggaccactgcacagatgcattctgctgttaagtgggggctgttatagttagatactgaagcagaaaaaaaagacttgactttttttttttaagtgtacatgctacttatgctgagctggacatacaggaaaccattccatttggatgactttcttttattccaggtctttttcctaatagtagttcaatatgctgctattataaacgagaatttatagaatgcaaggaatgtagcaacctacataacgttatttccttcaaaactatttcctggtttctaaagtatgtggatttaaattgtaaacagaacctgaaggcagtgtaactggcacacctcactgttacttatccccaattctgtaggatttggataggtggctggatggaccattgccattgaagaatgtacatcagggatcatcgtacctcggctattacatggtgccttaaaacagaactgaagctaaggtttagtaaggtttattttgttcatgtgactaactcttcaatccatttgacaaagtgtgcctgtcattttcagattcctgaagtaaggacaggtgacatgttcttcaaaggaatttagggaaaacaaa

SEQ ID NO: 1518 - DNA, 1655 bp, Homo sapiens
ggtgtcaagaaggatttttacaacacttaatgtcaatgttttgttttcttataattaaaaagtaatttacattttttgtagcttaaaatattttattgttgattgttagtcttggtgtatgatttcatgtgtaagttttttaattagatgcacttctgtgaaatatcaaaagaaatgatttttttgatttacactggaggcatgcccatttggcagcagatgcatcaaatttgcttttgaaaggtgcttttcattggacagaaccataagacactattttgataacattttgagtatggagagagaatacagagcatttttattatagtgctagagggtttggaaggtcatctatttttctctgaggaaaaaatgagctgtacatttatcagttcagagtaaatgacagaattgcaagagattatgctaatatgtacataatttgtgtacataattattaaaccatgttaacaatgcaagcttccgttaaacattgaattttaactattatttgcataccaattcctctgtttaaagactactgattctgtatttgggaccactgcacagatgcattctgctgttaagtgggggctgttatagttagatactgaagcagaaaaaaaagacttgactttttttttttaagtgtacatgctacttatgctgagctggacatacaggaaaccattccatttggatgactttcttttattccaggtctttttcctaatagtagttcaatatgctgctattataaacgagaatttatagaatgcaaggaatgtagcaacctacataacgttatttccttcaaaactatttcctggtttctaaagtatgtggatttaaattgtaaacagaacctgaaggcagtgtaactggcacacctcactgttacttatccccaattctgtaggatttggataggtggctggatggaccattgccattgaagaatgtacatcagggatcatcgtacctcggctattacatggtgccttaaaacagaactgaagctaaggtttagtaaggtttattttgttcatgtgactaactcttcaatccatttgacaaagtgtgcctgtcattttcagattcctgaagtaaggacaggtgacatgttcttcaaaggaaatttagggaaaacaaaggaaaacaaaaagacaaaaatcagtttccctctttgagtgaccgtggatctattttttattcttagagctgaatattacttgattacaaatcagattgcttaagggtgtggaatagcaggctagttttaataccaacttgttaacataaaatcatatatgttttagaccattcttatttagttacaattttagaaagttaacaaagtaagcaggtacttatcgaagtgcatcttttcagtctaaatgtttgtctgtgtgtctaggtgctggtgagtccacatggacacatgagtgcccatggggcaggagtctgctataaagtcagaaggtgagatcctagagagttacacccagccccattttaatttgcatgaaaagccaaggttcttttaagcactcaaattatttaatgattaaaacacaagaaaggcacatctgttcatttaaatagttgtaaaaaactaatcagcaaaaataaatagataataaagccaaaaaaaa

SEQ ID NO: 1519 - DNA, 3879 bp, Homo sapiens
agtttggtgatttaaatgccgtgtctcctggaaatctggataaaggtaagaatcgaaaataatgtacattttaagaacttttatttattaataagttcttacagaggaaaatacggtatatgtttacaacactctgattttgtggaagtggcatacaaatcctagataaataggaaactcctgtcttttcagtatttctccatttttccccatccctatgccttctacatatgaggtatattaaatgcagataactgaatttaaatgtagttataaaattctttatactttttgcctgaagttcattacaagcaacaagaaattatttctgaccatggctagagtcctggagataagtgataaaattggatgagacatttttattcaaggcccaccaggcaagaaaaaagattcctcggctcacctacctcaccagttcctacttgtgtgtagaaaaagaactcagagatagcagtgaggtttactgtaaatgcaagattagtagtggtatagatgaaaaaggtaacatatgtacttctgaaattttaatatcagcattgccactctaatatacagtataatatgataacatgatatatatttctgaagaacctcaagatcaacaaaatcacacaataaaaaaagcaaggtggacttagggggagatagaatgcggatagagcacacaaatcttacccacctttataagcagagcagaagcaaaacaatactgataaatataccagtgcaatttttaaaaacaagtaaattatctattaaccactgcaggaaacagagccctttcttttaaaaggtggcggagggtgggaggtctcttgaggtgttaaagaattgttacggttattgactatcggcgacaggtacaaaatgcacaaaaactggggagaactatgcacttagcccttccaggccagagccactgggcaaaatgaggtgaaaagaagtacgtggggagtctgtaaagaggttcagcgctattcgccaaagtgtgcaatattaaggtactcagtacactagcagcgcagggaaatgagaaaattatagccaaaaaaattgttgctacaaatatatactctataggattaaccaaataacccttagaaaaataagtcaatgatgatattaattagtaattttagagcaagaaaggtggtaattgatatccgtgtcccacataaagcaacactgatgatatactcacaccaaagcctcataacccaaatttagggatttcatcccagggtgtccagaaggacagtagagttttactgctcagtcagagactgaattccagccaggcttcttcacacggtgctgaaccacagtcttctgtaaactcctgtagcgcctaattttagtttttatgcaccaaatttccataacctgaagtagatttctagaaagtgtcttcgagtttttatagaagcataaaatgtctacagaattacattcctttgtccttaggacctggagaatgggcttgcttttataagttgctttgtaagttctccaaaggaaacctgtcacccagagatagacctaagcaaaacctacctggaacacttaaatcgtccagtccattatctcactaccctttccatccacaacaaaatagacagaggaactttcctcactttgtctccactgccctccctgcctgaaaatgagcttttgtcttttcagtgctcccttttttattattttgacactaatttcttaggtacagggaagtctgtggacagggagcagagaagcagtgtgacttgtcctcacctgctggatgtggccacgctggtcccatttacccccagacctcttgatggctcttgagttagagccagatgggcatactcaggacctaaagactgaatgtgaaatcctaggaggttttgagggcttctcccacaaaatgagaattcttattcttgataatataagggatatttgctccgtagaaaaatttcaaataatacagagaattagaaactatagaaagtgaagctttattatcacaaccataagagactgccaccatgaagagtttgtgttaagatccttacagacattgttgttttatgtataaaaacatgaaaaaccaaaacatatcatgcaaacatgtttcaagtataccctcttgatgaagtaaatgtctacaaaaggtatccctctccctgtagccctccaaccctttgaatgtacttgttctgacacactcaaatattatcattaagttcatttaccagaggcaaataggtaacttgataaagtcggtgggccgagatgtcttttgcctcatctaagagcacttctttgttttattggtcactaatgcgtgacacacatttctaggtaatgcatgttaatctccagctgtttaatcacaaattgccatttctcagaccttgctcctggtggctgtacactgtacagccatatatggaagcccttttacctctcactgcttttttctagaacaaactttgccctagtcataatgaaataagaaaagtcaaggggccttgtttatagagacagctgcattagcagagatttttgctgtgggtgtctgccaagtggtaaagttaaaatcttactgcttgcaaagaatccagcttaatctgactaaagagatacttgttgcacattcattgtatgtgatatgccatagaacagtagagaatggagacctgactctgtttatacaagccactgtaattatccctcatgaagaggtattctgaggagactctcacacaatagtaaagctgtatatgtgcattttctctctctaatgtacttttgaattttaacagtgcatactggaaaaaattaaatggcattctattataatgatgctttagttaatataaaacgtattacaatttgggggtaacagtgactatataatgcatttaatttccagaaatgaataccagctattaacagtatcagttgccaagaatggaaatccattgcacatttttaatctgatactactgcctcaaccttaataatttttataataaaaattaagggtttatttaatactgtgacattgatgagtgccagaaagtcttacagcagcctctgtttatacatggaatagtaatgttaagaatcaacataggtcttatacattaacgctagcatagataaaatttatatttagtgtagatttttggaggaaacaacactttttttgtgtttgcgttttcagctcagtacattccccaaaagccagcataacataccaaagtgactactttattatgacacaaattatgccattatttaatataacacttagggaaattccaaaggcctttttttttaaaaaagttaacaaagtatcaatcacaagttgccaaaagtaaattaatctcactatgtttgaaagaattatagatgcatcagtacagcattgatatgaataaaatctgatgaaaagaaaacctctaagctttgtttcctgagaagagctaagctgttgctttcgtaatgtcctatattaaagtgtttctaaagcacctgttgattgctattttctaatttgtcttcgatgatagtcttggtattatttgtttgtgcagatgaaggcagtgaagtagaaagtgaaatggatgaagaactggatgactcttcagagcctcaagccaaaagagagaaaacagagctgagccaggcatttccagtgggctgcatgcagcctgttctcgagactggcgtgcaaccaagcctcctgaatccaattcacagcgagcacattgtcacaagtactcagactatcagacagtgcagcgctacaggaaatacctacactgcagtctaaagaatattaaagcgtatttttccagctta

SEQ ID NO: 1520 - DNA, 2622 bp, Homo sapiens
ctatattaaacccaagatgtttatctttccagtggtattggggtaaggggggtggggggttggaaagacgaggtgagccagtctgtaaagttagaaataccaaatggcttatcgggtaatacacagtgtatttaagctgttgttgcttaattgcctcagactactcaaataacatcaacaacatttcttaagtaaaatttaaatattttagatgtaattttaaaaactgatccaaattttttattatacaactcactcatatatttgaaagtcttcactagcatagtagcatcaccttcatctaaatgtcatttaaattactgtccccctttttcctcccaaaaagacaatggatttgtaccaaaacacacacaaaaaaggcaaacaaaacatgataatctgcaaaagttcatgtatctacttcattgtgcataggaagtgtttacaggtaaaattaaaatcaaaaattgaaaaaacactcttcattttggctctcctttctgaattttttcagtttcctgtctctacccgccatcctttgagtgatactatatctgtattggaccaaatgtatttactggtttcattttgtttattgaatgactttaaatgtatttattatcattgtttaatttaatgttggatatatttgtatcattacaggaatctggtaataatgggcaaatttagattgatgaggcttagggatcggggatgctccaggattcaacatttcttccaattgttcatggtttgttctaaattaggacagattaagaactaataaaacattattacatttgaacttgactcaataaaaatattctgatctcctctatgaatattaggaatattctttgtgattagtgtaagtagtttggatcaaaacataaaaagaagacctatggtttatgctacttctagttatttgtagttcacagtaaaacatgcacagacacacacacacattttcatcaatttcgaatttgaattgtgaaaaatatataagaaaataaaaacaatttatacatttgagcaaattgagcaatcacatttattgcatttatttccctttttcccttttttcactcattgaaagggtggggttttttaataatattagacactaaccctcaacagatttattcacaaatgacacaagtacacattttaagacttctttgtatttcttgcaattataaccaatcactagtcatgaaatatacctacataaaccaagtcctacactttcagtgaggaagaatgtaaggaaggtatgttgactgttttcaagtttcagaaaagatattttcatatgataggattgagtatcatgggtatagtttgatcttgacatatagtttgaaaatcatactcaaaagatttgcattcatgaaaccagtgaacaatagggtggaatggatgaaccatctccttggaagacagggcccaattttcaattttttctttggctatcaagttgctagtcacttattcaggattttcatccaaactgtgtttggactgactgtataagtcttactgccttttcagaaatctgctttcctttgtgtgatttttcttgtactgtatagcacggtttatgcacctctctttagatggtgtactttaaaaacaaaagtaaaatttagaaaatggttttaacactgcatacctaaaattagtagtgtgcagcattgactgcctttgatttgtagtagacaagtaaaaatgaatacgttcttgtagaatgctgtaaaagttattcaggaatgaatacggttttagtgccgtaatcatgaatctttttatatgaatgcactgtctaaaagtgctaaatgcattttcaaatttttaaaaattcctcagatgatatatttgaaatgtctaaaataatgctgtgcttgaaacattagtgtaaaaggaaaaaaaaaatagtgtcactgtgatgttggtcctccctgtgtggacacaagtagaaagaaaaaacttggcaagtcacctttgtgtacaatttgaggcagtggttatatacaataaattgacctttattatatcccccagacacacacattcttggtgagaaaagaacaaccatccagaaattgagatgagaacttttgtgatctgtatgaatcacagcagatcatgggggaggaggattggcatgcagtgctgttgaaaattgggcttgttgttagatcagaacaacctccatgtatatggttagaacgaatcaattaatggaatcctagtatttctgcaagtttggtgatttttaaaaactggaatagaagcattaattcagtgcttagttctagtattagaaaacccctttgatgtaatgccttgtattaaccctttgagcattgtaagatatacaatgggggacaaaagcctttcagatcatttatttagacttagaccggtaaagtatactctatatccaaatgtctaattatgctgtttttttaaaggggggggtaggaagagaaagtgtttccacgccgaacacttgcattttatatacaactcttaatttttcttcaagagggcttgatatatttattcccaaatattcactgccatctaagtaagtgtactgtttacagaaaaaaaaaa

SEQ ID NO: 1521 - DNA, 3877 bp, Homo sapiens
agtttggtgatttaaatgccgtgtctcctggaaatctggataaaggtaagaatcgaaaataatgtacattttaagaacttttatttattaataagttcttacagaggaaaatacggtatatgtttacaacactctgattttgtggaagtggcatacaaatcctagataaataggaaactcctgtcttttcattatttctccatttttccccatccctatgccttctacatatgaggtatattaaatgcagataactgaatttaaatgtagttataaaattctttatacttttttcctgaagttcattacaagcaacaagaaattatttctgaccatggctagagtcctggagataagtgataaaattggatgagacatttttattcaaggcccaccaggcaagaaaaaagattcctcggctcacctacctcaccagttcctacttgtgtgtagaaaaagaactcagagatagcagtgaggtttactgtaaatgcaagattagtagtggtatagatgaaaaaggtaacatatgtacttctgaaattttaatatcagcattgccactctaatatacagtataatatgataacatgatatatatttctgaagaacctcaagatcaacaaaatcacacaataaaaaaagcaaggtggacttagggggagatagaatgcggatagagcacacaaatcttacccacctttataagcagagcagaagcaaaacaatactgataaatataccagtgcaatttttaaaaacaagtaaattatctattaaccactgcaggaaacagagccctttcttttaaaaggtggcggagggtgggaggtctcttgaggtgttaaagaattgttacggttattgactatcggcgacaggtacaaaatgcacaaaaactggggagaactatgcacttagcccttccaggccagagccactgggcaaaatgaggtgaaaagaagtacgtggggagtctgtaaagaggttcggcgctattcgccaaagtgtgcaatattaaggtactcagtacactagcagcgcagggaaatgagaaaattatagccaaaaaaattgttgctacaaatatatactctataggattaaccaaataacccttagaaaaataagtcaatgatgatattaattagtaattttagagcaagaaaggtggtaattgatatccgtgtcccacataaagcaacactgatgatatactcacaccaaagcctcataacccaaatttagggatttcatcccagggtgtccagaaggacagtagagttttactgctcagtcagagactgaattccagccaggcttcttcacacggtgctgaaccacagtcttctgtaaactcctgtagcgcctaattttagtttttatgcaccaaatttccataacctgaagtagatttctagaaagtgtcttcgagtttttatagaagcataaaatgtctacagaattacattcctttgtccttaggacctggagaatgggcttgcttttataagttgctttgtaagttctccaaaggaaacctgtcacccagagatagacctaagcaaaacctacctggaacacttaaatcgtccagtccattttctcactaccctttccatccacaacaaaatagacagaggaactttcctcactttgtctccactgccctccctgcctgaaaatgagcttttgtcttttcagtgctcccttttttattattttgacactaatttcttaggtacagggaagtctgtggacagggagcagagaagcagtgtgacttgtcctcacctgctggatgtggccacgctggtcccatttacccccagacctcttgatggctcttgagttagagccagatgggcatactcaggacctaaagactgaatgtgaaatcctaggaggttttgagggcttctcccacaaaatgagaattcttattcttgataatataagggatatttgctccgtagaaaaatttcaaataatacagagaattagaaactatagaaagtgaagctttattatcacaaccataagagactgccaccatgaagagtttgtgttaagatccttacagacattgttgttttatgtataaaaacatgaaaaaccaaaacatatcatgcaaacatgtttcaagtataccctcttgatgaagtaaatgtctacaaaaggtatccctctccctgtagccctccaaccctttgaatgtacttgttctgacacactcaaatattatcattaagttcatttaccagaggcaaataggtaacttgataaagtcggtgggccgagatgtcttttgcctcatctaagagcacttctttgttttattggtcactaatgcgtgacacacatttctaggtaatgcatgttaatctccagctgtttaatcacaaattgccatttctcagaccttgctcatggtggctgtacactgtacagccatatatggaagcccttttacctctcactgcttttttctagaacaaactttgccctagtcataatgaaataagaaaagtcaaggggccttgtttatagagacagctgcattagcagagatttttgctgtgggtgtctgccaagtggtaaagttaaaatcttactgcttgcaaagaatccagcttaatctgactaaagagatacttgttgcacattcattgtatgtgatatgccatagaacagtagagaatggagacctgactctgtttatacaagccactgtaattatccctcatgaagaggtattctgaggagactctcacacaatagtaaagctgtatatgtgcattttctctctctaatgtacttttgaattttaacagtgcatactggaaaaaattaaatggcattctattataatgatgctttagttaatataaaacgtattacaatttgggggtaacagtgactatataatgcatttaatttccagaaatgaataccagctattaacagtatcagttgccaagaatggaaatccattgcacatttttaatctgatactactgcctcaaccttaataatttttataataaaaattaagggtttatttaatactgtgacattgatgagtgccagaaagtcttacagcagcctctgtttatacatggaataataatgttaagaatcaacataggtcttatacattaacgctagcatagataaaatttatatttagtgtagatttttggaggaaacaacactttttttgtgtttgcgttttcagctcagtacattccccaaaagccagcataacataccaaagtgactattttattatgacacaaattatgccattatttaatataacacttagggaaattccaaaggctttttttttaaaaagttaacaaagtatcaatcacaagttgccaaaagtaaattaatctcactatgtttgaaagaattatagatgcatcagtacagcattgatatgaataaaatctgatgaaaagaaaacctctaagctttgtttcctgagaagagctaagctgttgctttcgtaatgtcctatattaaagtgtttctaaagcacctgttgattgctattttctaatttgtcttcgatgatagtcttggtattatttgtttgtgcagatgaaggcagtgaagtagaaagtgaaatggatgaagaactggatgactcttcagagcctcaagccaaaagagagaaaacagagctgagccaggcatttccagtgggctgcatgcagcctgttctcgagactggcgtgcaaccaagcctcctgaatccaattcacagcgagcacattgtcacaagtactcagactatcagacagtgcagcgctacaggaaatacctacactgcagtctaaagaatattaaagcgtatttttccagctta

SEQ ID NO: 1522 - DNA, 4041 bp, Homo sapiens
cgctgctgggcaagcacgagctggtccccgtgctgggctcgcgctggctcatggtcaacgtggcgcacgatgtgctggcggccgcgctctacggcgccgccaccggcatcatgagcgaccagatgcagcgccacagctactgcaacctcaaggattacccgctcccctgcgcctaccacgccttcctggcggccgccgtctgcggcggcgtctgccacggcctctacctgctttcggcgctctatggctgcgggcgtcgctgccagggcaagcaggaggtggcgtgaggccgcccgcgcccgccgcggccccgatcggggcgggggaatccccggagaccagcctccttaatcccttcccccgccgccgccccgcgcgggtgcgccctggcaccctctccctgccctccagcgtttccactgtcgcccgcgcccgggaaccctgacgctcagctcccgcccgacggcagcgccgccgccgcccagaatcccagcccagaatcccgaccgccgcgccggacgcgccgtctcccgggacaagcgcaggctgcgatccgaggggctgacacacactcgcagacgagccgccccgaggcgaaacctcgcggttcctcttcccttccctgctgagactaagacgtggacaggggccgcgcagatccgggggaggctcccaaattggaaccaggcttctggctgcccccttccctcccgccccgtggtcggaagagcactcccttccctggcccctcatccagcctccggtgctgtaaaacgcaggcgctgggccgcgggcggagctgaggacaggccttggctggtcccaggatgagcgacgagtttggttttagctggggattgtgctggcatcctgcgaagctcctcccagccggtctctctgtgctcggttgtcttggggtggggcccatccgccgaggtggggaccgataggagaagccggtgggttgtacccttacacttgtggagtctcctcttgcctctacctactccgcctttgtccttaaggtttttgcaggccagtgccaaacacacactaactgtcctggcctctccgtgacacaagtctcttcccagccttcctcacaggcttctgccgcccccctcatctccaccctcccccatatctgtttgcattaggagttccacgaccatggtggaatgttaaggtgaaccccaccccttcttacagatggggacccagagcctgctcttgggaacagccagagtaagattggaacccagacttgcagtccagcgctgtttgcattaaaagggtgggtgagtcaggacccctggctcaggagccgcctctcctaaaagagggtttcaaggccaaatgggtttgtcaacggtgctgtctccctttcttggagatgctcattagcttatcaaagactgagaagtcccgctgttacagaaataatttagtttgctgtattaactgctcctgggcctggagcagtattcccaccttaagattcccagcatccctgtgctgtcccggctctcattcatgccgaagggcccaacccattggctgtgttctgtttgaagatttggggggcgccttctctttcttccccagggaattctctagcagagggaggggacccaccccagtgaggaagtagattgctgcctctagccagagacctgaactggggaatttgaacattcctttacattgttggagaaatgaagccaaagttattcagatggttttcccaggctaaaggaaagtcacctgcaagagatcccggcactgatctggagcagctgacagggtgggtctcccttaccaaagagaagaaccactctctggcgctggggtgacctgctggctgggcctgtaaggtaagacgcttcttggttttctggaaggggtcctgggcatttgaataaaaagcacagagcctactccttttccagaagttaaagggtttttattcagagcaagttggagaggtgacggtaataaccacaatatctacagagttgtgaaaattcaacctttttgctaaatccttcaatggtctgctcttttattttttctttctcttttgttttgtttttgaggcagtcttactgggtcacccacgctggagtgcagtgatgtgattatggctcaatgcagtctcgacctcccagactgaagcgatcctctcacctcagcctcccgggtagctgggactacaggcacataccaccatgcctggctagtttttaaatttttgtagagacagggccccattgtattttgcatgctggtctcgaactcctgggctcaagagatcctcccgtctcagcctcccagagtgttgggattacagatctcagccactgtgcctggccaggtctgctgtttgaaaaggctcaaccttctctggattagaaactagaagaggggaggctgcgtgtttttgtgagcttgtttttaaagcttaggtgcacaggtgttagctttctctgtggaggctgcaaaggtgtagtttcagggtgtgtgaagcatgaatgtagttctagatatgttgccatcagagcacctatgtagctctattatatggttggcacgtctcaaagcattttataggtgtccattgattctctcagtaaccctaatgaggtgggttctaatgtcattgccatattccaaatgaggaggttgaatcccagagaggttaaataccttgcccaaggtctcccagctaatgagtggtagaggtaggatttgaaccctggcagcctggcctcttcatgaccaggctatactctatatagtagggtatcaatacatgttagatactgttaatgtagctattttttaaattgtggtaaaatatacataaaatttaccatcttaaccatttttaagtgtatagttcagtggcattaagaacattcacagctagtcgcagtggctcatgtctgtaatcccagcactttggggggccgaggcttgagactaggagtcccctcagccccaagtgctggtgcagtgagagcctggggtgagacacttggggtgctttggaagccctttgactttggttctcctgttgcaggtttccatgttgctgaggccatggagattcccagagctggtcacaccgaccgctctcagggcccgctgccctgggctggcaacaccattctggccttggcctgcagaagctttcagagtcttcactggcagtagggggagatggggagaggaatgatctctgcccagccccttcctttccaaaccatgcaatggaagagcccagatgggtgaagattgattttgccttaactcaagagaattcctgttctccttgtgctatgatttggacacaagattctggatacctggaacttagctgtgtactcctgtaccctaaacagtggatttgagttccagcgtttattcttttttccttttttcagatcaccatctaagttacatctttagctcaggtccatccttctcaagatctccttcttagccccccagcccctggtgctgtctgtggtcaggtgaccttactcaggagcagatatctccttggccgccatggagcctcatccatccacacgtgcctgtagcattccagagctcactgcccttctagatgtgccttcccgcttggcttccagcggcttgtgctcactctgtctgccaggtatgagaagaacacgtaagaccgccaccacactcaccctccctcaaggccctgtgccataggggtggccacccgacctgcccccagaacttttggatactggaggcagttgcataggtctccctctctgggcaccaggactcagtccagcccaagactactctgggcagctcccatcccagtctggggccatttgcagactcaggaaaggatttctacagtgttctataaaagccaaaagagagagtgggtttgggaagagtgagggtggttggggagaggggaccgatgtgcctcattgtttagtggtgattacaaatatgcttttctggataaagtttggttgtttgctcttggtg

SEQ ID NO: 1523 - DNA, 301 bp, Homo sapiens
cttggactaatgaggggaaattatagagataattttggctaataaagtgctatggatagtattgctacataatgaatgaatcacttgaataactcagaggattcaaacaataccattttcttatcttcatagttcctgtggctcaggaattcaggaaaggcttggctggtcagttctgtttcagggtctcatgcagttgtaggcagatggtggctggaactgaaacagcagagggctgggcagctggagagtgaattggcatctcctcatttactctcagggcttattcacttaggctcat

SEQ ID NO: 1524 - DNA, 488 bp, Homo sapiens
gcaagatggtgagaccttgtctccacaaaaataaaaacaattaaaaaattggccaggcatagtggtccatgcctgtagtcccagctgctcaggagactgaggtgggaagataactggagtccaggaatttgaggctgcagtgagctatgatcacaccactgcactccagcctgggtggcagagtgaggctctgtctccaacaacaacaacaacaacaaacagtaaaattagacttaaataggtaaaataataaaaataataaaaattcatttgaactatacctaacaacctaaatcgaatcacacctcaggaacatcaaacatttaaatgtaaaaaagaaaactcaaaccataccacaggaaaccattagcaaatattttatagtcatggaataaggagggcattcgtaagaatgaaacaaaatccacaaacaataagcataaaaagattcaggctgggcacagtgactcatgcctgtaatcccagca

SEQ ID NO: 1525 - DNA, 488 bp, Homo sapiens; identical to SEQ ID NO: 1524

SEQ ID NO: 1526 - DNA, 198 bp, Homo sapiens
agatcgagaccagcctggccaagatggtaaaaccccgtctctactaaaaatacaaaaaattagccaggcgtggtggcacgcgcctgtagtcccagctactcgggaggctgaggcaggagaatcacttgaacctgggaggtggaggttgcagtgagctgagatcacgccactgcactctagcctgggcgacaagagcaa

SEQ ID NO: 1527 - DNA, 164 bp, Homo sapiens
cagtcctcacagccctcgctcgctgtccgcgcctcctctgcctgggctcccactttggcggcacttgaggagcccttcggcccaccgctgcactgtgggagcccctttctgggctggccaaggccagagccggctccctcagcttgcagggaggtgtggaggga

SEQ ID NO: 1528 - DNA, 164 bp, Homo sapiens
cagtcctcacagccctcgctcgctgtccgcgcctcctctgcctgggctcccactttggcggcacttgaggagcccttcggcccaccgctgcactgtgggagcctctttctgggctggccaaggccagagccggctccctcagcttgcagggaggtgtggaggga

SEQ ID NO: 1529 - DNA, 2550 bp, Homo sapiens
tccccccctttttcaagtctaatagtgaaatctcctgcttaccccagcagtaaatagttgccttcctaccccttacctgggggccgataatttgagatactttgttttttcaatgcgtcagttgaaggatttagtttcttaaaagcaagaaatgttggagtgttgaatttttaaatagaatctcttttcatgtttgaatgattgttattagttctagaagcattctctttgtcatgacccgattatgtatactcttgggtttaggaaggacaaaagtgatgaaatttgcatgagatagaataaatatcttaggaggagtgaaagaacctgaggaagagacacgaccctaagggaatgaatgcataagcagtcttctcagtagcccagagtttccaggaaacaggaatatttatatcccttgcccactcttaaaatacatagatacataaaaaggcagtctctgtagacaacacatgcacacacccacacaaaacataattcctggggcttcctttttctgaatgttaatccattttatcgagcagtgattcccaaactttgagattttcagattttatgctctcgtctgttagattttatgacattctatcatcctaaaaaatgtactatatgtgttatatgtatatataagttaaagcaacttgaaattgacttggtttggcattgtctcaagaaccctagatatcattattgataccatggggaatcatagaaataaagttgaatatcattgatctgagagtaggatccagaaataagtagtttcagttcctgatcagttaagcctcaagtgtttgagtaaccaacacagcaagacttgggaaatgcagtgagcacccgaggaaaggaaagtggtagtctttgcctgcatttcagcatgcattttcctttcctactcagttgctatcttccacttaaataccctcatttgaccctaggaagttttttgtttttttttttagtttgagacttaaaaccagatttatttgttgttgtagagagatttccacagaagttgtgttttagggacctccatcatctttgtgggggtacagatatttatgtgtaaatatcattttatgtgatttccaaattttcgagggaaacatttcaattcccagttcaacaaaaggttaaatactaattgactcaatgaccaccttcaggaaagttaaatagtaaattaggttaaattttgactggtgcttagacatttcctagttatattaacttaagcagacagcagcacattaacctgagttacacctgtgaggaaatgaccttctaaatttgattttgtttttcatctccagggccttaataagagtgtgttaacacacgactattttacaatgatagctctaaataatttattttttatttcaagaaagagaaatacaccttagaaaaacaaaacccaagattttattttatttttaaagccatatttttgtgctagtagcatttagattattccgtatgtgagatccgtatcagcatttcattacctgggtttgttctaaagaagatttatttttgttctgtgaataatttttgacagttcttgtacatgtacagatatagatacgtttgaggtcttttattgatattcctacaaagaatacaaataaactttaactttaaacatttcagactaaagttgctactatatttgacatattgctgtcttctagcatgcacctgggtgactaggacacttgaagagaaacaagaaaggaaatgtatgccggaatattcttctaaaaatatattttaacattaagaacagtctgtcctagaatttcccaacttccatgtaataagatttcaatttaggaaaaataactagcattagcatgtattgtgataaaactgttactttcgaattctgcagaatttgaaatctctttaataacttgtgacaggtaaagaaagtttcatctggtttattaggaaatgtagccccacttagcttcctagaccactaccatcctcttgtaattttccagttagattaatggggtttgttttcaggatttttgatgtttggttcaggttttttattttaatttcttaatagaagttcatttgtcattcccaacatgattgttcccaaatacacccatcttctcctgcatccctgtttcattctgtaaaatccagggatgcaggtttcatgtgtagtcttgttttgtgttagttgtaggtctgtgctttttggcacatgtcgagttcttcctaatcttgttctactagggattaaaaaattaaaatttactcaaaatccagagaagattgcatgaaacagaaactgcatatccaagaattgtgctattttttgttcacttcgaagctgacccatttcagtctaaattgttcgtgacctaatgtaagctttaagacttcctggatctgaaacatcaaaaagagagaaagtgttgatgcggtctttttacttcatggtcctcttagccctaaactatccatccgtataccctttatgcatatccataccctgtaattgttttt

SEQ ID NO: 1530 - DNA, 5332 bp, Homo sapiens
caacacacacgcttgacaccagactagacttgtcacagggccaaacccaacagccacatgccatagcttcactgcattttcagctacacctttggaggccaccttctcctatcaactgtggaaagccagaagggctcccttctccattctccttccctttttcaagtctaatagtgaaatctcctgcttaccccagcagtaaatagttgccttcctaccccttacctgggggccgataatttgagatactttgttttttcaatgcgtcagttgaaggatttagtttcttaaaagcaagaaatgttggagtgttgaatttttaaatagaatctcttttcatgtttgaatgattgttattagttctagaagcattctctttgtcatgacccgattatgtatactcttgggtttaggaaggacaaaagtgatgaaatttgcatgagatagaataaatatcttaggaggagtgaaagaacctgaggaagagacacgaccctaagggaatgaatgcataagcagtcttctcagtagcccagagtttccaggaaacaggaatatttatatcccttgcccactcttaaaatacatagatacataaaaaggcagtctctgtagacaacacatgcacacacccacacaaaacataattcctggggcttcctttttctgaatgttaatccattttatcgagcagtgattcccaaactttgagattttcagattttatgctctcgtctgttagattttatgacattctatcatcctaaaaaatgtactatatgtgttatatgtatatataagttaaagcaacttgaaattgacttggtttggcattgtctcaagaaccctagatatcattattgataccatggggaatcatagaaataaagttgaatatcattgatctgagagtaggatccagaaataagtagtttcagttcctgatcagttaagcctcaagtgtttgagtaaccaacacagcaagacttgggaaatgcagtgagcacccgaggaaaggaaagtggtagtctttgcctgcatttcagcatgcattttcctttcctactcagttgctatcttccacttaaataccctcatttgaccctaggaagttttttgtttttttttttagtttgagacttaaaaccagatttatttgttgttgtagagagatttccacagaagttgtgttttagggacctccatcatctttgtgggggtacagatatttatgtgtaaatatcattttatgtgatttccaaattttcgagggaaacatttcaattcccagttcaacaaaaggttaaatactaattgactcaatgaccaccttcaggaaagttaaatagtaaattaggttaaattttgactggtgcttagacatttcctagttatattaacttaagcagacagcagcacattaacctgagttacacctgtgaggaaatgaccttctaaatttgattttgtttttcatctccagggccttaataagagtgtgttaacacacgactattttacaatgatagctctaaataatttattttttatttcaagaaagagaaatacaccttagaaaaacaaaacccaagattttattttatttttaaagccatatttttgtgctagtagcatttagattattccgtatgtgagatccgtatcagcatttcattacctgggtttgttctaaagaagatttatttttgttctgtgaataatttttgacagttcttgtacatgtacagatatagatacgtttgaggtcttttattgatattcctacaaagaatacaaataaactttaactttaaacatttcagactaaagttgctactatatttgacatattgctgtcttctagcatgcacctgggtgactaggacacttgaagagaaacaagaaaggaaatgtatgccggaatattcttctaaaaatatattttaacattaagaacagtctgtcctagaatttcccaacttccatgtaataagatttcaatttaggaaaaataactagcattagcatgtattgtgataaaactgttactttcgaattctgcagaatttgaaatctctttaataacttgtgacaggtaaagaaagtttcatctggtttattaggaaatgtagccccacttagcttcctagaccactaccatcctcttgtaattttccagttagattaatggggtttgttttcaggatttttgatgtttggttcaggttttttattttaatttcttaatagaagttcatttgtcattcccaacatgattgttcccaaatacacccatcttctcctgcatccctgtttcattctgtaaaatccagggatgcaggtttcatgtgtagtcttgttttgtgttagttgtaggtctgtgctttttggcacatgtcgagttcttcctaatcttgttctactagggattaaaaaattaaaatttactcaaaatccagagaagattgcatgaaacagaaactgcatatccaagaattgtgctattttttgttcacttcgaagctgacccatttcagtctaaattgttcgtgacctaatgtaagctttaagacttcctggatctgaaacatcaaaaagagagaaagtgttgatgcggtctttttacttcatggtcctcttagccctaaactatccatccgtataccctttatgcatatccataccctgtaattgtttttagcctccctccagctgcctgactttttttattagcattttaccagtaggaaaatacataaattaattttgttagcaaaaaaaaaaatttaatgacaaagaacactaaaacagatgactaaatcagtggttttcaatcctgattgttcatcagaatcactggagagttgtttaaaaaaaaaaaaaaagaaaaaaaacagaggagtacctcttgagctccaccattgaacaattaaatagaatctctctaaggattgggcctggccaggcttttttttttttttttttctttttaaccttgccaggggattccgaagagccagggggtaagaaacactagtccaaatcaagctgtgagcactgtgcgtagctgtcttaaaatgttttctgtccccaatcctgaaactggggtaagttggttacaggtgtttccttcccttctatttggaatttaaaattctactaaaactgacaatatatactcagccttcccccacatacaccttgtccccaccaatctgtcctttaagtctgtgaggtagaaattctctccattaacatggtcatcccatttatggaatagatacattctgacaaagctgaccagaagatggaattccctatttcgacctcagtttccccactggcttcaatttaaagcagaaggtaggtggcttctggtttggagtcagaagcttcaatgagtacaccccttgaggagtgctgaagggcccaggccagaatcaaatatgctacatttgactttaaagagtaaacaacagtggctcacgcctgtaatcccagcactttgggaggccaaggcaggtggatcacaaggtcaggagatcgagaccatcctggctaacatggtgaaaccccatctctactgaaaatacaaaaaattagccaggcgtggtggcgggcacctgtagtcccagctactcgggaggctgaggcaggagcatggggtgaactcaggaggtggagcttgcagtgagccgcgatcacgccactgcactccagcctgggcgacagagcaagactccgtcttaaaaaaataaaaattaaaaaaaaaagtaaacaacatagagaactcaaaagttcctttgtctacctccaccaccccccaccaaaaaaaaaggcccttaactacatttgactttaaggaataaacataagagaactcagaattcctttgtctctccccacccaaaaaaaaagaaaaggttcttaacttttcttgacctaatattcagcactgaagtcttattacttgaaacttatcagatgctaaattacaccattcatacttattgttctttcaatagcaaaatgtactgaaagctctccagtcccccctccactcctggcaagcatgcagtcacgtgctcgtgtgaattttccaaaatcatgagcattttgtaagattcagttggttatatgaaattacaataaagagtattatatattttattataatttgtaaattgtgtgctatacattctttatatcagtaaaatttatagtaaacacatatacattatatactcacacacacatattactggtctttctagaaacttgattttgtgaaattctagaatgaattcccagggtgatatttgtttggcctatgaataaattgcaatgaactaacaggtaaatgccaatgtttccttgtctgtaaaattaagattgtggctaaatggtgtatagggtactctctagcactgacattctgtggttattatctgatataattgagaaatgtgtccttagactatgttcaaaaatcggcttgaagcttttctctcagtatttaggaacaattcttcctccacagtctcccatggcacagtagtttttaagaaccaaaaaaaataaagtctggaacaaatgtatattcagaacactacagtgataatgttgataataataatagctggccaggcgtagtggctcacgcttataatcccagccctttgggaggctgaggcaggagtattgcttgagcccaagaattggaggttgcagtgagctataatcacaccattgcactccagccaaggtggacaaagcaagaccctgactcaaaaataatagctaatgtttattgagcaccaactatgtgtcagattatttgctaagcactttatatggaatatatcatttaatcataacaccaaccatgtgagttaggcattattattatcattcttatttcaggaggaaactgaggctcagaaagactaagttacttgcccaaagctacacaatggataagggcaaaactaagacccacgctcagatccctctgaccgtgctgtcttgaccaaaaaaaaacaaaaaaacaaaaaaacaacaaaaaaaaaaacttaggaaagacattggagagggtaagaaaagatccaaaaagatcttgccacataaccaacttgtcaccatgagccaaagtgatggcagtggaacaagatgaggtcatattccacaggttttccaccttaatatattggtttttataagattgtcttgcaatgtccaatcatctgatcagaattagaagagtgtgcagaagtctcacctgtctcagaaattggtctttcatctcttctgggtccatcagagttgagatggt

SEQ ID NO: 1531 - DNA, 407 bp, Homo sapiens
atgaaaaggtctcaagggccctgtgccaaggagtgactgtccagatttaactgctccactggtaagagtaggaacttggtagacagaagcagttacctgatttttgtgctgatgttttttctttagattctgaactcagatgttgggcctccgtggcagcagctgtatctcttctatcagtgccactccctacactggccacagctacaggaggggaaaataaaagatttattgcaaatacaaccaggagtaaggtggcctgatattggtgactgcccctgagctaaaagacaggcaaggacagccactgctaggcacacagttgctgcagaagccagcgatgtgggaagctcaattcctgccaatccctgactcacccctacaggctcttttaacccagcacttga

SEQ ID NO: 1532 - DNA, 696 bp, Homo sapiens
gaaaagagcttcatattccccttttatattactgaagcaataagcaatctgagctgaagcagcaaaaagagtcacatttccatcaggtcatcatattccctgagtctctgcagcaaaagccatgtcagaggggagattataactaggtaactataacaagcacttgagcacttaccatgttccaagcactatcaccaaggtactgttggggtttatggcagtctaacggtaagaaaaatgtggtaaaatgaggtaatcatgctgctatagctttttgctttttttcatatagtatcaagttggtcagaattagctttctctgactggtctgcttccgtgtttctctgtgatggtgttaagattatgaaagaaaaagaagattacctaagactgctacaagtgttaactatatgcccttaagaatgagcttgactttggaagtaaagcttttcagatcttagtctacccggggcctttgttgatgggtctgtggttctgtagacccctggctttcactgtgttctcagaggtacaccagattgagagcagagttcttctttggaagtcccagagcaaaataactgccatcaagtgagtttgcattcgtatttgtttccccttccatagagggttagttttagttacctctagcttggagttcctgagaaggctggttataggactgagcgtgggaaa

SEQ ID NO: 1533 - DNA, 4847 bp, Homo sapiens
gctttttgccagttgctgtagtaggcactgtaagtctaataatagtatacatttactgagttctcgctgtgtgccaggtgctgcttttttcatattaatctaatcttcataacaagcctgaggaaaatcctgttattcttgttttacaaatcagataaggataagtaggatatcatgaagttgagtaacttgtttagagtcagaggttataagtaagagtttatgatatagtctagcaccagagatgtactcttaacatcaaatactatacctcctatcttctttaattttcacagtaagcctatgaggtaagtatatagaaaaggaaacaggcttagagagaatgtgtaactttctcatggtctcttgtttctgatccccatgaaccataccatcaaactcttgcacttaagaaaatagtcctgtctttctacaacttcatcttataactcttactgctttttgtcttatctcccagggccatttctgagcagtggaggtttcaagtaatccactaacaaccagttccaaattctgtcatcaaatcctgtgctgctgttcctcgtggtaagttttcttatggacatagtaaaactttaatatattctacttcataaatatcttcatctgtagaaggaacaaagtatacttttgtgaacacatgattgattgggctttactgttttgctactgctttatcatactgagaaaatcagaagttaaatatttatatatttgcctggccagacttttgaaaatatttagcccaacaaataagatgctttacatctatcagctcagagtctgctgttatttgttataattttatctttagaccacatattcaagtactaaatggacagacacagtggtatgttttaatagagttaaattagaactattgcacatacataaagaacattagtgaacattgtttcttaactaaattttaaatgattagaatgtgattattagatcaattataatatattatacagtagtctccctttctccgtggttttgctttctgtggtttcagttatctgcagtcaaccaaggtctgaaaatatttagcagaaaattccagaaataattcataagttttaaatttagtgctgttccgaatagtgtgatgaaatcataccctggacttggatcatccctttgtccagcatatctatgctgtttatgctacccaccctttagtcacttagtagctggttggtcatcggatttaaaaaaataatatatattaagtttgataatatttagagtttcagacatccactgggggtattggagcatattccccatagataagggaggctaatgtaactactgtttactgaatatcctttataggtctgacattatgctttacaaatataattcatgtgatcctgttaacaatcctataagatagatggtagtgttgacattttatagatgaaaaaactggttacagaagttgagaattttatattaggtcacatatcttgtaacttgacagagccagctttcaaacctaggtatagctgtctcaaaccttttgattttctcattttaccatctgattatgtgtagtgtttcaatttcgaccatgtaagatgctgaagagtgaaaaatctaaagggtgtgcctgtctgtgcattgtagagaattacagaagctgtattcaaatatactgaattatctaaatttttttgttttttgttttcaggtaatagatgcatattatttcttttatttaaaagaaatgaatgtgactagtattgcattaagagctgaaacttggcttttagctgcatggcatgttaaagtacctccgatgtggctggaagcttgtattaactggattcaagaagaaaataataatgttaacttgagtcaggcccaaatgaataaacaagtgtttgagcagtggctccttactgatctgagggatttggagcatcctcttttacccgatggcattttagaaattccaaaaggagaattaaatggattttatgctctgcagattaattccttggttgatgtaagtcagcctgcatactcccagatacagaagttgagaggaaagaatacaacaaatgatctagttacagctgaagcacaagtaaccccaaaaccttgggaagcaaagccttcacgaatgttgatgctgcagctaactgatggaatcgtacaaatacagggaatggaatatcagcctattccaattcttcatagtgatcttcctccaggtacaaaaattttgatttatggaaatatatctttccgtcttggtgttctcttattgaaaccagaaaacgtgaaagtgttaggaggtgaagtagatgctcttttagaagaatatgcccaagaaaaagtacttgcaagattaataggggaacctgatcttgtagtttcagtcataccaaacaattctaacgaaaacattcccagagttacagatgttctagatcctgcattaggtccttctgatgaagaactcttggcaagtcttgatgaaaatgatgagcttacagcaaataatgacacttcctcagaacgatgtttcaccacaggtagttcctcaaataccattcccacaagacagtcaagttttgagccagaatttgttatttctccaagaccaaaagaggaaccatcaaacctatctatacatgtaatggatggagaattagatgacttttcactggaggaggccttgcttttagaagaaactgtccagaaagaacagatggaaactaaggaattgcaaccattgacttttaacagaaatgccgatcgaagtatagagagattttcacataatcctaatactacgaataacttttctttgacttgcaaaaatggaaacaataattggagtgaaaaaaatgtatctgaacaaatgactaatgaagacaaatcatttggttgtccatctgttagagaccaaaacaggagtattttttcagttcattgtaatgtacccttagcccatgattttacaaataaagaaaagaacttagagacagataataaaataaaacaaaccagcagttcagatagccattccttaaataataaaatattaaatagagaggtggtcaactatgtacagaaaaggaattcacaaatttctaatgaaaatgattgtaatttacagagttgttctttaagatcatcagagaatagcattaatctttctattgccatggatttgtattctccaccctttgtctatttgtctgttctaatggccagcaaaccaaaggaagttacaacagtgaaagtgaaagcatttattgtaaccttaactggaaatctctcaagttctggtggtatttggagtataactgcaaaggtgtctgatggtactgcatatctagatgtagactttgtggatgaaatacttactagcttgatagggttctcagtaccagaaatgaaacagtcaaaaaaggatcctcttcaataccaaaagttcctggaagggttgcagaaatgtcaaagagatctaatagatttgtgctgtctaatgactatttcatttaatccttccttgtctaaagcaatggtactggcattacaagatgttaatatggaacaccttgagaatctaaagaagcggttaaataaataattaaactaaaatagtattaggaacaattaaaaacaacaaggaaatatttagaatttgttcacaattttacttatgatactttgtgtaaaaaggaaaaatgaaatttcatagcttatttcagtttaattttaaagtgtttaatcatgtttgttatatgtggagcttttgaaaataagttaatctttttttttttttttttaatggcagggtattgctctgttgcccaggctagagtgcagtggcatgatcataggttattgcatcaacctcttgagctcaagcgatcctccctgccttagcctcttgagttgctgggactataggcatgtaccaccatgcccagctaatttataattactattattgttttgtagggacagagttttgctatgttgcccagattggtctcaaactcctggcctctcactcctgccgtcatggcctccaaagtttactttttttaaaagtaactgttagatggaggaatatggtgacccactattgttgagaaatttgttttccacttgtcacgtcacataagatgattgctaaaatattgtactggtgttcggtggtgagtcatatttttgaaagttaataattataaataggtaatttccttctaatatgttggtactgtctatggccataccaccctgaacatgcctgagcttgtcataatatgttgagtacccaaaagatttgtttatattgttaatcttagggaaaaaaaattaaaatccagtagatcagaacatcaggctttcagatacaaattgatttactggtttttattttgctgattataatatttggtatatttaaggtaatctagttaactagatgctatttcatagattatattgaatgatttaaaactttattttcaaggatagtttattttaaatggcatattgaaaacatcattattaagatccagtaggtaggacatttattggattaaaatgaagcatttatctatgtctttaggtgtcattgttccctttctgaattagctgtacatataagccttcctttggttttaagtactgatttttttttaaaaaaaagagggactgtttaccattcttccactgtgctgttataaagttgtatttgaaaggtaatgttgtttttattaatcttttgtcttaaaataatttaaagtgctttgaattttaaaacattaaacaaatccttaaataacaaaata

SEQ ID NO: 1534 - DNA, 130 bp, Homo sapiens
caagcctgtaatcccagcactttgggaggctgaggcaggcggatcacaaggtcaggagatcaagaccatcctggccaacatgatgaaaccctgtctctactaaaaatacaaaaaaattagctcagcatgg

SEQ ID NO: 1535 - DNA, 7928 bp, Homo sapiens
taatcattggttaagggttgcttctggggttgttaattgcttggcacttctggcgttctgcagttcaggagaaaaaaaaaaaaaagctcttaggcaccaaaaggcagctactgacagttgggagcaaggctgagcacagtgaagggcacagaggatatgggtgggcaccaagagcatctgccacttcctccccctagtccctccttgccatgtatatggtgaagaaactaggtcagtttgccctgcagaatttccagaattgtggattttgctaattgcatccatgtggtgtctattgttcatatgtttgctgtcttctgcattacctgtgccctcactccctaataggtaatttgatcacttataattggaattttttgcaagaagacaccattggtgatagtgacaggacttttgttagcaggcgcccagttgtttctcttagtgtgatgttagacatttagcctaaatccactatttcattcgaatgtgcaaatactcgaattctcattccttaatcatgtattagcaagaatacttcataatagagaaacttcctttgtcaactatttggttactctgtggtacagttagtacaggaaaggtaggattcacatttgatcctttccttgtatttaccagttctcaaaataatgagctcatttcccagaaccctctataggtgaccaagagttcttttatgaatgcatggatttaaacaaagctgccatgtctcaatccctgattcaaattgtctcttttttggccactgaagtttggccagatattcaaattggattctgagtcctttctgacacgactttagtggtcaatgaaatgttcttgctttgtggtgtgacaatgtgttccaagactgctgtggtttcaatgtgttctcacaaaattcatgtgttgaaatttaatctctattgtggtgatgttgggagttaagacttttggggaagtgattcagccacgagacatggattagtaccttgcaaaaaggctacagggaactagcttaggccctttttccccttctgacttctgcaatgtgaggacacagcatccatcctcttcagagaatgcagcagaaaggcgccatcttcgaagcaaacgctgggtcctttctagacactgaacttgctggtgccttattcttgaacttttagcctccagaattgtgagaaataaagttgtgatttttataaattgcccagtctcaggtactttgttataacagcacaaaagaaccaagataaaggccttcttgaattttttgctccccagtcttcaaattagctgactttccaagaatatggattccttttagtgaaaaattgtattagaaactacagtctgggtgttatgggaactcattgctgctgagctggtcactgtttctaggcctttttagcaggcagagttaggaaataagttgttattttgttttgttaagagaaaacatatcatgagctcatactgatgttttcaattcaagtttaggattatagggtttgcgcttcttcgcttttatatttttttctcatacttacaacttagttcttaacaatataagtacttatttgccatatcctgtaatatataccatagtttcagaatagcagtgccagtattattataaacagcatgataattgaaagtggcataaagtgtatttgcatttttttttattcttagggtatatcccactaggtttgtatgttaaatctctgttgtttttttaaagttacttaatatagttcctctctgtgtagttaagcaactagttcaatacagtaatttttattttcctttcagtttttagaaattttttgttaatttgatttgataattatgtaaaatctttgcaccattccaaagtcaaacttacaaaacaaggtataatcaggaagttttgtttttaatccatgttttctctactccgttcccatataggtaaacaatttttaatttttgttcagttttgtttgttttgttatacccttgttttgttgtttttgttgttttgagacagggtcttgctctgtcacccaggctggagtgtagtggcatgatcccagctcactgcagccatgacctcctgggctcaagtgattctcccacctcagcctcccaaatagctaggaccacaggtgcatgccaccatgcccagctaactttttttttttttttttttttgtagagacaatgtctcactctgttgcttagcctagtctcaaactcctgggcttaaatgatcctccacctccatctcccaaagtgctgggatttcaggcataagccaccactcctggactgttgtgatttttaatatatgtatattcatattcttgttacctgttttggataaatggtagcacattgtatatttacctccatttttgcttttttcatataacaatgcattctgcagagtatataaaaatagaaacatatttggagactcctcatttatagttgcacagttctccattgataggtatgttctaccaacaaacatttgggttatttccaccattttgttgttataaagtgttgttatgaatattgtcttatagattacatataaactttaaagtttcaaaaacaaatactctgacttcattttagaaattgttagataactcatggattgaagactttgtttaaacttttcttagtgtatgttagttttgatcatatgaatgtggcttctacatgttctcatttttattacatagtaaaattttctctgtgtcccagtggtatgatcagctactgcaaatgatccatggttgcatgaaaaggtatattctccacttttaaaatacaaaattcaagatctgcctactcattcaatcttgttttactttttagtctttcccaaatcttgagaaaaatattttaatgtcttttataacaattatatttctgtcaattttccatttaaagattgtaatactatagaagctcatgaattttacatctattttatggattacatcttttatcaatataaaatgattcttttttctgtcaaattatttttgttttgagagacactaacattatttacctttactaatattattacctttgtctctttctttctttccttcttccttctttctgcctcaaccccagccctggccattataatgtttacctttattaaccttcacagcagaagaacagctatccacttttttggttggtaaaggtcttgtgttcccggatcacggagtaggcataaacctctctcaacttccagcaagatttttcatgtcagggacacagcttttgacggttcctgacagggatttttagtcaagctccataagattttcacttagcaatgcttcctcccagattctgactgccactcaaacttcatttccagtgtcatggttatgtggattcatcacttttcagtgtcttcatgactctgtataaaattaggaaaagttgcaatggagtacatttccattttaaactgaaagccaacttatcatgtttttgacattctctgctatttggtaatatggttttaaaattaactttgtatcacaaaactgtattttaaagagaacttactagctgagtgtaacacacaaaaggagatgataaaatctccttgtattagagatgataaaatttacttacagatttttattctgtgaatgtgaatatttcatacctaataaaaacacatgattttgtcttttcacttctgggcacattgagaagcaatattgttaggttaagaactttggatgaattggaggtgtcaacaatgataattcaatttcaatgaagatttgcaatgaaatttggggaaaaaaattcgttattgagcaaactgagttcttcaaacaatactagtggatcaatatactgctgactttaaaattcaagtcttttattaaccaataaaggtagtttattacatttttatttcttgtcatatattttagtcttctttaaaaagtctgtttattaatgtgctttaacttataatctttgaaagacttttatctttaaaaaatttaaagagattcctcagacaaaatgtcccagtttgccactcggaaaatgttagcatcattctttaagactatatgtgaaaactcaactatcttgcaaatggaaaaattgagtctccaagtcacaagagtattttttttactttttattttgaaataatttcaaatttatagaaaagttacaaaaatagtagatagaagcctgtataccctttacccagattcatcaaatgttagtattttgccccattcactttctcaatctcctttcattggcacaagaaactgaggcacagagaagttaagtaactttgccaaaatcatactactagagtatggcaaacctgaacttcaacctgtctggcacgagaggcttccatcagttccttctccgctcaagtaaacttcatcaactcttacaggcattcagtctggtaagtgagtacctggtctttatgataagttgtcacatggttatgatattatgaaatatgtatttgggcttgctcctgtttcttgacatacagcttctaaaacccttgggaatctccaaagtgatgagtgtctttgatatgctgtggagattactgatgcctagggacccctaagtagcttccgtatgggggctggtcaccagaaagaccaaggcatgattagacggttgggacttaaagtcccaccaatcaaccttcacctccagggaagaaacaggggctgaccaatggctcatgacttaatcaatcatgcctacatgatgaagccttcataaaaactcaaaatgaccaggttcaggagcttctggatagctgaacgtgtggaaagtcctggagggtggcacatgcagagagggcatggaagctccatgccccttcccacatgccttgcctatgcatctcttcctcctggctgttcatctgtatcttttttagtatcctttataataaaccagtaaacaaaaataggtgttcctctgagttgtgtaagtcatcctagcaaattaattgaacccaaggagacagtagtgggaatcttgacttatagctgatcagcagaagcagaggtgacaacctgtaactcgtgatcggcctctgaagtgggggcagtcctgtggggtagaacccttattctgtgggatctgatgctatctccagatagatagtgtcagaattgaattaaattatagtacacatagctgatatctgctagggaatttattggttgctggtggggagaaatccctatatattttggagactagaggtgaaatgctctgtgttggctgtgtaaaaaatggttaggtttggtttttccttagtgagtttttccttctaacttactggtataggtaacaaaacccataagaaaatgtcctcctctaactttgtaagccccacattctacatctgaaccaggtaggaaaaggagacccagaggagcaataagttagcaacagacaacagtgccctgaaagcaggaaatggcagtgtctggacaaattgtcacggtcatattaagcaagttaagtatttactcagctggcaggagtattacatttttaattgttacccactttaaccaatatttagctagtgtcctctgcatatggaggaccatattaagcattttggaaaaaacccaaatgcaagaaaggatctcggggagcaatatacactcatgaaaaaaataaccttaagcatattcaccaagaagtatacatgtgttgataaattagtattataccaaaaaattaaaaacccccactgttcacacaaaccctgagaagccattacagtagggaaagtttaagaagctatgcttctccttgatggtgtaaggttttaaatgggtttagaaaactaaggggctatgtggagttaagagtgccatgaatggggtaaagatgcagagtgggaggaaacaaacgtatgtggacttagaagggaggaaattcataggctcaccttggaaggctgaaggaggctgacaccatgttggatgatcaaaaatcagcattaactcattcaccagatgggttggaataatgcagatgaactcagggtcacaggtgtcaggatggggagactgtctcaaagcaggggaggctttaggcttgggagttttgttttactttttgacaatgttaacgcaactaagtaactatgaaagagaagtatgaaaacagcccactggctcaaggtcagaaggaaagcgtgggaggctttagagaaagtgatgtgttcacaggtggtgaagctgaagtcaggtggcagcaagttcaggtggaagtggatgatgaggaaatggaggtggaaaggtagatttccccccactctatacatttttttcatggatagatgtagaaaatgaaattataattagacactgaagtgaggtcaaggaaggagtattttttaagtaaggagacaacactacagactggccacaaattccctgagactgtgtctaaccagagctgtagatattaatataaaatcagctctcggctgggtacagtggctcttgcttataattctaacattttgggaggctgaggtgggcagattgcttgagcccagaagctctagaccagccttggcaacatagtgaaacctcatctctacaaaaaatacaaaaaatagctgggtgtggtggcaggtgcctgtagtcccggctactcaggaggcttcggtgggaggatcacctgagcccaggaggtcgaggctgcagtgagccatgatcatgccactgcactccaacctgggtggcagaatgtctcaaaacaaacaaacaaacaaacaaacaaaaaatcaacttttaaggagtgcttctatgacttctgtcattaggaaaatgttcagaagtaataggaagtatgagaaacatgaacatttgtgcagaaaaggaggaatcatagaaataaaacttcagactgttgtgcaaacgggcacattgcatatgcttaaagttaaaagggaggaaccaggggaatgtgatcagattaaaatagcaaagcaattaaaaattttacatacaaagcttaaaggcaaacttaagagattgtagtaaccacagcaggcataatcagcactcagtaggtgtttactctgtgtaggatgatgttactgtagaagcaaaggccctactgacagatccaaagcacaggtggagacagtgactttttcatcacagctcagagttttgataaagaatagagatggatttatttactaactcaataaaacactgctaaacactaggggtacagagatgaatttaatatggctcctcccctcaaggagctcctgatccaatagaacaagcagacactagagtccaatgagacactagctaccaagagcaagggcaagaaacattagatgtagggctccaccctgatatagtttggatctgtgttcctgcccaaattttgtgttgaattgtaatatccggtgttggaggtggagcctggtgggaggtgattggatcacgcgggcagatttctcatgaatggtttagcagcatcccctttgtcctgcccttggaacaatgagttatctgtcagatctggtagttaaagagtgtgtggcacctccccctcgctctcttcctcctgctactgccatgtgagatacctgcccctactttgccttcttccatgattggaagcttcctgaggccaccccagagtcagaagccgctatgcttcctggacagcttgcagaaccgtgagtcaattaaaccttttttctctataaattacccagtatcaggtatttcttgatagcaatgtgagagtggactaatactcacccagtagacttcccggagcctcccgtcttctagccctcttttatcaggagaggatgctggatccatcctgct

SEQ ID NO: 1536 - DNA, 303 bp, Homo sapiens
agaatgtaagttcatttaaggtaggattcttttaaaaaatataattaatttatttatttattttgagatggagtctcgctctgtcacccaggctggagtgcagtggagcgatctcggctcactgcaacctctggcccctggtttcaagctattatcctaaagtaaggttcttttttcttttgataagtgttctttctactttccaaatcaataacttaacaaaaggaaggaagaaaacaatgcagtaaagaactgaagaaaagaaaaacagaacaagggtggaaagaggcaataaaagaagaa

SEQ ID NO: 1537 - DNA, 306 bp, Homo sapiens
gcagctgaggcgggaggatcacttgagaccacgagttggaaaccagcctcggcaacatagtgggaccctatctctctttaaaaaaaaaaaaaaaaattagttaaccaggcctgatggcacatgcctgtagtaccagctactggagaggccgggaggtggagggggctgaggtggaaggatggcttgagcctggaaggttgaggctacagtgagtcatgagtgcacaccactacactccagcctgggcaacagagtgagatactgtgtaaaaagaaaaaagaaaaggaggggaaaggaaagaaaatg

SEQ ID NO: 1538 - DNA, 260 bp, Homo sapiens
caccagaaaagcagtatggtactgggaaaaagagatctaaaggcagaacactagggcttcactctcagcactgttaactgagtgacttgactaagtcactgaaattcactgaaactgcagtttccccttctgtcaaagggggataacaatatcagcttcacagggtgctgtgaaggaagcaaatgagaaaatgaaagtgagcatccttttaaattataaacagagaataagggagaggggagggggaaggggagaggagg

SEQ ID NO: 1539 - DNA, 260 bp, Homo sapiens; identical to SEQ ID NO: 1538

SEQ ID NO: 1540 - DNA, 260 bp, Homo sapiens; identical to SEQ ID NO: 1538

SEQ ID NO: 1541 - DNA, 258 bp, Homo sapiens
actttatccccattggaaatcaacttctggagaacatttcagctttgtatgctcttcttggtcccactcaaatgggaagttctgctcgaggccagaaatagaaaacaggaagtcaacagaactgattttcctaactgcccaaatgcaaatcaccacactccgttatggatgagaattagagtaaaatgtaaacttctttttaaaaagaagttcacatgctaactgtgtacagaaaacatcctactccagggaagaaag

SEQ ID NO: 1542 - DNA, 258 bp, Homo sapiens; identical to SEQ ID NO: 1541

SEQ ID NO: 1543 - DNA, 258 bp, Homo sapiens; identical to SEQ ID NO: 1541

SEQ ID NO: 1544 - DNA, 6544 bp, Homo sapiens
ccagtgaaaccacaggagggccctccctcctgcgaagcaatttttaaaatccatctttaattgatatcctttcccccaataccatctttcttcttctagtttgctcccttcctctcctttcttgtgttgtaggcagtgggggtgaggaccacttcctcataaagcataatttcacatccttaataactataggccaggcaccatagctcatgcttgtaatcctagcactttgggaagccaaggcaagaggatcactttgaggccaggagttcaagacaagcctggggccagtgttggtggctcatgcctataatcccagcactttgggaggtcaatgcgagcagatcacttgaggtcaggagtgtgagatcagcctgaaaaacatggtaaaaccctgtcccaactaaaaatacaaaaattagccgggcatggtggcgcatgcctgtagtcccagctacttgagagactgaggcaggagaatcgcttgaactggggaggcagaagttgcagtgagccgagatcacaccactgtactccagtctgggcaacagagcaagactctgtctcagacaaaaaaaaaaaaaaaaaaaaggaaaaaaagaaaagaaatgggccaggcgtgatggctcctgcaggtaaccctagcatttgggaggccaaggtaggaggatcatttaacttcaggagttctagaacagcctgggcaacatagggcaaccccgtctctgctaaaatttaaaaacccaatgtggtagcacgggcctgcgatcccagctactagggagctgaggtggtaggattccttcagtctggaatgtcgaagctggatcatgccacttgcactgcagcctggctgacacagtgagaccctgtctccaaagaaaataaatttaaccagacataaaaaataataattaggaaatggttgcttttctttggagatggagagaggaagtgggcaagttgtcatttaccatgccctcatatatttggtcttaaatgactgggctttagtatatattaatatataaggtataacctaaaaatctcatgtaaaagcttagtagcattgttgtaacagtaacatatttcattgtacttcaggactgtccatggatgcagtgttaccatcgaggagctcgaggccgaggtcgactctggcaccctgatgacaagtctggagattcagcagtagaaagaaagcaggaaagtggtattagccatagaaaagaagaggagaggccgggcgtggtggctcatgcctgtaatcccagcattttgggaggccgatatgggtggatcacctgaggtcaggactttgagaccagcctggccaacatggtgaaacccagtctctactaaaactacaaaaattagccgggcttggtggcaggcgcctgtagtcccaggtactcgagaggctgaggcaggagaattgattaaactcaggaggtggaggttgcagtaagccatgatcgtgccactgcactctagcctgggtgacactagggaggctctatctccaaaaaaattaaaaaaaaataaagaggagaggagtacgcagcagaagagtaagttttgtctcaaagaaggaatctggtcggaggttcagaattggaagtacaattttattgtttttgcaatttctataaattaaagtgtcagaaaatgctgatggcgaggacatgcattgcaatttgcaggggaaatgtcaagtgaggacttcatcacgtgtgacacgagagaaaagtaagagctggttttaaaatcaaaagctgttgttcatcctgaattgaatttctaaattttggtggagcagagtcgctttgaagctttattcccatctatttctattgcattgctaatgataactgttgactttgggtagtgtagaagcaacaagcatgtccttgtctataagtacagggaaggatagaacaaactttcattgatgcaaacatttaaatagtcatgttacttctgtatccaatgtcctaacattttagggttacttttgtttttttatttgcttacataagcttagcatgaagaatatttttaaacatctcgttttgtctccagcattttttctattaagaggtaaaatgtagtccttgttggattcttgacaatctagtttgttttatctcaggtctcatgatctggtgcctaccctctccaggaaggaaactgcaccaatgtctgttgttgttacatatcaacttttagtttcagtttgttttgttctgatgtcaatacatagtaacagcagtcaagtatgaagctaagtgtggtgagtaactttagtaaacagctgtgaggttttttttgttttttttgttttttttttgagacagagtttcactctgtcacccaggctggagtgcagtggcacaatctcggctcactgcaacctccaccctccgggttcaaattattctccttcctcagcctcctgagtagctgggactacaggcacctgccaccgcgcctggttaattttttgtatttttagtagagatgggggtctcaccatcttggccaggctggtcttgaactcctgacctcgtgatccaccggcctcagcctcccaaagtgctgggattacaggcgtgagccaccacgcccagccagctgtgagttttgagaaattaaattttttatactgtattagcctcttggaagtatcaaaagcagatgaataatgttagtttctgccttcacaggcattgcctttgttttgtccaccagagaaagatcagttcatggttcactcctgtattaggccgttcttgcattgctataaataaatgcctgagactgggtagtttataagaaaagaggtttaactggttcacagttctgcaggctgtacaagcatggcatctgacattgctcagcttctgggaggcctcagggaccttttactcatggcggaaagtgaagcaggagcaggcatgtcacatcacagagtgagcaagagagtgagtgtgggaaggaggtgccacactttacaacaacctgatctgtaagaactcactatggagaggacagcaccaagccatgagggatccgccccataaccccaataccccaccaggccccacctacaacactggggattatatttccatgagatttgggtggggacaaatttcaaaactacatcaactgttctggtcccataagaacaaaatgtttagacaacatccttgagcttttgcctgattttcattcatcctgccagcccttcctaacatggcatctgtttgccagatgcctgggctcaaacaatctgtccactgtagcctcgaaaagtgctgggattatacgcatgagccaccgtgtccagctttatatggatttttaaaagaacagaagccaggggcagtggctcatgcctgtaatcccagcactttgggaggctgaggcggttggatcacctgaggtcaggagttcgagaccagcctggccaacatggtgaaactccatctctaccaaaaaatacaaaaaaaaaaaaattggccaggcttggtggagcgcacctgtagtccaaactcctcgggaggctcaggcaggagaatcacttgaacttgagtggcagaggttccagtgagcagagatctcaatcctgcactcctgcctgagcaacagagttagactccatctgcccccctcaccaccacacccaaaaaaaggccgggcttggtggcacatgcctgtaatcccagcactttgggaggctgaggtaggtggatcacctgaggtcaggagtttgagaccagcctggccaacatggtaaaaccccatctctaccaaaaaatacaaaaaaaaaatttggccgggcttggtggagcacacctgtagtccaaacttctcaggaggctcagacaggagaatcacttcaactcgggaggcagaggttgtagtgagcctagatctcaccactgcactcctgcctgagcgacagagggagactccatcctccccacaacaaaaaggcaggggattgaggtggcacatgcctgtagtcccagcactttgggaggccaaggcgggcacttcacctgaggttagggattcaagacaaacctggccaacatggtgaaacccagtctctactaaaaatacaaaaattagccaggcacagtggcgggctcctgtaatcccagttagtcgggaggctgaggctagagaatcgtttgaacccaagaggcggagattgcagtgagccaaggtcgtgccactgcactcctgcctgggcgacagagccagactccatctcaaaaaaaaaaaaaaaaaaaaggaaaaatagaaaagaaaagtttgtggaaaatagaaataaaagaaaaaaatataaacttctcatcgtaagatccaccaaggtcaagacactttcataagcaatgataactagccatttatgtatgtatgtatgtctcttgctcacaacaattacatactagtcatttcatccatcccctaagaagtggaggtccttggaatttaaccacatcaatgaaatcttttttacattattaactgaagagaaatggttgccctttacagactttttaaaattaggaaacaaaaaagtgacagaagaagctaaatcccgactgtaaggtggatgcctaatggtttcccattgaaactctcaaaattgcccttgtttgatgagaggcacgagcagaagcattaccgtggtagaaaaggactctctggtgaagctttcctgggcattttgctgctaaagctttggccttctcaaaacactcttataataagcaggtgttggccgggcacggtggctcatgcctgtaatcccagcactctgggaggccgagatgggaggatcacgaggtcagcagttcgagacaagcctgaccaacatggtgaaacctcgtttctactaaaaatacaaaaattagccaggcgtggtggtgcgtgcctgtaatcccagctactcaggaggctgaggcaggagaacagcttgaacctgggaggcagaggttgcagtgagccgagattgcaccactgcagtccagcctgggtgacagagtgagatttggtctcaaaaaaaaaaaaaaaaaagctggtgttactattcttcggccctccagaaagtcaataaggagagttgctcaagcagctcaaaaaactattgccatgacctttgctcttggccagtccagttttgctttgactggatctcttccacctcttcagagtcattgctttgatattgctttgtcttcagagtcatactgggaaagccacgtatcacctcccgttacactttcccaatagatgcttcatgatctattggttggtgccaacgtaattgcggcttttgacattccatggcataaaccacaattaatatgcagcaacgtaatagatctcacttgtttaaaatttccgttgaaatctctgttcttgtctgcagctgatctggttttggcacccatcaagtggaaagtttgctcaacttttaatttttcagtcagaattgtgtaagctgaaccaattgtgatgtctatggtgatggctgttgtttctgccattaatagttggtcttagtctctcacgaaggctggaggccagtggcacaatcttggctcactgcaacctctgcctcccgggttcaatgattctcctgcctcagcctcccaagtagttggaattacagacacctgccaccgcacccagttaatttttgtatttttattagagacagggtttcaccacgtgggccaggttggtcagatgacccgcccgccttggcctcccagagtgctggaattacaggggtgagccaccacacccagccgatgcttttcagttaaagcacgaagaggatttttgttgttgttgttttttaagacggagtctcattctgttgcccaggttggagtgcagtggcatgatctcagctcaccacaacctccgcctcctgggttcaagcgattctcctgcctcggcctcctgagtagctgggaccacaggctcatgccaccatacccaactaatttttgtatttttagtagagacggggtttcactatgttggccaggctggtcttgaacccctgaccttgtgatccacccgcctcggcctcccaaagtgctgggattacaggtgtgagccactgcgcctggcctaattttttcccttgcatattgatgtggatgacctgctgctgcaggcttcatcttcaacatcattttgtcctttcttacaagttatccatttgtaaactgctgatctctttaggggcattgtccccataaacttttggtaaagcatcagtgattttaccgttcttccacccaagcttcatcttaaattttatgtttgttcttccttcaattttagcagaatccatttttcgctgataggagctcttttcacactgatgctttctcctttttaatgcctcaaactagatcctgtcgagatattttttaacgagttagtaccagtttattttgatgccaaaagattttgcaatccatgcatagtttcttgataatacacattt

SEQ ID NO: 1545 - DNA, 383 bp, Homo sapiens
tttctttctaccagtgtgaaaacggactaatacagctgtgaaagaaatggagatacggctgggcgcagtgactcacacctgtaatcctagcactttgggaagccaaggccggtggatcacctgaggtcaggagtttgagaccagaacggccaacatggtgaaaccccgtctctaccaaaaatagaaaaattagccgggcatggtggtgcacacctgtagtcccagctactcgagaggctgaggcaggagaattgctggaacccaggaggcggcggttgcagtgagcagagatcatgctattgcacttcagcctgggcgacagagcaagactccatctcaaaaaaaaaaaaaaaaaaagaaagaaatggagatacataggttaa

SEQ ID NO: 1546 - DNA, 499 bp, Homo sapiens
attacgacaactctgagttaggtggtgtaacctcatttttgagagcaggaaacagtcttctagagtttaaataatgtgttgaagatatatcttggaagtagcagagtgcatatttgagtcagtttttttttctgacttcaaagtcttaagccaccaatgatctgttttttcttatcttccatcttcatcctttttttggtcttttctcaagcggttggcaattcgtggtattaattgatagtatgtgtctgagtgttggttctttatgatgtaatttcttcagaagcggtagttttgaggtatctgtctttaattgtgggatcctgtaggtgcagacagtatggttctggtaatttaaggcacctcagagcatcaccttttgctgatctgcaggacagaactatgcttggattcttaatgtgtagaaatcaaatgtgctttaataatgtgaaatgattttcaagggcatctgaactgctcaggaaatatggaatgggag

SEQ ID NO: 1547 - DNA, 361 bp, Homo sapiens
aatgaagtaattataaaagaatctgtacgtgaggaaaattgatagtaacagagggatgataagatgagaaattttcacagttcgggattaacgtgtgtgaggtttttaagtcatcttaaatattagacgaccctaaaataatgtaaccccacacttaatcattatcaaaggagtgcttagaaaaaaaaatcagtttataaatgcaagtaaaatcatgttacagggaaaattgtttgaagtttttttttcttctcctaattattcccctcttagcttccctaattattcccctcttagtattcaaaaaggacttataactgaatttgtgttcccttcaacctcccagtaacaacaatacctc

SEQ ID NO: 1548 - DNA, 801 bp, Homo sapiens
ggctaaatcatgtccgcatttttcataacttttcaatggaatgagagatggtctcatgatactctttttcttaaatacaaagtttaatgttttttttctctaggttagtaatgtgaggttgaagttgtattcaaatttattacatttatttagatcactttgtgttacctggaagtactttcttcagttgatagctacatttggaaaaaaagggaagagagttaccctgttattctgccattatattcttcatcaaaatggaggaaattcatatgaagtgccaaggactatgtgatgcctgccacatagtaggcactgtgtaaatcttctgtccttcatttcagaagttgccgataagaattttagagggtggattggtgggtagacaagcaaagactctcgggaacaccctattacaggaaaatctctcatacctgacctctgcttaacccactcgtgagattaaatgatagtcttcattctctctgtagaatttgctgactgatgctcatgctacattgaatgacagtagactattctttagttttatcttgaacttttattccccccagttactgtagacttaccaagaaacatttgtgtttgtacccaacacactgttatggcacttgatgttgtaatcacatagtttaatgaattattattcagtgaactctgaagataaaaaggcgtttgtatgagaaccaattggctactttgaaatcaagtgagtagccaaaatcaattatggttgaaatagatgagggttaaataattttaaatgattagggaaaaaaaaac

SEQ ID NO: 1549 - DNA, 32193 bp, Homo sapiens
gggctggcggggcgcaggccgcgggacccgagcccggggaagcgagagagcggaggcgccgaggatccgattcactccctggggagacctatgggccgaagccgtgtaaatgcgttttaaggcgagtgcggaaagtggcctggggagcctcggggagcggacgccctccgccctggtgctgacctgcctccctgccccttctgcctcctgtcagcagaggcctcggctccgcaactgccactcctcctcggggtgttgcacaagtttcgaggtcaccggcgaccccccctagcagcgcgcctggctctggcccccgcgaaggaggacggagtttggtaaggggccctgggggttggggggacctcagccctgcactctgtaggagtcactcggacagaaaaaacctcggccttccgttctctcccaggagcttgcggcccccacccaccgcgtgcgtccccaggcacgcctagaattctagcacctcaggatcagtccagcccccatttacaattggggaaactgcggctccgaaagggtcagagggtacccgaggtcaagcagtagagagcggactcgaacttaagctcttgctcttaggctgagacgccttgatgtggccaccggctaccctctaggtgggcgtggtcaagactgggggcgccctggaaacttccccacccaagtttctcagattttctgttccatctctctctcactctttcctgaaatccagaatttcagaactgggaaggctctccaaaacaattcatccattttacagagggagcaactgactcggagaggcagtgacatttgggcatacggtgccttgtctccgtctgaaatccgggattcttgactttctccacccttgcccagtgaaccccgggcttgtgctgggggcgggttgtgacgggattgggatccctggcctcgggaggcgagtggggcagcagagccggccccccagcggttcccttcatctcccctcgccccgcagtgtgttgcatactttctaaggcggcggctgcagcagcggctccatccagcccgtcagctcctcctgcaaggcatggctggctacctgagtgaatcggactttgtgatggtggaggagggcttcagtacccgagacctgctgaaggaactcactctgggggcctcacaggccaccacggtgaggggctgggaatgggggtgggtccccggtcccctgtacagatcagctgcctcctcaggaagggtccctagggccctcatcttatcctttcgcttatttggtacgcaatccttgctatttgcaagagaggggctcaatttatccccaattctttgtccttgcccccaaacctgcccctcctatgttgcctttttacccagccctccaaggtcagaaacgggggattcctttcctgctgccccctctccctcaccgcccacatctaggcattaccaagctctgtgaattctgcctccttaaataagcctccagtgtgcttatgtggaacctcgctttctagttcagtcttcctctctccaaaggccccctgatctcccggtctcatgccaccccctccaaaggtatcatagtcctgttcaaaatctgaatttggcaattctccactgcctacaggatcaagtcagagcttccctgcctccatagccccattcccagctttccccacagtatatattatgctccttcggagctgaatgactcaatttgcatttcccaatgatgctgtgtgcccaatgatgctattaccatgcctttgcccaggctgttccttctgcctgcagcatccttctctcagcctctcccctctttacccctttctagtcattccttgcttctcatcagtgttgcctttcctgatcgccccaggcagattttctattttctttctccatgcccctgcattgcaccttgtagaaactgccatctaacatctgctgaatggacttgtaagtacttaaggggttccttttcttccagacccaagctccttcagaacaacagtactgtttggtcatctctgtcccttagcataacgtttggcaccaagtgggcatgagtaaaaaagtgttgcatgaaagggaaactgagtcccagggaagcaactctggaagggtcccttccacatttaagtaatgtggtctcacccacagcctcatacatgtttggcctttagcacatctacaatgaacagttgtccatagggataggttgcagtgtcagtgggactagcttaaggcttcattgagcacctgtgtttggaaggcagtgagctgtaggtcatagcttctgcctttagggagtttacccttttctagaatggacagatgcatatgcagttctgataccttggaagcatatgcaaatgcagtgggagcatttaaaagcagagttgccttattggtttggggaaggtggcatttgagtgaaactttaaggattttgccagacacaggagtggggagggtattctgcaggacatggtgggaacaaaggtttgaaggtgggaaaatgatccagcctacagctggagttttagccgcattgaggggagggattggggctagatcagagccttgaatgccaggctgaggagtttgccttctgccctgtaggcttggggaggcccagaaaacttagcagcagggtagctctgtggccagtactgaacctgggtcaggtacttggaaggatcacggatggcatgcacagggtgcgagctggatggggtctcacattcatccacttcttgtcattcaggacgaggtagctgccttcttcgtggctgacctgggtgccatagtgaggaagcacttttgctttctgaagtgcctgccacgagtccggcccttttatgctgtcaagtgcaacagcagcccaggtgtgctgaaggttctggcccagctggggctgggctttagctgtgccaacaaggtgagccctgcccgcacggtgcactgaccctccatgcccactgaacacacacatggccaggctagtccaggtgggctctggggagcaagaggtacctgtagttggtccttgccctctgggaagaccacccactcaggaggggtctcaagggatgagggagggagaaacgagcatggaatttgtcagccttgaagttccagattggaatcttctttgtccctggtagaaagctcatctttttaatggagatttgcaaatttgtttggcacagagctatacatgatgttcttctaattaaaacaaaagcgtctccatattgttggtttcttttctttttccttttataatcataataatgtgtggcggtgcattttcttaactagtccttgtagttttgttgttgccaccaattctgtctttctaatttgatttctgctgttgtcttcattccctcctgctctctttagatttatttttttcattttttgagatggtgtcttgctctgtcacccaggctggagtgcagtgttgccatcttggctcactgcaaccttcgcctcccgggttcaagtgattctcctgccctcagcctcccgagtagatgggattacaggtgcacaccaccgtacctggctaattttttggtattttcagtagagacaggatttcagcatgttggccaggttgatctcaaactcctgaactcaggtgatccacccgcctcagcctcctaaagtgctgggtttacagccgtgagccaccgcgcatagccactttagattaactttacttatctactgtcattcagtatctactgaactcctacagcgtgtagtcactgtgctaggcagggctagcaatacagaattgatagactgctgtccttgagttgaatgcttagtttatttatttctattctgtccttgctagataaaagcatttaagctataaagtttcaactaagtagagctgaaagtatctcatttattgattcagcaaatattaattgggcatctcttctgaggccaagcattattctaggtggggatttggcagtgaacaaaataaaacaacaaaagcccttccttcatggagcttgtttacaaaaaaaaaaaaaaagatgaaataaagaaaatatttagtattttagatggaaaatgctgtagagagaaagcaggaaagggaagtaaggaatgttgggagagaggattgtacttttagatagtttggccagggaatggttcactgagatttgaatacagacccaaaagagccaagggatcaagccaggtagataaccagggaaagggcatttcaggcagcaggaacagcaggtgcaaaggccctgaggtgggagcaagtccagtgggcactgctttgtgatattgtcattagcactattttcttggtggttagtaatggttgcgtaatatggctggatgttgtgaggagagttctagaaaggactcctggagtcctgggcaggatgacagggctggagcgactccaggttggggagaggtgtgcacttggccgggatggtcagaatgagcaggttaacctgtagcagggaccgaatgttaatgcctttcatggtagatgaggtgcttcctcttatctttgggctagttcatgctttgcacacctcgttttgtgcatgtcttccacgaagctctgtgaggcacacagtgggagagactgccgttctacagttgaggaaaccatggggtcagccatctgtgggtagcagagccaggacgtcctcgtttcccacttcttcctgcggtgccctgggcctccacgtgggatgaaaaggagcaggatcctttcagtccccgaggtctagggtgaagaacaggaccaaaccccactgcctagagttttctgcttcaggaaccccagggggaggagcttggttctgtagaagaaagggcagagtgaggtgttaaggctgagagagaccttgatgacagcggggactggagaagcatctgccctttgctgagtgtgtctgttgtgtcaggtactttgccaagtgttttctgtacacgatctcattttattctcacaacagccctgtgaggtaattactattttttttaatggggattctgaccgtagcctggtgaggacacatttaacgtataaggaaatgagagatggaggttccgcatcagggtggtggcagcttgagtcctgctgagttgccttggactctgttttttccaaggtggctggggagaggatggctgagctgggattcagccagtgatggatgccctcagccaactgcaggggcgaggagagacttaagccccctccctgtgatgggatcatgcagaccctttggtgcgcttctggagaggtggctccccgacttacagcttttcttggaaggccaaggctgccctcttctggtcgtctgtagtgggtggccatgcttaacagcgttgtgccttagtggacactgaccaagggcctggcgtaagctagggctggatgtgcagacagacatgcgttggacgggggccagggccacagcttgctcggggactctggtctacccagccacctgcccgaggaccactgtatcatctctcctgtcccaatcgcttgccctctgtctccctcagcatcctcccatcttaaaaagcctttgctgggcagcacatcctcttccagcccaatcccttgctctcttttcgtgaccaaactcaaccaagttgtctgcacttgcctgtctgcccccattttttctttccttcagtactccttccttaagccattgcttcccagcctccactttcactactccaaagaattttctcttaccaacatccccagtgagcacttaccaacatccagtgagcactttactttaaacatggattgtgaactaataatacatgcaaataacacattgattcattcaccccaaaagaaactaggacatcagctttatgtctccatagataatcaccaggatggttttggtggatatgtagtattttttttttttttttgagatagagtttcgctcttgttgcccaggctggagtgcagtggcgcaatctcggctcaccgcaacctccacctcccgggttcaagtgattctcctgcctcagccttccgagtagctgggattacaggcatgtgccacgatgcccggctaattttgtatttttaatagagatggggtttctccatgttggtcaggctggtctcgaactcccgacctcaggtgatccacccgcctcggcctcccaaagtgctgggattacgggcataagccactgcacccagccatatatatatatatttttttttgagacagagtcttgctctgttgcccagggtggagtgcagtggcgtgatctcagttcactgcaacctctgcctcccaggttcaagcgattctcctgcctcagcctcctgagcagctgggattacaggtgcctaccaccatgcccggctaattttttgtttctttagtagagacagggttttaccatgttggccaggctggtcttgaactcctgacctcatgattcacctgccttggcctcccaaagtgctgggactacaggcatgagccaccacacccgactggcaatgcattctttaaaaaaaaaaaagactcaacagtaacatatggtcctacttttaaaggcttcagaagtgtataagatgaaagagaacactgcttcgaccccacctcatcaggcacttcttatagctgagacagctccttcctgtccagacacatgtctcgctgtgagacgagatttgcatttacaggaatagctttctaatctgcatattgctctccatcccttggaaacgttctccatcctcacctctgcaggtcccgggtaccatctctccccatcttctgccactctctaaatggtagcattcttctgaattcctaggcctccctgtcttgtaaaccctccttcttctcagaagaagggttatctcctcccatggctttaaataccatcaatatgccactgcttcccacattttaatctccagctcagacctatatatccagttgacttgatacgaggagatgcctggaacccggcatgttcaaatgtgctcctgatgtcccctttccccgtcatgaagggccccctcagtctgctgggtgtgggagttccctctgacgtcctcgtcctcatcaccacatgcaatctatcacccagcttgccagtcccacctccagaacacatctccccacttttctggagctggctctgtcatctcccccagggcgatggtgatagccactgactgtcactgtctattcccccagaatccccttgggccctccttcaggtagccagatagacatgtagaccttatatttaaaatgcaaatctgaccatgtcgtttcccttcctaaccctttagactctttcccatcacatgcagggtaaaacatgtttccttggcagctctgcccctctccctctgacctcatcgtcctcactgcactaacttgctcttcttgagccactgcagcattctctgttccttgatcaggctgaagtgctcagcactgcttgcctcagaacctctgcacagaccacttcctctactggaaagattcttagattctttccttccctcttggcctggctgaggcctcctgcagggctcagtttaaatatctaaccctgaagttgtcctttgcctctcacacccaggtctcttgcagcacgtactttttcttcccagctcttaaccacttgtaattccatcattattcagcgctcatttgggactgccctgcctatctttcccaccaacctgaaagctccatggtctcagagaccctatgtgctttagtcaccacttgttttattaacacctatcacagagcctggcaactcaatagatgctcaaaaatacccgtcagtgcagcattgaggttgcattccccattacagcagtgaggttaagagctggtgtgctaaggtctgacagttagaatcccatctgtgccacttagaagctgtgtgattttggacaaatcacttagcatccctgagcctctgttccccaccttataagattattagtaaggttaaatgagaatgtatataaaatacttaatgcagtgactggcataggatatgccttcaatgaatgacaacacttatttaaatatttataattaggctgagtgccttggctcacagctgtaatcccagcactctgggaggccaaggcaggaggactgcttgagcccaggagttcgaaaccagcctgggcaatgtagtgagaccctgtctctaattaaaaaatatatatatttaaaaaaaaattataatcaaagctcaatcacaggtccccaaagtgctaaagtgctaacactgcttcttcctctcacctcacgtggtgaggcagggaacaaaaacacaggtccacatccactcagattcggggtaggccacatctgcccctgggaagcaagctgtggtggcagcaagcccagctctggagcttgacctttgtgtcccattctgctactggttggctgtgtcaccacagacaggtggacctcactgaactcaattttgtcctccataaaatgtagccagtaaatatttcatagcatagtcattgggattaaatgaaataatgcttataaatatctagtgctgaaaagttgctaaattaaaattagactcttattacaaaatcaggatggctaaaaatgactcttatgcctctcaccatgtttcaaaactggctctctcttctcttgtttattcgtggagagtcagacttgagttcgaaagttcgttctgccacctattttctgcgtagcccttctgagcatcagtttccttctctgtagattggagctaatacccatctgaatgggttattggcaaggactgaataaaagggtgaatccaaagtaggggttggcaaactacggatggaaggccaaatccagtccaccacctaattttatgaagttttattgactcacagccacattcattcaattatgctttggctgtggctgttctggtgctacaaaggcagttgagaagttgtgacagagactgtgtggctcgcaaaacctaaaatatttattctggttctttatagaaaaagtatgctaacacccgatgtaaaccatctaattcagggcctgcttgtggtaggtgctgaatgaacacagttgctgtcgtcatcatcatcatcatcatttgttcatatcattaatgcagcaatcaggtgcccacaggttctagagtaaaggggatgaagaggaggccccaagaggagcagggctgagcccgcacaccctgcacacccagtgcagggccgtgcacagagtaggcctttggagtggggtgatctctgtccaaaagatccttggtctggtggactttctaatacaccagcagtgcttttgttatttattaagctgacaaataaaaattgtatatatttatggtgtacaacatgatgttttgatatatgtatacgttgtggaatggttaacaagctaattaggcattaactcacatacttacctttttttgtggtgagaacccctaaggtctattctttagcaatttccaagtgtaccatatattgttattaactatagtcaccatgatgtacattagatctcttgaacttaattctcctgactaaaactttgtatcctttgaccaacttcttcccactgccccctcgccattgacccgagcccttggcaaccaccattctatgctgcttctctgagtttgacatttttagattccacatataagtgagatcatgcatgtttgtctttctgtgcctggcttatttcacttaacatgatgtccttcaggctcatccatgttgctgcaaatgacaggatttcctgcatttttaaggttgaataatattccattgtgtatgtggaccacattttctttatctgttcatctgtgatggacacttaggtggcttgcgtatcttggcgattgtggataatgctgcactgaacatgggagtgcagatatctcttttacatattgacttcctttcctttggatgtatacccagtattggattgctggatcatatggtagttggtagttctattttttgagatggagtctggctctgtcacccaggctagagtgcagtgatgtgatctcggctcactccagcctccgcctcctgggttcaagtgagtctcctgcctcagcctcctgagtagctggaactacaggcatgtactaccaagcctggctaatttttgtatttttggtagagatggggttttgccatgtttcccaggctggtctcaagctcctggcctcaagtgatctgcccacctcagcctcccaaagtgttggggttacaggcgtgagccactgcgccctgtcctattttcagtttttttttgaggaacctccatactgttttccaagtaatatttaaacatttaaatttgccaggaaaatgtgtcagaagcctgttgtcagggctaccatgagtccatataatgcctttgtgtaaattagaaaatgtaccctttccttaagacaattaattgttataataaatatactgattttcttagaatgagatgctttactgccaggaagttttaataaatatacaaatctactctgtattcattctgaatgggaactccccacccccaggattgttcagtgtaccacccgcatggctgtacatggcagccctgcttatcaaagaatggtgaatccatgtaagtcctgatatctatgtatctgttgtcttagagcaaggcccactgttatgggcctccctatgcatagctatgactttgccctcatctgtgcttccttgggctccgtgggctagcaggccctggtgcctccttacaaccacctttggggccccataggcagagatggagttggtccagcatattggaatccctgccagtaagatcatctgcgccaacccctgtaagcaaattgcacagatcaaatatgctgccaagcatgggatccagctgctgagctttgacaatgagatggagctggcaaaggtggtaaagagccaccccagtgccaagtaagctgagaaccactcatggggaggctgggctgtggggagcctgggctgtggggagcctgggctgtggggaggctgggctgtggggaggctgggctgagggaaggctgggcttcagagtgaaggggggggtggggtgagggggtggagctggggcaggtcaccctgtcctggacccagccacagttgcaggaggttggggcaggtactcctggactgaacccaggatgctagggtctagctagaacaaaggcagaaataactggttaaagccctaggcagagtgagacccatgtgttatggaggccaaagtcacaggcttgagagagtcgagggagtggtcaggaaggctccacggaggaagtggcatttgaagcaggccttgaggaatgaatagaatttggagggggcataaatagtgaactgcgtaagcaaatgcattgaggttggaaacagcatgggacattcaagcgtaagcagaaacttagtgtggctgacgcatgctatgtgtagggggtgaaggagatcctggtcgggggcggggagccgatgcaaatggactttcgaaggggtcagggctggacgttttgctctggctgtgccttttacatgattactggacacccttggacttcccaggaggggccttggggtgaagggggtggccaggtgatgggccactccagtccatccaaagcagcttccatcgtattaatgggttctccttaaggctttgtttaaaaatggttcctctcatacacgacaagtttgaaagctctaactggtgtggagactgatttggagggactggagctgccccaggagagttggtgaggtctggaccagggcgcaggggctgcaggaatgggtcagggacatttagagaatggattggacaggacttgaaggttgattggctgtgtagggagagggaggggtcagggagcctgtggggttgggtggctctgagccatgtagctcacagcccttgattgagagatgtggctggggtggggcgacagggtttgtccagcagaggggcactgcgtgtctcatcaggatggttctgtgcattgctaccgatgactcccactccctgagctgcctgagcctaaagtttggagtgtcactgaaatcctgcagacacctgcttgaaaatgcgaagaagcaccatgtggaggtggtgggtgtgaggtgagcactgggaacccctgccatcccctcccacaccaggctccctgcctctttcccaggaattaattctatatgagaccttccccagggcctctgagtagggcctgtccctgggcctggaattcttccatttgagaatttcctctgtttgaaaaggaagtttagaagggtcccttccccagtcccagggtccccagaaggtcttgtcccaggaagttccatccagagacctggctttgagggagtcttaccagcctgtaggacaaaggttttgcagctacactcttgaggggcctcttttcttttctttctttctttttttttttttttttgagatagggtctcactctgtcacctaggctggagtgcagtggcatgatcatggttttctgcagccttgagctcccaggctcaagcaattctctctcccgcctcagcctcccaagtagctgtgaccacaggcgtgcattaccacacctgactaatttttatttgttgtagagatggggtctcactttattgctcaagctggtctcaaagtcttgggctcaagcaatccttttgccttggcctcccaaagtgctgggattacaggtgtgagccactgcacccagctgtgtgcctcttttcttacagggatatggaaggagtaataatgaactacctaatgaacaatgaactacctaatatagggcttcatttattctgtacttaggtgtgccaggtgctgtgctaagtgcttcatgcacattctctcagccttgtgtggtgtgggtcttgtccccgcattataggtggggaaactaaaacaaagctgagtaagctgccaaggccaccctgctgactgggaggcacagccagatctggttgacttgggggtcctggctctcatcccagaaggagggatgggaggagcaccaagtgccaggagcccttggatcaagcctcctgtccacttctcccttgccatatggcccttggcaacccattgaacatttcaggaccttggtcactgcatctgtaaaatgggcacagtgtctcatgtgcctgcccaatgtcattcttggctggggctcaggtggtggcacttggagccctgcatgtcagccgaggctcttcctctcttcccagttttcacattggcagtggctgtcctgaccctcaggcctatgctcagtccatcgcagacgcccggctcgtgtttgaaatgggcaccgagctgggtcacaagatgcacgttctggaccttggtggtggcttccctggcacagaaggggccaaagtgagatttgaagaggtaaccctggagctgggagtgtcgtgctgggctctatggcggggaggatagggagggattagatgatcggagggagaccaccgtgcgtgggtcctatgcactgcatgcagtgcttggtgcttacctgggtgatctcactgcttattaaccctgtgctacagctgagcaagccaaggctcacagaggttacattgcttcctgagcccaaagcagaacctggttctgcctgccatgcacttcagccaattggaggcataaccaggacacatttacataagtcgtaaggctctttaaggggcgggataggcctcttcaccctaaggtgggctgatgagatatcgggtggggaggcagggaaacgaaaaccaacctttggtctgctgcctgtccattctcttcctctattcccttttccttacccactgtgaggtgaagttaagaaaaatgtgtcctagcagttcccactccaaccactagaggtcgcctcttcttggaaggcgcctccttcgggaataccgacatgtaggaattgaccttacagaaatgatttgggatagtctcaaagaatttgcctcaaagatgactgttctagctttgttcctaacagaagtccagtggacttccctggtccatctaatactcaggatttgttaaattatggtacatccttttgatgaaaacacttccttaatgtggggaggtcgttcacagtctattaagtaaaacaggttccaaaaacatatacagagacctaccatggttataataaaaaatagcgtttgtataaaaaataattaaagacactactccaaaaagttaacaataattagattcatctagttgatagactttggagtgacttttatcttctttttccttttctgtattttctgaattttctgtaatcaagtatattacagttgacctttgaacaacgcagagcttaggagcaccgaccccctacacactacaaaatctgcatataacttttgattcccctaaaacttagctactatagcctactgttgacaagaagccttgctgataacataaacagccgattaacagatattttatgtgtgatatgtattatatactgtattcttacaataaagtaagctagaggaaataattttttttttgagacagagtctcactctatcacccaggcgtgagtgcagtggcacaatcttggctcactgcaacctccgtctcctgggttcaagagattctcgtgtctcagcctcccaagtagctaggattacaggtgcaagccaccatgctcagctattttttgtatttttagtagagacggggtttcaccatgttggccaggctggtctcgaattcctgacctcaagtgatctgcccacttcagcctcccaaagttctgggattacaggcatgagccaccatgcctggccagaaataaaatattattaagaaaattataaggaagggaaaatgtatttactattcattaagtggaagtggatcatcataaaggtctttgtcctcattgtcttcaagttgagaaagctgtggaggaggagcaggaagaggagggcttggtcttgctgtctcagggtggcagaggcagaagaaaatccatgcataagtggacccacacggttcaaacctgtgttgtttaagggtcaactgtatttaacaaactggttatttatgaaagaaagatccacatcagggcttctggaatctgagtaccaagtgtgatatgaagaggactccttcccattgtggggccatggaggagggtgatttacacaagcacgaggctctctacccagctctgtccccctcctaccttcttggccagctgtccacagttatcagctggggccttagcagctgccaaatccttcttccggaaatcaaagcagctttcaagaaatagacttggagctgtagcaagtcttcagcataaagcccacatttcaaacacataattgtctccccattctcctcctaccagattgcttccgtgatcaactcagccttggacctgtacttcccagagggctgtggcgtggacatctttgctgagctggggcgctactacgtgacctcggccttcactgtggcagtcagcatcattgccaagaaggaggttctgctagaccagcctggcagggagggtaggtgccaggtgggcagtggagccctgttctcccctgaagcttcagatagtggttggctgagcaggatctggttttagacccagtggcagaggatgggggaatctggagaatgaatgggttcttgctttagggaaactttcagtcaagtcgccccaccccaagacatttatttagcatcttttttcctaggcatgttcatattttgtgaagattgagagcaaaacaaccttagagagaatagatactctgttgaccccattttacagatgaggaaaccgagaaccaaagagaatacaagtgaactgcttaatagctagtaagagcctgcatttgaccccatgtctgtctcctctccaaaatacaggctcctactcaccctactgcttctcataatataatgaaaataattaatgacagcttacatttgtttgagtccactttacagatgacaacataggcagggggaggctgagtcattagcccaaggtcacatggctgataaggggcagtgtggggattcaagttcaggttaggctgactcagcgcttctgggcccacatcaccaacatcagtgctcttccctccccttccagataggtcagggatagcagcctgtgagtgacaggtgtcagggactctgatcttgaggcttgccctctgctctgggaccctcatgcaggggagcctcaggactgtgcgcttttccccagagagaattcatgtgaagggtggtgggctccaggtagaatgtcctgtgttcgtgtgtggcattcttctggcttcctttatagacctgggggattgtcccgtctgatccaatcaagagacctggcttctcattctggctcatccactgccctatcatgtgcctctgagcaagtggcttaaccttttggggtcttgagtttgggtgggctgctcttctgcctttgctggggcacctaggggctcagatgcaagcaggggagtgcatcctgggcaggttgcttggctgcaggggtgagtgttcctaacacggcagtgaacccatgtcattggaaggatggctgctgatggcttttgttgtaggcctcgcctcatggttgaggaatgggtagccattttgcttccttactgagcccactgttgtgtcagccccactaccaccccctcacattgctacttgtgctgcctctgaaccctcccctcctgcagaggaaaatggttccacctccaagaccatcgtgtaccaccttgatgagggcgtgtatgggatcttcaactcagtcctgtttgacaacatctgccctacccccatcctgcagaaggtgagcttaccccacgtgggcctgttttcagttgtgtgtgtgtatttcaataacatttgttgtgtttttatctaatttttaaaaagtcaaacatatttattgtcgataatagacaacaaggatgacgaaggttatcacccataatcccaccacactctttgagcattacatattttaaaaaatgccttatacttttttcatgacattggaatcatattgttttgtaacctgctttttccatttatatggggtgtagctctttccatgccattaactgatctttgacaacatgcttttgtattttaaccaatctaactctagtggttggctatttggtttcctctttttgagcactgtgaatatatgttgaggtttcagctctgtggtaaattcctggaagtagaaacagttcatatacagtgggtttttctgtaataacaggggaacaggaatacataaaacattcctcctagcctgtggaacccagcccagggcctccagcaattttaatgggcatctttgagaggataaagaaaaccagacatcattttatcttcccctctccattgtgtcttcctatctctctctctctttttttttttgagatggagtcttactccgtcaaccaggctggagtgcagtggtgtgatctcggctcactgcaacctccacctcctgagttcaagtgattctcctgcctcagcctcccgagtaggtgggactataggcacccgccaccatgcctggctaatttttgtatttttagtagaggcggggtttcaaccatgttgtccaggctggtctctaacccttgacctcaaatcatccaccaactttggcctcccaaagtgctgggattacaggcacgagccaccatgcctggcctcttcccatctcttgacctttgtgcagcccctcttcctggaaagaaactttccttgcatgccttgaagtgcctaactagcactcattatgtttttccttcccttcccaacctatccagtttttcaaaagtcagtcagaggggtcttgaaaatcaactccactttgtggctcttcctgccccttatccctgtgctggcctagggaacccctctctccctccctccttcctccaggtacccaggcaccctagatgtgcttgatggagcctcactccatggttaaatgtggttacatctgctggtcagagtaggcctccccaaggtgctgaggaatgctgagctctctactctgacgcactagcattgcctgcattcttgtggtagcccacatcctactgcactgagaagggaccaggccagccagcttacagagcgggcagctgttgagtccccgttactctgcctctccagtactcgtcttcctgttgcatgctggctctcacccactccactcccttcattggctcctcagaagaggagatgatggtcccagcccactgccacgccccccaccgggatctttgctttggctgatctctagttggcattcctgacttgggcactgggatgtttgactctctttgtggtctgtgctgttcctcccctgaacgatgctgcggtttcttcctttaggctcttaactgcttttcaagtttggccacgtgagcgcctccagagtggggcccacagcctggcggtggaataagacattgcatagatgacaatacacataataagttaactcctgtggtgctgggagtgtgtgtcagagggattcagcctggctgagggtatccgtaccttctttcccaaagaaggtccccttacaagtattagttttggcatctttctttgcatacctgctcttccttcccagggactttgtgtttagacctgggtataaaaagttgtatgaggccaggcgtggtggctcaagcctgtaatctcagcactttgggaggcagaggtggttggatacctgaagtcaggagttcgagaccagtctagccaacatggtgaaaccctgtctctactaaaaatccaaaaattagccgggcatgatggcacatgcctgtgatcgcagctacttgggaggctaaggcaggagagtaacctgagcctgggaggcggaggttgcagtgatccaagactgtgccattgcactccagcctgggcgacagagtaagactctgtctcaaaaaaaaaaaaaaagaaagaaaagaaaaaaagttgtatgaaacataatccttggctcaagatatacttcttattgcaccatgcttggcccttttttgtgtgtttctttttggtttttatttttataaattcagcaaataattcagtactctcaaagcagtactctcaatactcaaagcaccgtgctgaggtctgcagaggaattgtctgtgctttggaagtacagtcctgttggatagaaacacgtgtgtgtgtgtgtgtgtgtgtgtgattagtatacaagctacaaccatgtatgagaaaagtacagaacaaatattattggagcttttaaaacatattttagtactgtacatgtttctaaaaaataaggaacttaaaaaatcacaattccattatcaaattaaaaaatgaataattccatagtatcccccatcatcggtgttgagctatccccaactgtctcataatggtttttatattaacttgctgaaatcaggaggcaaagaaggtctgcatggtgcatttggttgccatctctctctctctcttttttttttgagacagagtctcactctgttgcctaggctagagttcagtggtgtgatctcggctcactgcaacctctgcctcctaggttcaagcttctctcctgcctcagcctcccgagtagctgggattacaggtgtgtgccaccatgcctggctaatttttgtatttttagtagagatgaggttttgccatgctggccaggctggtctcaaactcctgacctcaagtgatccatctggctcggcctcccaaagtgctgggattacaggtgtgagccactgggcccggcaccatgtctctctcttaacccattggtttccccatactcttttcttctttttcttttttgtagagatgcaatctccctgtgttgtctaggcgggttgagaactcccagccccaagcgattgtccagcctcagcctcccaaagtgctgggattacaggcatgaaccactgtgcctggcccccaccctctttttaagtctgttttgtttgtttgttttctttggtaattttaaactgagttgtttttcctgtggagtttcctgcattcttgattttcctgattggtgaatttcctgaatttccctttggtgcttttgaacatgtttctctgcctggtatttttttttttttttttgaaattaggtagatttagaggtttgaatagcatctcaatcagctttggaataaaaatactccatgggagatcttgtctttgttttccttttagagtaataagcatccttattatttaacctacattgccttccatgcaaagtcgtcactatcttgactcatgcattatcattctctggctttctttttcagtataggtttatcacatctaaatctattcctcgagtgtatttataatttattatatttgtttttttgctttataaaaaggtattttgatgcatgtaacctgtttgggctttttctccctcatatcacagtctaagaaccactcaccctgctacatgtctctagagtccattcatttcattgccgtgtagcgctcttttggtgagtatgctgcagtttatttgtccattctcctctcaaggcatttggactgtctttgggtttttgctactgtgaatactgctgctgtgaattcttgtttccctctctctgatgagtgagcaaggagtggaatggctgggtatagggcatgtgaatgtttggcttcatgagaaaatgccaaacaattttctgaagtgttgtactgacaatcccaccagcagtgtgtaagagactcggtggctctgcattttctccagcatggagtattgccagactgaaaacattttcccagtggaatggatgtaaaatgatatctcattgtgtcttgatttgcatttccctcatcactagcaaagctggatgtctctttgtatatttactggccaaatgtgtttcccggaacttcttccagggactttgtaagttggtgttccccttcatgtctgaatttctccaccgagtggtctgtacccactgcccctgctcactcagctcccttagcccttccaacctctccagtcaggtacctgttccatgatgccatggaagatgctcttgaaagtcacttccacgctgctagctcttccatatggctcttctgtcccagcagctggtcctcctctgttttcatgctcacctctcctggcttctgtggcaacatcctgggccttggctactcttctgctgttctcaccttgtctccttggcacttctcctgctcaccctttaagtgctgactgtctcaggcctcagtccttgatcttctctgtctatatgcgcttcctaggtaaatgcttccagactgaggctcttagtatcttccatactatcatcactcccaaatttctatctctatcctggatcacacccctgagctccagacttgcacatccaactacccgcttgagattcctactgggatttcacagacatctcaagtttaacttgttcagaactgaactcttgatttccaaccccaaacttctctcactaaatagcactgccactagccaactgctgaagctaaaaaagttggcattattcttgatttttgctttccctctccttccacatgcagtccacctgcaattcttgagtgtagttccaaaatacattttggtttcagtgaattcttcctctgtcgccaccctaatgcaagccaccattgcctcctgcttgagctactgcagtagccattaactggttttccacccccatactactacctgcttaccacccattttccacgctgcagacagaatgatcttttaaaatcccaaagattatgcccctcctctgcttaacaccatctgtggcttcccattgctctcagaataaaacctagactccttaccacaacgagcaaggctcctgccatcttcccaggcacctctgccctcactcctgtccctgttttcagctccacttacctgctccagtcccattcctctcctttctgtttttgtaacacctaagttgtttctgctctcagggcctttgcattcgctcgcccagaatgctcttccactcacccctgagacagctgctgtattctctttcttatgtctcagctcagatgtcaccttgtcagggaggcctttcctgactgccctctctaaagtaggctcacctcccctagtcagataattttgataccctgcttattttcttcacaacccatcgtaatctgttaattatcttgtttttgtttacttgcctatagtctgtcttctccattagcaggtaggctctatgagggcagccacgttgtccagttagtttcctctgagttcccagcaccagacacagtgcctggcatatagtaggtgctcactaaatatctgttgaatgaattgtgaatggatgaatcaatcattcaataaactgtgagacccttgagggtctcacatctgttcatatctgtttccctagtacggaacttggcatacagtaggttcagtatatgttggaattaaatagatctttttttttttttttgagatggagtctcactctgtcacccaggctggagtgcagtgctacagtcttggctcactgcaacctctgcctcccgggttcaagtgattctgctgcctcagcttcccgagtagctgggattacaggcgcccgtcactatgcctggctaatttctgtatttttagtagagacggcatttcaccatgttggtcaggttggtcttgaactcctgacctcaagtgatctgcccgcctcggcctcccaaagtgctttgattacaggcatgagccactgtacccggccattgtttctttcatttctatgtctttgacaaggataaaccattttgtttttgtttattgttttatttattttgatgtcaatgtctttttatatcctctgttcacttaatttgggaggtcttgaagttttttcttgcacatagaaatgagcttgcatatgcatgtgtgcatgtatttaatatgatgtttgatacaaatattttttcactctattggtttattgttttagttttgtaattctttgttattctttcatagaagttttgacacactattttgttttaactaagtttgctgtaattaataggaaggaaatctgttactttcttttgtgctctgctgttatagattatctttattacatatatatatatatagtcttatagaaatagaatgtttattagaaaaaatttaacacaaatagtaaaataaaatgattcactaatcccaccattcagagatgactattgttaaatgtactttgatttctactttttttgggtttaatggctattttattttgttttattttatttaacacaaggtcacattctgtcaccctggccagagtgcagtggcacagtcatgctcactgtagcctccacctccgaggctcaagccatccttcccactccagcttctgaatagctcggactacaggcacatgccactatgcctggctaatttttgtattttttgcagagatggggttttgccatgttgcccaggctggtcttgagctccttgttttgttcaagcaatcctcccaccttgagattacagacatgagccaccacgcctgacctgataattttttttaaaaggttgtctagtcttgctaagaataagcaagacgtttcgtttactaatgtcatgatttaaccagttttagctgctctgatattaaaaggtgtttttgttaatatacttctaaaatattggaaataatcagagctgggtggggagagagaactaagcccaaaatctctaatttacaatgctgtaacattttgaaagaccaatcttgtttttgatttctactttttaaaaaagtgtcatagtgcactttgtttttcactttaaagttttatatattgtgagcatatggttttctttaaatactgacgtgttaggtggacttttaaatatagaaacattttaaatgttcattgagtgctctaaaataatacatatttagtgtgtgtattagtttgttctcacactgccaaaaaggaatacccaagaatgggtaatttaaaaaggaaagaggtttaattgacacagttctgcatggatagggaggcctcaggaaacctacattcatggcagaaggggaagcaggcacatcttacatggctgcaggagggagaggtgtgaagggggaacttccaaacacttttaaaaccatcagctctcatgagaactccctcactatcataagaatagcatgggcgaaactgcccgccatgatccaatcacctcccaacaggcccctccctcaatatctggggattacaattcaagatgagatttgggtggggacacaaagccaaaccatatcagtgtgtaaagatgcaattcaacaaatgtgtatgagcacttcacaaatgcaagatacgatttggtatagggtggaatcaagaggaggcaagtatcatgggagttttataagaatcttggcaggcaaaattcaggacagttaccccagtccatgaagagagattctccttttattgccaagatggggctttcttacttgctgttccattttattctagtttgttatgctttcaaaagtgtgaatctgtctggaatgtattgcaatagcacttaccaagtgtgtccctagactaagaagacagaagactcaaataaataaaattataaatgaaagaggagacattacaggataccacagaaattcaaaggatcataagagaccactactagcatgaataactatacaccaagaaattggataacctaggcaaaatggataaattcctagacaaatattacctacaaagactcaatcatgaagaaacagaaaatctgaatagaccaatagtgagttaggagattgaatcagtaatcaaaaacctcccaacaaagaaaagcccaggaccttatggctttactggtgaattctaccaaacatgtaaaaaagaattaataccaatccttctgaaatgcttccacaaaactgaagcagagggaacacttccaaactcattttacaaaaccacaattaccttaacaccaaagccaaatacaccataagaaaagaaaattacaggccatgttcacagatatgcaaaaatcctcaacaaaatactagcaatccaaattaaatagcacattaaaaggatcatacaccatgatccttttaaagtggaatttatccctgggatgcaaagaaattttaacatgtctgaatttataaatgtgatgtactataatattaccacaatgaaggataaaaatcatatgatcatctcagtagatggagaacaagcatttgacaaaattcagcatcctttcatgataaaaactttcaacaaattaggtatggaaggaatgtacctcaacatgataagggccatatatgacaagctcacagctaatgttatactcaacaaggatcctaaggtcaggagcaagactaagatgctcactctcaccacttctatttagtgtggtactagaagtcctagccagagcaattagagaagaggaagaaataaaagtcatccaaatgggaaagggagatgtaaaattgtctctgtttgcagatgacattatcttatatatagaaaactctaaggcttggcgtggtggctcatgcctgtaatcctagcactttgggaggccaaggctggtggatcacttaaggtcaggagttcaagaccaccctggccaatgtggtgaaaccctgtctactagagatacaaaattatccaggtgtaaagatgtgtgcctgtaatcctagctacttaggaggctgaggcatgagaattgcttgaacctgggaggcagaggttgtagtgagccgagatcatgccactgcactctagcctgggcaacagagtgagactccatctcacacacacacacaaaggccggcgcagtggctcatgcctgtaaccccagcactttgggaggccgaggcaggcagatcacttaaggtcaggagttcgagaccagcctggacaatatggtgaagccctgtctctactaaaaatgcagaaattagctgggcacggtgatgggtgcttgtaatcccagctactcaggaggctgaggcacaagaatcatttgagcctgggaggtggaggctgcagtgaactgagatggcgccactgcactccagcctggcgacagagccagactccatctcaaaaacaaaacaaaacaaacaaacaaaaaaactctaaagacttcaccaaaaaactattagacttaataagttcagaaaattagaagatacaaagttaacatacaatgtttctatatgctaactatctgaaaaagaaatcaagaaaactatcccatttataattgcatcaaaaaattacttaggaaatttaaggaggtaagagatgtgtacgctgaaaactagaaaacattgatgaaggagataaaaaaggacataaataaatggaaagataccccatgtttgtgaattggaagaattaatactgttaaaatgtccatactacccaaagcgatccatagattcaatgcagtccctatcaaaattccaatgatcttttccccagaagtataaaaaaatcctaagatttgtataaaaccacaaaacatcctaaatagccaaagtatcttgggcaaaaagaagaaagctggaggcatcacattatctgatttcaaaatatatactagaaagctataaagtaagcaaaactgcatggtactggcataaaaacgaacatatagaccagtggaatagaatagagagcccagaaataaatccatgcatttacggtcaattgatcttcaacaaacgtaccaaggacacacaatgggaaaggacagtctcttccataaatggtgttaggaaaactagatatccacatatagaagaataaaattggatgctatctcacaccatatacaaaatggattaaagactttcagattgacttttttttttttttttttgagacagagtctcactctgttgcccaggctggagtgcagtggtgtgatcttggctcactgcagtctctgcctcctgggttcaagtgattctgctgcctcagcctcccgagtagctgggattacagacatgtgccatcatgccccgctactttttgtatttttagtagagatggggtttcaccatgttggccaagctggtcttgaacacctgaactcaagtgattcgcccaccttggcctcccagagtgctgggattacaggcatgaaccaccgtggcccagattgacttctttcacttagtaatatgcacttaagtttccttcattcctttcatggcttgatagctcatttctttttagcactgaataatattccattatctgggtatacagcagtttatccattcacctactgaaggacatcttggttgcttccaagttttggcaattatgaataaagctattataaacatctatgtgtaagtttttgtgtgacaagcaatttttaactcctttgggtaaatactaaggagtacaattgctggatcatatggtaagaatatgtttagttttgtagaaaattgccaaacggtatttcaaagcggctgtaccattttgcattcccaccagcaatgaatgggagttcttgttgctccacatccacaccagcatttggtgttaccagtgttctgaattttggccatttgagtaagtgttcagtggtatttgttgttttaatttatatttccctgatgacatatgtttatttgccatctgtatatattctttggcgaagtatctgttaaagtcctttgaccattttaaacagagttttacttgtttgttttctcatttttgagttttaagagttcttcatatattttggataacagtcctttatcagatgtgtcttttgcaactattttctcccagtctgtggcttgtcttctcttaacattttctttttctttttttttttttttaagttagagtcttgctctgtcacccaggctggatggagtgcagtggtgagatcttggctcactgcaaccttcgcctcccaggctcaagcgattctcctgccgcagcctcttgaatggctgggattacaggtgtgcactaccaagcctggctagtttttgtatttttagtagagacggggtttcaccatgttgtccaggctggtctcgaactcctggcctcaagtgatctgcctgcctcgacctcccaaagtgctgggattacaggtgtgagtcaccacgcctggtgaatattgtcttttgcagtgcagaaatttttaattttaataaagtccagtttatcaattatttcttttatggattgtgccttaggtgttgtgtgttctattcttttttttttctgtagtgcttattaccttctaacatactatataatttacttgtttgcctcccccctgctaaactgtaaaccccaagaggacaaggacctttgtgtattttgtttattagtgtgtcccaagcatacaaaacagtgattatccaaatatgtattaaatggcaacctaattctgaaactggatttttgttttggagtgtatgctgaatcatggtagcattgaccttcagttttgatatctgtgtgggttcctagggcctagtcaagatggagaatccaataggatgcccttacatagagctgagaacccaaaagaagtacatccttagtgtaagagtcaactagagaaaaaagcccattctacagagaatggcagcaagaaaacttcactgttttgatcttggtagtgattggaagagagaaaaaaattgagattttgtaaccacaagccagccttcttttgggcttatggcccaaattcacattaactatggtctgaaaaaccttaagcctcaaaataatttcatctagcagaagcaaacaaattctctctggaggaggaatcttcagtttaggcttctcactgataaggtttcaaagtacatgagctcacagtcaaaaatcacaacatacaaagaaacaagtcatcgtgaggaagaaccgcaaaagcaataggtagcagatcagacctgcgtttacttcatatattggaattatcaggtgctaacattcttttacaatgtttgaagaaataagaaattgaaaatatgaccaaagaataagtgaatataaaaatatgttgtagcagattttaaaaaggattaaatagaactagaaatgaaaaatatgaaaattgaaattatggccagggtaagcagcatattagagacaacagaagagagaatgagagaatgggaagatagagttgaagaaagtatccaaatgtagcacagagacaaaaagatataaaataggaaaggctaaggaaatggtgcatagagtcagaaggcataatgtccaatcatagtttcaggaagagactgtatcaggatacaaatgtcacactagtaatttgaacagggaaattttaacataaagaatggttaactgtaaaggtggttcattacaattactaaaaggggtaaaatcagctaccaccctggtctgaggagagtgaagagggcggacctagaaacacagaggaggagggctcctccctccaaggctgatattgaaacctttgaggagaggctgcagtgtcacagaaacagcagtccaccagtggcaaacttgtcagagggtgactactgcaacaatccatgcagcacagaagcagcctgctgctgagtgggggagaatcttgctggaaggtgcaggccagggctgaactgtgaaggccactaaggcgaatgctaccatgtacttgctgggtaaccttaggcaagttacttaatctctctgagtcttacttctctagcttggaaaatgagggggctgaactttaattactaatgttgcttctttttttgaagtgaggccattccagtgtatcttcacaaagttagagttggttccttattgaaatggtctgtcttcattgtggggttttgttttgatttttctgtagttttgatcaagaatagatggtacagctattgaatgccacgttgagatgttaaaatgtaaatgtatagagtaaccactacaagaatagaaataagataatataacttctaacacagaaagtaattaaaatagtttagttttgatcccagcataagaaatagaccagctgaggcaaactggggggaatattgaaacacatatataattgataagagattagtagacaaaatatatgaataatttttttttttttttcctgagacggagtctttttctgtcgcccaggctggagtgcagtggctcggctcactgcaacctctgcctcccaggtccaagcaattctcccacctcagcctcccaggtagctgggtttacaggcacacgccaccgtgcctggctaatttttgtattttttttagtagaggtggggtttcaccatgttggccaggctggtcttgaactcctgaccttgtgatccacccacctcggcctcccaaagtgctgggattacaggcgtgaaccacggcgcccggcctgaagaattcttaagtaaggaatagagacaaacaagaatctcaagaaaataaggaaaaaagcaacccaatagaaatacaggcaagagactttaccgggcaattcacagaagataaactgaaaaggtgctcagtggtaatcaaggaaatgcaaataaaagtgaaaacgagataccatttcataacaactagattagaaaaacattaaaagcatgataatgccaactgttggtgaggatatggtgtagttgggtccttaggcactgctaggtggcagtggtgtatcactactttgggaaacaagtaggcattattcagataaatttgcacatatgtatgtcctacattacagcaagttcctaggcctatattgtaaagaaactcttggcatgtgtgttcgaggagatatatcagaacatatatatctttataatataaaacattggaaatgaccttaatgtttattggcagggtagcagaaacataaattatggtgtattctgtacagtgaattctatacagtgtattgtgaacttgtagagattacatactctataatttatataaatctcaaaagtgtgcaaaactaaacaatacattgtttagggttaggtacactcatggaaaacaaagtaagaaaatgatgaacatgaaagtgaggatggtggttacctctaaagaggttaggaaagaggagatgtcattggagtgggcacatagggagtttcaaagatactggaaattttatctttcttcagttgggtggtaagtacacagatattcattttattgtcattcgttatatcttagacatgatacaaatattcttttgtataaattatttaacaaaaactgagtttgtcatttgctttattattattctttgataggctcacatttattcttttatcacattatttctaatgtttagaaaaacatcctggggattttaattagtaatagtttatttaatctagttattaaattagggagaattctcttttttgctttactaagtttttctagctaggacagtgtaaacttcatatcttttatttcttccatgaaggttttatttatttattttttttgagacggcgtctcgctctgttgcccaggctggagtgcagtggtgcaatatcagctcactgcaacctccacctcccaggctcaagcgattctcttgggaggcctcagcctcccaaatacctgggactacaggcgcccgccaccatgcctggagagatggggtagagatggggtttcaccgtgttaaccaggatggtctcgacctcctgacctcatgatctgcctacctctgcctcccaaagtgttgggattccaggcgtgagccaccgcgcccagctggttttattatttttttattgttttatttgaataagtattactgtggcccaagtacatccaagaatgtaatagcttaatgctttcactactattgtgagtgaaaa

SEQ ID NO: 1550 - DNA, 32187 bp, Homo sapiens
gggctggcggggcgcaggccgcgggacccgagcccggggaagcgagagagcggaggcgccgaggatccgattcactccctggggagacctatgggccgaagccgtgtaaatgcgttttaaggcgagtgcggaaagtggcctggggagcctcggggagcggacgccctccgccctggtgctgacctgcctccctgccccttctgcctcctgtcagcagaggcctcggctccgcaactgccactcctcctcggggtgttgcacaagtttcgaggtcaccggcgaccccccctagcagcgcgcctggctctggcccccgcgaaggaggacggagtttggtaaggggccctgggggttggggggacctcagccctgcactctgtaggagtcactcggacagaaaaaacctcggccttccgttctctcccaggagcttgcggcccccacccaccgcgtggcgtccccaggcacgcctagaattctagcacctcaggatcagtccagcccccatttacaattggggaaactgcggctccgaaagggtcagagggtacccgaggtcaagcagtagagagcggactcgaacttaagctcttgctcttaggctgagacgccttgatgtggccaccggctaccctctaggtgggcgtggtcaagactgggggcgccctggaaacttccccacccaagtttctcagattttctgttccatctctctctcactctttcctgaaatccagaatttcagaactgggaaggctctccaaaacaattcatccattttacagagggagcaactgactcggagaggcagtgacatttgggcatacggtgccttgtctccgtctgaaatccgggattcttgactttctccacccttgcccagtgaaccccgggcttgtgctgggggcgggttgtgacgggattgggatccctggcctcgggaggcgagtggggcagcagagccggccccccagcggttcccttcatctcccctcgccccgcagtgtgttgcatactttctaaggcggcggctgcagcagcggctccatccagcccgtcagctcctcctgcaaggcatggctggctacctgagtgaatcggactttgtgatggtggaggagggcttcagtacccgagacctgctgaaggaactcactctgggggcctcacaggccaccacggtgaggggctgggaatgggggtgggtccccggtcccctgtacagatcagctgcctcctcaggaagggtccctagggccctcatcttatcctttcgcttatttggtacgcaatccttgctatttgcaagagaggggctcaatttatccccaattctttgtccttgcccccaaacctgcccctcctatgttgcctttttacccagccctccaaggtcagaaacgggggattcctttcctgctgccccctctccctcaccgcccacatctaggcattaccaagctctgtgaattctgcctccttaaataagcctccagtgtgcttatgtggaacctcgctttctagttcagtcttcctctctccaaaggccccctgatctcccggtctcatgccaccccctccaaaggtatcatagtcctgttcaaaatctgaatttggcaattctccactgcctacaggatcaagtcagagcttccctgcctccatagccccattcccagctttccccacagtatatattatgctccttcggagctgaatgactcaatttgcatttcccaatgatgctgtgtgcccaatgatgctattaccatgcctttgcccaggctgttccttctgcctgcagcatccttctctcagcctctcccctctttacccctttctagtcattccttgcttctcatcagtgttgcctttcctgatcgccccaggcagattttctattttctttctccatgcccctgcattgcaccttgtagaaactgccatctaacatctgctgaatggacttgtaagtacttaaggggttccttttcttccagacccaagctccttcagaacaacagtactgtttggtcatctctgtcccttagcataacgtttggcaccaagtgggcatgagtaaaaaagtgttgcatgaaagggaaactgagtcccagggaagcaactctggaagggtcccttccacatttaagtaatgtggtctcacccacagcctcatacatgtttggcctttagcacatctacaatgaacagttgtccatagggataggttgcagtgtcagtgggactagcttaaggcttcattgagcacctgtgtttggaaggcagtgagctgtaggtcatagcttctgcctttagggagtttacccttttctagaatggacagatgcatatgcagttctgataccttggaagcatatgcaaatgcagtgggagcatttaaaagcagagttgccttattggtttggggaaggtggcatttgagtgaaactttaaggattttgccagacacaggagtggggagggtattctgcaggacatggtgggaacaaaggtttgaaggtgggaaaatgatccagcctacagctggagttttagccgcattgaggggagggattggggctagatcagagccttgaatgccaggctgaggagtttgccttctgccctgtaggcttggggaggcccagaaaacttagcagcagggtagctctgtggccagtactgaacctgggtcaggtacttggaaggatcacggatggcatgcacagggtgcgagctggatggggtctcacattcatccacttcttgtcattcaggacgaggtagctgccttcttcgtggctgacctgggtgccatagtgaggaagcacttttgctttctgaagtgcctgccacgagtccggcccttttatgctgtcaagtgcaacagcagcccaggtgtgctgaaggttctggcccagctggggctgggctttagctgtgccaacaaggtgagccctgcccgcacggtgcactgaccctccatgcccactgaacacacacatggccaggctagtccaggtgggctctggggagcaagaggtacctgtagttggtccttgccctctgggaagaccacccactcaggaggggtctcaagggatgagggagggagaaacgagcatggaatttgtcagccttgaagttccagattggaatcttctttgtccctggtagaaagctcatctttttaatggagatttgcaaatttgtttggcacagagctatacatgatgttcttctaattaaaacaaaagcgtctccatattgttggtttcttttctttttccttttataatcataataatgtgtggcggtgcattttcttaactagtccttgtagttttgttgttgccaccaattctgtctttctaatttgatttctgctgttgtcttcattccctcctgctctctttagatttatttttttcattttttgagatggtgtcttgctctgtcacccaggctggagtgcagtgttgccatcttggctcactgcaaccttcgcctcccgggttcaagtgattctcctgccctcagcctcccgagtagatgggattacaggtgcacaccaccgtacctggctaattttttggtattttcagtagagacaggatttcagcatgttggccaggttgatctcaaactcctgaactcaggtgatccacccgcctcagcctcctaaagtgctgggtttacagccgtgagccaccgcgcatagccactttagattaactttacttatctactgtcattcagtatctactgaactcctacagcgtgtagtcactgtgctaggcagggctagcaatacagaattgatagactgctgtccttgagttgaatgcttagtttatttatttctattctgtccttgctagataaaagcatttaagctataaagtttcaactaagtagagctgaaagtatctcatttattgattcagcaaatattaattgggcatctcttctgaggccaagcattattctaggtggggatttggcagtgaacaaaataaaacaacaaaagcccttccttcatggagcttgtttacaaaaaaaaaaaaaaagatgaaataaagaaaatatttagtattttagatggaaaatgctgtagagagaaagcaggaaagggaagtaaggaatgttgggagagaggattgtacttttagatagtttggccagggaatggttcactgagatttgaatacagacccaaaagagccaagggatcaagccaggtagataaccagggaaagggcatttcaggcagcaggaacagcaggtgcaaaggccctgaggtgggagcaagtccagtgggcactgctttgtgatattgtcattagcactattttcttggtggttagtaatggttgcgtaatatggctggatgttgtgaggagagttctagaaaggactcctggagtcctgggcaggatgacagggctggagcgactccaggttggggagaggtgtgcacttggccgggatggtcagaatgagcaggttaacctgtagcagggaccgaatgttaatgcctttcatggtagatgaggtgcttcctcttatctttgggctagttcatgctttgcacacctcgttttgtgcatgtcttccacgaagctctgtgaggcacacagtgggagagactgccgttctacagttgaggaaaccatggggtcagccatctgtgggtagcagagccaggacgtcctcgtttcccacttcttcctgcggtgccctgggcctccacgtgggatgaaaaggagcaggatcctttcagtccccgaggtctagggtgaagaacaggaccaaaccccactgcctagagttttctgcttcaggaaccccagggggaggagcttggttctgtagaagaaagggcagagtgaggtgttaaggctgagagagaccttgatgacagcggggactggagaagcatctgccctttgctgagtgtgtctgttgtgtcaggtactttgccaagtgttttctgtacacgatctcattttattctcacaacagccctgtgaggtaattactattttttttaatggggattctgaccgtagcctggtgaggacacatttaacgtataaggaaatgagagatggaggttccgcatcagggtggtggcagcttgagtcctgctgagttgccttggactctgttttttccaaggtggctggggagaggatggctgagctgggattcagccagtgatggatgccctcagccaactgcaggggcgaggagagacttaagccccctccctgtgatgggatcatgcagaccctttggtgcgcttctggagaggtggctccccgacttacagcttttcttggaaggccaaggctgccctcttctggtcgtctgtagtgggtggccatgcttaacagcgttgtgccttagtggacactgaccaagggcctggcgtaagctagggctggatgtgcagacagacatgcgttggacgggggccagggccacagcttgctcggggactctggtctacccagccacctgcccgaggaccactgtatcatctctcctgtcccaatcgcttgccctctgtctccctcagcatcctcccatcttaaaaagcctttgctgggcagcacatcctcttccagcccaatcccttgctctcttttcgtgaccaaactcaaccaagttgtctgcacttgcctgtctgcccccattttttctttccttcagtactccttccttaagccattgcttcccagcctccactttcactactccaaagaattttctcttaccaacatccccagtgagcacttaccaacatccagtgagcactttactttaaacatggattgtgaactaataatacatgcaaataacacattgattcattcaccccaaaagaaactaggacatcagctttatgtctccatagataatcaccaggatggttttggtggatatgtagtattttttttttttttttgagatagagtttcgctcttgttgcccaggctggagtgcagtggcgcaatctcggctcaccgcaacctccacctcccgggttcaagtgattctcctgcctcagccttccgagtagctgggattacaggcatgtgccacgatgcccggctaattttgtatttttaatagagatggggtttctccatgttggtcaggctggtctcgaactcccgacctcaggtgatccacccgcctcggcctcccaaagtgctgggattacgggcataagccactgcacccagccatatatatatatatttttttttgagacagagtcttgctctgttgcccagggtggagtgcagtggcgtgatctcagttcactgcaacctctgcctcccaggttcaagcgattctcctgcctcagcctcctgagcagctgggattacaggtgcctaccaccatgcccggctaattttttgtttctttagtagagacagggttttaccatgttggccaggctggtcttgaactcctgacctcatgattcacctgccttggcctcccaaagtgctgggactacaggcatgagccaccacacccgactggcaatgcattctttaaaaaaaaaaaagactcaacagtaacatatggtcctacttttaaaggcttcagaagtgtataagatgaaagagaacactgcttcgaccccacctcatcaggcacttcttatagctgagacagctccttcctgtccagacacatgtctcgctgtgagacgagatttgcatttacaggaatagctttctaatctgcatattgctctccatcccttggaaacgttctccatcctcacctctgcaggtcccgggtaccatctctccccatcttctgccactctctaaatggtagcattcttctgaattcctaggcctccctgtcttgtaaaccctccttcttctcagaagaagggttatctcctcccatggctttaaataccatcaatatgccactgcttcccacattttaatctccagctcagacctatatatccagttgacttgatacgaggagatgcctggaacccggcatgttcaaatgtgctcctgatgtcccctttccccgtcatgaagggccccctcagtctgctgggtgtgggagttccctctgacgtcctcgtcctcatcaccacatgcaatctatcacccagcttgccagtcccacctccagaacacatctccccacttttctggagctggctctgtcatctcccccagggcgatggtgatagccactgactgtcactgtctattcccccagaatccccttgggccctccttcaggtagccagatagacatgtagaccttatatttaaaatgcaaatctgaccatgtcgtttcccttcctaaccctttagactctttcccatcacatgcagggtaaaacatgtttccttggcagctctgcccctctccctctgacctcatcgtcctcactgcactaacttgctcttcttgagccactgcagcattctctgttccttgatcaggctgaagtgctcagcactgcttgcctcagaacctctgcacagaccacttcctctactggaaagattcttagattctttccttccctcttggcctggctgaggcctcctgcagggctcagtttaaatatctaaccctgaagttgtcctttgcctctcacacccaggtctcttgcagcacgtactttttcttcccagctcttaaccacttgtaattccatcattattcagcgctcatttgggactgccctgcctatctttcccaccaacctgaaagctccatggtctcagagaccctatgtgctttagtcaccacttgttttattaacacctatcacagagcctggcaactcaatagatgctcaaaaatacccgtcagtgcagcattgaggttgcattccccattacagcagtgaggttaagagctggtgtgctaaggtctgacagttagaatcccatctgtgccacttagaagctgtgtgattttggacaaatcacttagcatccctgagcctctgttccccaccttataagattattagtaaggttaaatgagaatgtatataaaatacttaatgcagtgactggcataggatatgccttcaatgaatgacaacacttatttaaatatttataattaggctgagtgccttggctcacagctgtaatcccagcactctgggaggccaaggcaggaggactgcttgagcccaggagttcgaaaccagcctgggcaatgtagtgagaccctgtctctaattaaaaaatatatatatttaaaaaaaaattataatcaaagctcaatcacaggtccccaaagtgctaaagtgctaacactgcttcttcctctcacctcacgtggtgaggcagggaacaaaaacacaggtccacatccactcagattcggggtaggccacatctgcccctgggaagcaagctgtggtggcagcaagcccagctctggagcttgacctttgtgtcccattctgctactggttggctgtgtcaccacagacaggtggacctcactgaactcaattttgtcctccataaaatgtagccagtaaatatttcatagcatagtcattgggattaaatgaaataatgcttataaatatctagtgctgaaaagttgctaaattaaaattagactcttattacaaaatcaggatggctaaaaatgactcttatgcctctcaccatgtttcaaaactggctctctcttctcttgtttattcgtggagagtcagacttgagttcgaaagttcgttctgccacctattttctgcgtagcccttctgagcatcagtttccttctctgtagattggagctaatacccatctgaatgggttattggcaaggactgaataaaagggtgaatccaaagtaggggttggcaaactacggatggaaggccaaatccagtccaccacctaattttatgaagttttattgactcacagccacattcattcaattatgctttggctgtggctgttctggtgctacaaaggcagttgagaagttgtgacagagactgtgtggctcgcaaaacctaaaatatttattctggttctttatagaaaaagtatgctaacacccgatgtaaaccatctaattcagggcctgcttgtggtaggtgctgaatgaacacagttgctgtcgtcatcatcatcatcatcatttgttcatatcattaatgcagcaatcaggtgcccacaggttctagagtaaaggggatgaagaggaggccccaagaggagcagggctgagcccgcacaccctgcacacccagtgcagggccgtgcacagagtaggcctttggagtggggtgatctctgtccaaaagatccttggtctggtggactttctaatacaccagcagtgcttttgttatttattaagctgacaaataaaaattgtatatatttatggtgtacaacatgatgttttgatatatgtatacgttgtggaatggttaacaagctaattaggcattaactcacatacttacctttttttgtggtgagaacccctaaggtctattctttagcaatttccaagtgtaccatatattgttattaactatagtcaccatgatgtacattagatctcttgaacttaattctcctgactaaaactttgtatcctttgaccaacttcttcccactgccccctcgccattgacccgagcccttggcaaccaccattctatgctgcttctctgagtttgacatttttagattccacatataagtgagatcatgcatgtttgtctttctgtgcctggcttatttcacttaacatgatgtccttcaggctcatccatgttgctgcaaatgacaggatttcctgcatttttaaggttgaataatattccattgtgtatgtggaccacattttctttatctgttcatctgtgatggacacttaggtggcttgcgtatcttggcgattgtggataatgctgcactgaacatgggagtgcagatatctcttttacatattgacttcctttcctttggatgtatacccagtattggattgctggatcatatggtagttggtagttctattttttgagatggagtctggctctgtcacccaggctagagtgcagtgatgtgatctcggctcactccagcctccgcctcctgggttcaagtgagtctcctgcctcagcctcctgagtagctggaactacaggcatgtactaccaagcctggctaatttttgtatttttggtagagatggggttttgccatgtttcccaggctggtctcaagctcctggcctcaagtgatctgcccacctcagcctcccaaagtgttggggttacaggcgtgagccactgcgccctgtcctattttcagttttttttttgaggaacctccatactgttttccaagtaatatttaaacatttaaatttgccaggaaaatgtgtcagaagcctgttgtcagggctaccatgagtccatataatgcctttgtgtaaattagaaaatgtaccctttccttaagacaattaattgttataataaatatactgattttcttagaatgagatgctttactgccaggaagttttaataaatatacaaatctactctgtattcattctgaatgggaactccccacccccaggattgttcagtgtaccacccgcatggctgtacatggcagccctgcttatcaaagaatggtgaatccatgtaagtcctgatatctatgtatctgttgtcttagagcaaggcccactgttatgggcctccctatgcatagctatgactttgccctcatctgtgcttccttgggctccgtgggctagcaggccctggtgcctccttacaaccacctttggggccccataggcagagatggagttggtccagcatattggaatccctgccagtaagatcatctgcgccaacccctgtaagcaaattgcacagatcaaatatgctgccaagcatgggatccagctgctgagctttgacaatgagatggagctggcaaaggtggtaaagagccaccccagtgccaagtaagctgagaaccactcatggggaggctgggctgtggggagcctgggctgtggggagcctgggctgtggggaggctgggctgtggggaggctgggctgagggaaggctgggcttcagagtgaaggggggggtggggtgagggggtggagctggggcaggtcaccctgtcctggacccagccacagttgcaggaggttggggcaggtactcctggactgaacccaggatgctagggtctagctagaacaaaggcagaaataactggttaaagccctaggcagagtgagacccatgtgttatggaggccaaagtcacaggcttgagagagtcgagggagtggtcaggaaggctccacggaggaagtggcatttgaagcaggccttgaggaatgaatagaatttggagggggcataaatagtgaactgcgtaagcaaatgcattgaggttggaaacagcatgggacattcaagcgtaagcagaaacttagtgtggctgacgcatgctatgtgtagggggtgaaggagatcctggtcgggggcggggagccgatgcaaatggactttcgaaggggtcagggctggacgttttgctctggctgtgccttttacatgattactggacacccttggacttcccaggaggggccttggggtgaagggggtggccaggtgatgggccactccagtccatccaaagcagcttccatcgtattaatgggttctccttaaggctttgtttaaaaatggttcctctcatacacgacaagtttgaaagctctaactggtgtggagactgatttggagggactggagctgccccaggagagttggtgaggtctggaccagggcgcaggggctgcaggaatgggtcagggacatttagagaatggattggacaggacttgaaggttgattggctgtgtagggagagggaggggtcagggagcctgtggggttgggtggctctgagccatgtagctcacagcccttgattgagagatgtggctggggtggggcgacagggtttgtccagcagaggggcactgcgtgtctcatcaggatggttctgtgcattgctaccgatgactcccactccctgagctgcctgagcctaaagtttggagtgtcactgaaatcctgcagacacctgcttgaaaatgcgaagaagcaccatgtggaggtggtgggtgtgaggtgagcactgggaacccctgccatcccctcccacaccaggctccctgcctctttcccaggaattaattctatatgagaccttccccagggcctctgagtagggcctgtccctgggcctggaattcttccatttgagaatttcctctgtttgaaaaggaagtttagaagggtcccttccccagtcccagggtccccagaaggtcttgtcccaggaagttccatccagagacctggctttgagggagtcttaccagcctgtaggacaaaggttttgcagctacactcttgaggggcctcttttcttttctttctttctttttttttttttttttgagatagggtctcactctgtcacctaggctggagtgcagtggcatgatcatggttttctgcagccttgagctcccaggctcaagcaattctctctcccgcctcagcctcccaagtagctgtgaccacaggcgtgcattaccacacctgactaatttttatttgttgtagagatggggtctcactttattgctcaagctggtctcaaagtcttgggctcaagcaatccttttgccttggcctcccaaagtgctgggattacaggtgtgagccactgcacccagctgtgtgcctcttttcttacagggatatggaaggagtaataatgaactacctaatgaacaatgaactacctaatatagggcttcatttattctgtacttaggtgtgccaggtgctgtgctaagtgcttcatgcacattctctcagccttgtgtggtgtgggtcttgtccccgcattataggtggggaaactaaaacaaagctgagtaagctgccaaggccaccctgctgactgggaggcacagccagatctggttgacttgggggtcctggctctcatcccagaaggagggatgggaggagcaccaagtgccaggagcccttggatcaagcctcctgtccacttctcccttgccatatggcccttggcaacccattgaacatttcaggaccttggtcactgcatctgtaaaatgggcacagtgtctcatgtgcctgcccaatgtcattcttggctggggctcaggtggtggcacttggagccctgcatgtcagccgaggctcttcctctcttcccagttttcacattggcagtggctgtcctgaccctcaggcctatgctcagtccatcgcagacgcccggctcgtgtttgaaatgggcaccgagctgggtcacaagatgcacgttctggaccttggtggtggcttccctggcacagaaggggccaaagtgagatttgaagaggtaaccctggagctgggagtgtcatgctgggctctatggcggggaggatagggagggattagatgatcggagggagaccaccgtgcgtgggtcctatgcactgcatgcagtgcttggtgcttacctgggtgatctcactgcttattaaccctgtgctacagctgagcaagccaaggctcacagaggttacattgcttcctgagcccaaagcagaacctggttctgcctgccatgcacttcagccaattggaggcataaccaggacacatttacataagtcgtaaggctctttaaggggcgggataggcctcttcaccctaaggtgggctgatgagatatcgggtggggaggcagggaaacgaaaaccaacctttggtctgctgcctgtccattctcttcctctattcccttttccttacccactgtgaggtgaagttaagaaaaatgtgtcctagcagttcccactccaaccactagaggtcgcctcttcttggaaggcgcctccttcgggaataccgacatgtaggaattgaccttacagaaatgatttgggatagtctcaaagaatttgcctcaaagatgactgttctagctttgttcctaacagaagtccagtggacttccctggtccatctaatactcaggatttgttaaattatggtacatccttttgatgaaaacacttccttaatgtggggaggtcgttcacagtctattaagtaaaacaggttccaaaaacatatacagagacctaccatggttataataaaaaatagcgtttgtataaaaaataattaaagacactactccaaaaagttaacaataattagattcatctagttgatagactttggagtgacttttatcttctttttccttttctgtattttctgaattttctgtaatcaagtatattacagttgacctttgaacaacgcagagcttaggagcaccgaccccctacacactacaaaatctgcatataacttttgattcccctaaaacttagctactatagcctactgttgacaagaagccttgctgataacataaacagccgattaacagatattttatgtgtgatatgtattatatactgtattcttacaataaagtaagctagaggaaataattttttttttgagacagagtctcactctatcacccaggcgtgagtgcagtggcacaatcttggctcactgcaacctccgtctcctgggttcaagagattctcgtgtctcagcctcccaagtagctaggattacaggtgcaagccaccatgctcagctattttttgtatttttagtagagacggggtttcaccatgttggccaggctggtctcgaattcctgacctcaagtgatctgcccacttcagcctcccaaagttctgggattacaggcatgagccaccatgcctggccagaaataaaatattattaagaaaattataaggaagggaaaatgtatttactattcattaagtggaagtggatcatcataaaggtctttgtcctcattgtcttcaagttgagaaagctgtggaggaggagcaggaagaggagggcttggtcttgctgtctcagggtggcagaggcagaagaaaatccatgcataagtggacccacacggttcaaacctgtgttgtttaagggtcaactgtatttaacaaactggttatttatgaaagaaagatccacatcagggcttctggaatctgagtaccaagtgtgatatgaagaggactccttcccattgtggggccatggaggagggtgatttacacaagcacgaggctctctacccagctctgtccccctcctaccttcttggccagctgtccacagttatcagctggggccttagcagctgccaaatccttcttccggaaatcaaagcagctttcaagaaatagacttggagctgtagcaagtcttcagcataaagcccacatttcaaacacataattgtctccccattctcctcctaccagattgcttccgtgatcaactcagccttggacctgtacttcccagagggctgtggcgtggacatctttgctgagctggggcgctactacgtgacctcggccttcactgtggcagtcagcatcattgccaagaaggaggttctgctagaccagcctggcagggagggtaggtgccaggtgggcagtggagccctgttctcccctgaagcttcagatagtggttggctgagcaggatctggttttagacccagtggcagaggatgggggaatctggagaatgaatgggttcttgctttagggaaactttcagtcaagtcgccccaccccaagacatttatttagcatcttttttcctaggcatgttcatattttgtgaagattgagagcaaaacaaccttagagagaatagatactctgttgaccccattttacagatgaggaaaccgagaaccaaagagaatacaagtgaactgcttaatagctagtaagagcctgcatttgaccccatgtctgtctcctctccaaaatacaggctcctactcaccctactgcttctcataatataatgaaaataattaatgacagcttacatttgtttgagtccactttacagatgacaacataggcagggggaggctgagtcattagcccaaggtcacatggctgataaggggcagtgtggggattcaagttcaggttaggctgactcagcgcttctgggcccacatcaccaacatcagtgctcttccctccccttccagataggtcagggatagcagcctgtgagtgacaggtgtcagggactctgatcttgaggcttgccctctgctctgggaccctcatgcaggggagcctcaggactgtgcgcttttccccagagagaattcatgtgaagggtggtgggctccaggtagaatgtcctgtgttcgtgtgtggcattcttctggcttcctttatagacctgggggattgtcccgtctgatccaatcaagagacctggcttctcattctggctcatccactgccctatcatgtgcctctgagcaagtggcttaaccttttggggtcttgagtttgggtgggctgctcttctgcctttgctggggcacctaggggctcagatgcaagcaggggagtgcatcctgggcaggttgcttggctgcaggggtgagtgttcctaacacggcagtgaacccatgtcattggaaggatggctgctgatggcttttgttgtaggcctcgcctcatggttgaggaatgggtagccattttgcttccttactgagcccactgttgtgtcagccccactaccaccccctcacattgctacttgtgctgcctctgaaccctcccctcctgcagaggaaaatggttccacctccaagaccatcgtgtaccaccttgatgagggcgtgtatgggatcttcaactcagtcctgtttgacaacatctgccctacccccatcctgcagaaggtgagcttaccccacgtgggcctgttttcagttgtgtgtgtgtatttcaataacatttgttgtgtttttatctaatttttaaaaagtcaaacatatttattgtcgataatagacaacaaggatgacgaaggttatcacccataatcccaccacactctttgagcattacatattttaaaaaatgccttatacttttttcatgacattggaatcatattgttttgtaacctgctttttccatttatatggggtgtagctctttccatgccattaactgatctttgacaacatgcttttgtattttaaccaatctaactctagtggttggctatttggtttcctctttttgagcactgtgaatatatgttgaggtttcagctctgtggtaaattcctggaagtagaaacagttcatatacagtgggtttttctgtaataacaggggaacaggaatacataaaacattcctcctagcctgtggaacccagcccagggcctccagcaattttaatgggcatctttgagaggataaagaaaaccagacatcattttatcttcccctctccattgtgtcttcctatctctctctctctttttttttttgagatggagtcttactccgtcaaccaggctggagtgcagtggtgtgatctcggctcactgcaacctccacctcctgagttcaagtgattctcctgcctcagcctcccgagtaggtgggactataggcacccgccaccatgcctggctaatttttgtatttttagtagaggcggggtttcaaccatgttgtccaggctggtctctaacccttgacctcaaatcatccaccaactttggcctcccaaagtgctgggattacaggcacgagccaccatgcctggcctcttcccatctcttgacctttgtgcagcccctcttcctggaaagaaactttccttgcatgccttgaagtgcctaactagcactcattatgtttttccttcccttcccaacctatccagtttttcaaaagtcagtcagaggggtcttgaaaatcaactccactttgtggctcttcctgccccttatccctgtgctggcctagggaacccctctctccctccctccttcctccaggtacccaggcaccctagatgtgcttgatggagcctcactccatggttaaatgtggttacatctgctggtcagagtaggcctccccaaggtgctgaggaatgctgagctctctactctgacgcactagcattgcctgcattcttgtggtagcccacatcctactgcactgagaagggaccaggccagccagcttacagagcgggcagctgttgagtccccgttactctgcctctccagtactcgtcttcctgttgcatgctggctctcacccactccactcccttcattggctcctcagaagaggagatgatggtcccagcccactgccacgccccccaccgggatctttgctttggctgatctctagttggcattcctgacttgggcactgggatgtttgactctctttgtggtctgtgctgttcctcccctgaacgatgctgcggtttcttcctttaggctcttaactgcttttcaagtttggccacgtgagcgcctccagagtggggcccacagcctggcggtggaataagacattgcatagatgacaatacacataataagttaactcctgtggtgctgggagtgtgtgtcagagggattcagcctggctgggggtatccgtaccttctttcccaaagaaggtccccttacaagtattagttttggcatctttctttgcatacctgctcttccttcccagggactttgtgtttagacctgggtataaaaagttgtatgaggccaggcgtggtggctcaagcctgtaatctcagcactttgggaggcagaggtggttggatacctgaagtcaggagttcgagaccagtctagccaacatggtgaaaccctgtctctactaaaaatccaaaaattagccgggcatgatggcacatgcctgtgatcgcagctacttgggaggctaaggcaggagagtaacctgagcctgggaggcggaggttgcagtgatccaagactgtgccattgcactccagcctgggcgacagagtaagactctgtctcaaaaaaaaaaaaaagaaagaaaagaaaaaaagttgtatgaaacataatccttggctcaagatatacttcttattgcaccatgcttggcccttttttgtgtgtttctttttggtttttatttttataaattcagcaaataattcagtactctcaaagcagtactctcaatactcaaagcaccgtgctgaggtctgcagaggaattgtctgtgctttggaagtacagtcctgttggatagaaacacgtgtgtgtgtgtgtgtgtgtgtgtgattagtatacaagctacaaccatgtatgagaaaagtacagaacaaatattattggagcttttaaaacatattttagtactgtacatgtttctaaaaaataaggaacttaaaaaatcacaattccattatcaaattaaaaaatgaataattccatagtatcccccatcatcggtgttgagctatccccaactgtctcataatggtttttatattaacttgctgaaatcaggaggcaaagaaggtctgcatggtgcatttggttgccatctctctctctctcttttttttttgagacagagtctcactctgttgcctaggctagagttcagtggtgtgatctcggctcactgcaacctctgcctcctaggttcaagcttctctcctgcctcagcctcccgagtagctgggattacaggtgtgtgccaccatgcctggctaatttttgtatttttagtagagatgaggttttgccatgctggccaggctggtctcaaactcctgacctcaagtgatccatctggctcggcctcccaaagtgctgggattacaggtgtgagccactgggcccggcaccatgtctctctcttaacccattggtttccccatactcttttcttctttttcttttttgtagagatgcaatctccctgtgttgtctaggcgggttgagaactcccagccccaagcgattgtccagcctcagcctcccaaagtgctgggattacaggcatgaaccactgtgcctggcccccaccctctttttaagtctgttttgtttgtttgttttctttggtaattttaaactgagttgtttttcctgtggagtttcctgcattcttgattttcctgattggtgaatttcctgaatttccctttggtgcttttgaacatgtttctctgcctggtatttttttttttttttttgaaattaggtagatttagaggtttgaatagcatctcaatcagctttggaataaaaatactccatgggagatcttgtctttgttttccttttagagtaataagcatccttattatttaacctacattgccttccatgcaaagtcgtcactatcttgactcatgcattatcattctctggctttctttttcagtataggtttatcacatctaaatctattcctcgagtgtatttataatttattatatttgtttttttgctttataaaaaggtattttgatgcatgtaacctgtttgggctttttctccctcatatcacagtctaagaaccactcaccctgctacatgtctctagagtccattcatttcattgccgtgtagcgctcttttggtgagtatgctgcagtttatttgtccattctcctctcaaggcatttggactgtctttgggtttttgctactgtgaatactgctgctgtgaattcttgtttccctctctctgatgagtgagcaaggagtggaatggctgggtatagggcatgtgaatgtttggcttcatgagaaaatgccaaacaattttctgaagtgttgtactgacaatcccaccagcagtgtgtaagagactcggtggctctgcattttctccagcatggagtattgccagactgaaaacattttcccagtggaatggatgtaaaatgatatctcattgtgtcttgatttgcatttccctcatcactagcaaagctggatgtctctttgtatatttactggccaaatgtgtttcccggaacttcttccagggactttgtaagttggtgttccccttcatgtctgaatttctccaccgagtggtctgtacccactgcccctgctcactcagctcccttagcccttccaacctctccagtcaggtacctgttccatgatgccatggaagatgctcttgaaagtcacttccacgctgctagctcttccatatggctcttctgtcccagcagctggtcctcctctgttttcatgctcacctctcctggcttctgtggcaacatcctgggccttggctactcttctgctgttctcaccttgtctccttggcacttctcctgctcaccctttaagtgctgactgtctcaggcctcagtccttgatcttctctgtctatatgcgcttcctaggtaaatgcttccagactgaggctcttagtatcttccatactatcatcactcccaaatttctatctctatcctggatcacacccctgagctccagacttgcacatccaactacccgcttgagattcctactgggatttcacagacatctcaagtttaacttgttcagaactgaactcttgatttccaaccccaaacttctctcactaaatagcactgccactagccaactgctgaagctaaaaaagttggcattattcttgatttttgctttccctctccttccacatgcagtccacctgcaattcttgagtgtagttccaaaatacattttggtttcagtgaattcttcctctgtcgccaccctaatgcaagccaccattgcctcctgcttgagctactgcagtagccattaactggttttccacccccatactactacctgcttaccacccattttccacgctgcagacagaatgatcttttaaaatcccaaagattatgcccctcctctgcttaacaccatctgtggcttcccattgctctcagaataaaacctagactccttaccacaacgagcaaggctcctgccatcttcccaggcacctctgccctcactcctgtccctgttttcagctccacttacctgctccagtcccattcctctcctttctgtttttgtaacacctaagttgtttctgctctcagggcctttgcattcgctcgcccagaatgctcttccactcacccctgagacagctgctgtattctctttcttatgtctcagctcagatgtcaccttgtcagggaggcctttcctgactgccctctctaaagtaggctcacctcccctagtcagataattttgataccctgcttattttcttcacaacccatcgtaatctgttaattatcttgtttttgtttacttgcctatagtctgtcttctccattagcaggtaggctctatgagggcagccacgttgtccagttagtttcctctgagttcccagcaccagacacagtgcctggcatatagtaggtgctcactaaatatctgttgaatgaattgtgaatggatgaatcaatcattcaataaactgtgagacccttgagggtctcacatctgttcatatctgtttccctagtacggaacttggcatacagtaggttcagtatatgttggaattaaatagatctttttttttttttttgagatggagtctcactctgtcacccaggctggagtgcagtgctacagtcttggctcactgcaacctctgcctcccgggttcaagtgattctgctgcctcagcttcccgagtagctgggattacaggcgcccgtcactatgcctggctaatttctgtatttttagtagagacggcatttcaccatgttggtcaggttggtcttgaactcctgacctcaagtgatctgcccgcctcggcctcccaaagtgctttgattacaggcatgagccactgtacccggccattgtttctttcatttctatgtctttgacaaggataaaccattttgtttttgtttattgttttatttattttgatgtcaatgtctttttatatcctctgttcacttaatttgggaggtcttgaagttttttcttgcacatagaaatgagcttgcatatgcatgtgtgcatgtatttaatatgatgtttgatacaaatattttttcactctattggtttattgttttagttttgtaattctttgttattctttcatagaagttttgacacactattttgttttaactaagtttgctgtaattaataggaaggaaatctgttactttcttttgtgctctgctgttatagattatctttattacatatatatatatatagtcttatagaaatagaatgtttattagaaaaaatttaacacaaatagtaaaataaaatgattcactaatcccaccattcagagatgactattgttaaatgtactttgatttctactttttttgggtttaatggctattttattttgttttattttatttaacacaaggtcacattctgtcaccctggccagagtgcagtggcacagtcatgctcactgtagcctccacctccgaggctcaagccatccttcccactccagcttctgaatagctcggactacaggcacatgccactatgcctggctaatttttgtattttttgcagagatggggttttgccatgttgcccaggctggtcttgagctccttgttttgttcaagcaatcctcccaccttgagattacagacatgagccaccacgcctgacctgataattttttttaaaaggttgtctagtcttgctaagaataagcaagacgtttcgtttactaatgtcatgatttaaccagttttagctgctctgatattaaaaggtgtttttgttaatatacttctaaaatattggaaataatcagagctgggtggggagagagaactaagcccaaaatctctaatttacaatgctgtaacattttgaaagaccaatcttgtttttgatttctactttttaaaaaagtgtcatagtgcactttgtttttcactttaaagttttatatattgtgagcatatggttttctttaaatactgacgtgttaggtggacttttaaatatagaaacattttaaatgttcattgagtgctctaaaataatacatatttagtgtgtgtattagtttgttctcacactgccaaaaaggaatacccaagaatgggtaatttaaaaaggaaagaggtttaattgacacagttctgcatggatagggaggcctcaggaaacctacattcatggcagaaggggaagcaggcacatcttacatggctgcaggagggagaggtgtgaagggggaacttccaaacacttttaaaaccatcagctctcatgagaactccctcactatcataagaatagcatgggcgaaactgcccgccatgatccaatcacctcccaacaggcccctccctcaatatctggggattacaattcaagatgagatttgggtggggacacaaagccaaaccatatcagtgtgtaaagatgcaattcaacaaatgtgtatgagcacttcacaaatgcaagatacgatttggtatagggtggaatcaagaggaggcaagtatcatgggagttttataagaatcttggcaggcaaaattcaggacagttaccccagtccatgaagagagattctccttttattgccaagatggggctttcttacttgctgttccattttattctagtttgttatgctttcaaaagtgtgaatctgtctggaatgtattgcaatagcacttaccaagtgtgtccctagactaagaagacagaagactcaaataaataaaattataaatgaaagaggagacattacaggataccacagaaattcaaaggatcataagagaccactactagcatgaataactatacaccaagaaattggataacctaggcaaaatggataaattcctagacaaatattacctacaaagactcaatcatgaagaaacagaaaatctgaatagaccaatagtgagttaggagattgaatcagtaatcaaaaacctcccaacaaagaaaagcccaggaccttatggctttactggtgaattctaccaaacatgtaaaaaagaattaataccaatccttctgaaatgcttccacaaaactgaagcagagggaacacttccaaactcattttacaaaaccacaattaccttaacaccaaagccaaatacaccataagaaaagaaaattacaggccatgttcacagatatgcaaaaatcctcaacaaaatactagcaatccaaattaaatagcacattaaaaggatcatacaccatgatccttttaaagtggaatttatccctgggatgcaaagaaattttaacatgtctgaatttataaatgtgatgtactataatattaccacaatgaaggataaaaatcatatgatcatctcagtagatggagaacaagcatttgacaaaattcagcatcctttcatgataaaaactttcaacaaattaggtatggaaggaatgtacctcaacatgataagggccatatatgacaagctcacagctaatgttatactcaacaaggatcctaaggtcaggagcaagactaagatgctcactctcaccacttctatttagtgtggtactagaagtcctagccagagcaattagagaagaggaagaaataaaagtcatccaaatgggaaagggagatgtaaaattgtctctgtttgcagatgacattatcttatatatagaaaactctaaggcttggcgtggtggctcatgcctgtaatcctagcactttgggaggccaaggctggtggatcacttaaggtcaggagttcaagaccaccctggccaatgtggtgaaaccctgtctactagagatacaaaattatccaggcgtaaagatgtgtgcctgtaatcctagctacttaggaggctgaggcatgagaattgcttgaacctgggaggcagaggttgtagtgagccgagatcatgccactgcactctagcctgggcaacagagtgagactccatctcacacacacacacaaaggccggcgcagtggctcatgcctgtaaccccagcactttgggaggccgaggcaggcagatcacttaaggtcaggagttcgagaccagcctggacaatatggtgaagccctgtctctactaaaaatgcagaaattagctgggcacggtgatgggtgcttgtaatcccagctactcaggaggctgaggcacaagaatcatttgagcctgggaggtggaggctgcagtgaactgagatggcgccactgcactccagcctggcgacagagccagactccatctcaaaaacaaaacaaaacaaacaaacaaaaaaactctaaagacttcaccaaaaaactattagacttaataagttcagaaaattagaagatacaaagttaacatacaatgtttctatatgctaactatctgaaaaagaaatcaagaaaactatcccatttataattgcatcaaaaaattacttaggaaatttaaggaggtaagagatgtgtacgctgaaaactagaaaacattgatgaaggagataaaaaaggacataaataaatggaaagataccccatgtttgtgaattggaagaattaatactgttaaaatgtccatactacccaaagcgatccatagattcaatgcagtccctatcaaaattccaatgatcttttccccagaagtataaaaaaatcctaagatttgtataaaaccacaaaacatcctaaatagccaaagtatcttgggcaaaaagaagaaagctggaggcatcacattatctgatttcaaaatatatactagaaagctataaagtaagcaaaactgcatggtactggcataaaaacgaacatatagaccagtggaatagaatagagagcccagaaataaatccatgcatttacggtcaattgatcttcaacaaacgtaccaaggacacacaatgggaaaggacagtctcttccataaatggtgttaggaaaactagatatccacatatagaagaataaaattggatgctatctcacaccatatacaaaatggattaaagactttcagattgacttttttttttttttttttgagacagagtctcactctgttgcccaggctggagtgcagtggtgtgatcttggctcactgcagtctctgcctcctgggttcaagtgattctgctgcctcagcctcccgagtagctgggattacagacatgtgccatcatgccccgctactttttgtatttttagtagagatggggtttcaccatgttggccaagctggtcttgaacacctgaactcaagtgattcgcccaccttggcctcccagagtgctgggattacaggcatgaaccaccgtggcccagattgacttctttcacttagtaatatgcacttaagtttccttcattcctttcatggcttgatagctcatttctttttagcactgaataatattccattatctgggtatacagcagtttatccattcacctactgaaggacatcttggttgcttccaagttttggcaattatgaataaagctattataaacatctatgtgtaagtttttgtgtgacaagcaatttttaactcctttgggtaaatactaaggagtacaattgctggatcatatggtaagaatatgtttagttttgtagaaaattgccaaacggtatttcaaagcggctgtaccattttgcattcccaccagcaatgaatgggagttcttgttgctccacatccacaccagcatttggtgttaccagtgttctgaattttggccatttgagtaagtgttcagtggtatttgttgttttaatttatatttccctgatgacatatgtttatttgccatctgtatatattctttggcgaagtatctgttaaagtcctttgaccattttaaacagagttttacttgtttgttttctcatttttgagttttaagagttcttcatatattttggataacagtcctttatcagatgtgtcttttgcaactattttctcccagtctgtggcttgtcttctcttaacattttctttttctttttttttttttttaagttagagtcttgctctgtcacccaggctggatggagtgcagtggtgagatcttggctcactgcaaccttcgcctcccaggctcaagcgattctcctgccgcagcctcttgaatggctgggattacaggtgtgcactaccaagcctggctagtttttgtatttttagtagagacggggtttcaccatgttgtccaggctggtctcgaactcctggcctcaagtgatctgcctgcctcgacctcccaaagtgctgggattacaggtgtgagtcaccacgcctggtgaatattgtcttttgcagtgcagaaatttttaattttaataaagtccagtttatcaattatttcttttatggattgtgccttaggtgttgtgtgttctattcttttttttttctgtagtgcttattaccttctaacatactatataatttacttgtttgcctcccccctgctaaactgtaaaccccaagaggacaaggacctttgtgtattttgtttattagtgtgtcccaagcatacaaaacagtgattatccaaatatgtattaaatggcaacctaattctgaaactggatttttgttttggagtgtatgctgaatcatggtagcattgaccttcagttttgatatctgtgtgggttcctagggcctagtcaagatggagaatccaataggatgcccttacatagagctgagaacccaaaagaagtacatccttagtgtaagagtcaactagagaaaaaagcccattctacagagaatggcagcaagaaaacttcactgttttgatcttggtagtgattggaagagagaaaaaaattgagattttgtaaccacaagccagccttcttttgggcttatggcccaaattcacattaactatggtctgaaaaaccttaagcctcaaaataatttcatctagcagaagcaaacaaattctctctggaggaggaatcttcagtttaggcttctcactgataaggtttcaaagtacatgagctcacagtcaaaaatcacaacatacaaagaaacaagtcatcgtgaggaagaaccgcaaaagcaataggtagcagatcagacctgcgtttacttcatatattggaattatcaggtgctaacattcttttacaatgtttgaagaaataagaaattgaaaatatgaccaaagaataagtgaatataaaaatatgttgtagcagattttaaaaaggattaaatagaactagaaatgaaaaatatgaaaattgaaattatggccagggtaagcagcatattagagacaacagaagagagaatgagagaatgggaagatagagttgaagaaagtatccaaatgtagcacagagacaaaaagatataaaataggaaaggctaaggaaatggtgcatagagtcagaaggcataatgtccaatcatagtttcaggaagagactgtatcaggatacaaatgtcacactagtaatttgaacagggaaattttaacataaagaatggttaactgtaaaggtggttcattacaattactaaaaggggtaaaatcagctaccacccctggtcctgagggagagtgaagaaggcaggaacttagaaacacagaggaggagggctcctccctccaaggctgatattgaaacctttgaggagaggctgcagtgtcacagaaacagcagtccaccagtggcaaacttgtcagagggtgactactgcaacaatccatgcagcacagaagcagcctgctgctgagtgggggagaatcttgctggaaggtgcaggccagggctgaactgtgaaggccactaaggcgaatgctaccatgtacttgctgggtaaccttaggcaagttacttaatctctctgagtcttacttctctagcttggaaaatgagggggctgaactttaattactaatgttgcttctttttttgaagtgaggccattccagtgtatcttcacaaagttagagttggttccttattgaaatggtctgtcttcattgtggggttttgttttgatttttctgtagttttgatcaagaatagatggtacagctattgaatgccacgttgagatgttaaaatgtaaatgtatagagtaaccactacaagaatagaaataagataatataacttctaacacagaaagtaattaaaatagtttagttttgatcccagcataagaaatagaccagctgaggcaaactggggggaatattgaaacacatatataattgataagagattagtagacaaaatatatgaataatttttttttttttttcctgagacggagtctttttctgtcgcccaggctggagtgcagtggctcggctcactgcaacctctgcctcccaggtccaagcaattctcccacctcagcctcccaggtagctgggtttacaggcacacgccaccgtgcctggctaatttttgtattttttttagtagaggtggggtttcaccatgttggccaggctggtcttgaactcctgaccttgtgatccacccacctcggcctcccaaagtgctgggattacaggcgtgaaccacggcgcccggcctgaagaattcttaagtaaggaatagagacaaacaagaatctcaagaaaataaggaaaaaagcaacccaatagaaatacaggcaagagactttaccgggcaattcacagaagataaactgaaaaggtgctcagtggtaatcaaggaaatgcaaataaaagtgaaaacgagataccatttcataacaactagattagaaaaacattaaaagcatgataatgccaactgttggtgaggatatggtgtagttgggtccttaggcactgctaggtggcagtggtgtatcactactttgggaaacaagtaggcattattcagataaatttgcacatatgtatgtcctacattacagcaagttcctaggcctatattgtaaagaaactcttggcatgtgtgttcgaggagatatatcagaacatatatatctttataatataaaacattggaaatgaccttaatgtttattggcagggtagcagaaacataaattatggtgtattctgtacagtgaattctatacagtgtattgtgaacttgtagagattacatactctataatttatataaatctcaaaagtgtgcaaaactaaacaatacattgtttagggttaggtacactcatggaaaacaaagtaagaaaatgatgaacatgaaagtgaggatggtggttacctctaaagaggttaggaaagaggagatgtcattggagtgggcacatagggagtttcaaagatactggaaattttatctttcttcagttgggtggtaagtacacagatattcattttattgtcattcgttatatcttagacatgatacaaatattcttttgtataaattatttaacaaaaactgagtttgtcatttgctttattattattctttgataggctcacatttattcttttatcacattatttctaatgtttagaaaaacatcctggggattttaattagtaatagtttatttaatctagttattaaattagggagaattctcttttttgctttactaagtttttctagctaggacagtgtaaacttcatatcttttatttcttccatgaaggttttatttatttattttttttgagacggcgtctcgctctgttgcccaggctggagtgcagtggtgcaatatcagctcactgcaacctccacctcccaggctcaagcgattctcttgggaggcctcagcctcccaaatacctgggactacaggcgcccgccaccatgcctggagagatggggtagagatggggtttcaccgtgttaaccaggatggtctcgacctcctgacctcatgatctgcctacctctgcctcccaaagtgttgggattccaggcgtgagccaccgcgcccagctggttttattatttttttattgttttatttgaataagtattactgtggcccaagtacatccaagaatgtaatagcttaatgctttcactactat

SEQ ID NO: 1551 - DNA, 124 bp, Homo sapiens
ctgtgcgtggtggcatgcgcctataatcccagttacttgggaggctgaggcaggagaatcgcttgaacccaggaggcagaggttgcagtgagctgagatcgtgccattgcactccagcctgggc

SEQ ID NO: 1552 - DNA, 756 bp, Homo sapiens
gatcacctgaggtcaggagttcgagaccagcctggccaacatggcaaaaccccgtctctactaaaaatacaaaaattagccaggtgtggtggtatgtgcctgtaattccagctactcaggaggctgaggcaggagaatcacttgaacagggaggtggaggtcgcagtgagccgaggttgcagtgagccgagattgcaccactgcactccagcctgggcgactgagcgagaccctgcctcaaataaagaaataaataaataaagtggagaagttagtggtttctggtgtattcagagttgtgtaaccatcaccctagaaagaaatcccatacccattagcagtcactctccatttttcccattccccagtccctgatgacacaaatctaccttccatctctatggatttgcttattctggacattgtattgtgatggattttctatcttcacttgagcttctctctaggtaagcctgaccatcctgcttcagtatctcagccagtcctggtgggaactgtacgtggctttgaggtcatctcatgaggcaatgtggcatgggtttggagtgaacgaggtgctttctcaaagccaggggtgtctcccttttccaggtgggatctagttttcggtatcttgacaataaataggctgaaagcttgggacatcaaaagactcagggcaatcagaaagggttactctactaccccgtgatccatcaaagccacgatttacaggtattaccatgccagtaattg

SEQ ID NO: 1553 - DNA, 124 bp, Homo sapiens; identical to SEQ ID NO: 1551

SEQ ID NO: 1554 - DNA, 756 bp, Homo sapiens; identical to SEQ ID NO: 1552

SEQ ID NO: 1555 - DNA, 27332 bp, Homo sapiens
aggataatcaccatctctttggtagtactttgttgggaattaaggatgatgatgcagatctgagtcaggctctttgtctggccatctccgtgtcagagatccttcaagcgaatcagctacaaggggtaagtaaaggaaacccagtttgttaggggactgttcattttaaatacaaggaaccaacttcctccctgttcattgattcccacaaaatcaatttactgcaacaaggtggctcttttggctttttgaatgattgtgttaaatgttatgttcagagggtcattttaaaacttgtcagcttgtgtggtgttttaattgtctacaattaattattgttgacattcttgacaccagtttttgtaaatcgccgtatcttttttccatatttcagtagagcaactgaatgtggcattgtataaaatacttttaaaagggtgaatttagcatttaacagtttctggtagtttacagctaattgaattacatggtttagttccatacaacttatagcaaaggagaattgtgaaaatgaaattttcttcatgaaaatctaataagtcaatttgaccaatgatgtttttaatatatggtctttattactagtagtgcagcagttaaccatggtgtgtatttggaaggtgtagtgtatttccaaggttgagggcaggaaaggaatggacgtgggaaaatagccttttatggtagatctttcttagttggatttcttactgtatctgcgctggttattgaggattttcaaaatacaagcatctcacttttttcttattcaaactaatatttaaaaacaaatgaaaacatgttatccagtttaaagagatccatgtgaacttctttagttgaaactggtatttcagaacattctcccttcatccccccacacgaaatagatgtttagttcttacgtgaattgagctgttgataaatttgcagatttatttgcaaaaaagaatagcatatctagagttgtgtttataactatatagcgttttataattagttttataattaattataattagttttatagctcaaacagacactctccttctatgtattttaagactttccagtaaagaacaacatctaaaaaagaaaaatgttttaactgtttaaaagaaataaaagtatttaggaccttcgggttattttctgtgctaactaggtcctcccaattccatgtgagatccattttttaatgaacttgttccctttatttggttaactgtgaatattatgttgtgcaatgtgaacctcatgggaaattcctgtatgtcaaatgttgtttccgttttaggaaggagtccggttctttgtggtggattgccgtcctgcagaacaatataatgctgggcatttatcaactgctttccacttagattcagacctggttagtataaatgctgattaattattcttaaagtaactttttttccttcagttcataaataaatatataggtcccagattggggaatttttttctttctgcttaaggagggagtctctgcccttatgagaaaagtgttgctgtcaggtttccttttcacccaaatacccttttgtgtttttgttgttgtttgtttgtttgtttgtttcgcttttgttgcccaggcaggagtgcaatggtgcgatctcggctcactgcaacctctgcctcctgggttcaagctattctcctgcctcaccctccctagtaggtgggattacaggcacccaccaccaggcccggctaattttttgtatttttagtagagacgggctttcaccatgttggccaggctggtctcgaactcctgacctcaggtgatccccctgcctcagcctcccaaagtgttgggattataggcgtgagccaccacgcccagcccagatacccttttggcattataaagggtagttgaaaacaatgctcactatggcttactatcgcttaccatttttatgtcagtaaattctgaacttagtttgagctacctagtatagcacttagcatagtgcactgcacctactaagtactctctggatatcagctcttactgtaattgagtaagaattctgtaggctttatagtatgagccatttttaatcatgagtatttatgcatataataaactaatatttaataagggtagtatctggcatataagtacttagttattaaaactactatcctaggtcatttaatttgaagaatggtaaataattgtcagagatgtatagagctgttggtagaattgaggctaacatcatttaagccattctgggatcattaaagcctcagggatggggaacacaggaatgggatgagaaacctcttagctaaatgttaagtctacctttccccttcccaactcgtctgaaaaatttgatgctgaactgaaagggtgtgtgaaagggcctaggtaatattgaggaagaactaacagatattgtgagaaaggccatcttagctcatccatattctgtaggtgaactctgtgcctttctcttccttgattcctctctccttcctattttaaaaatttactcaagtgattcatgaatacttgaattaattttttttttttttttttttgagacagagtttctactctgccactcaggctggagtacagtgttatgatcttggctcactgcaacctcagcctcccaggttctggcgattccctagcctcagcctcccgagtaactgggactgcaggtgtgcgccaccatgcctggctaattttttttacttttagtagaggagggggttcatgttggccaggctggtctcaaactcccagcttcaagtgatctgcccaccttggcctcccaaagtgcagggattacaggcgtgagtcaccatgcccggcttgaatttttaaaaatttttaaagaatattatcagcttacgtaatcttccagacttttaatatctgtttacatattttttgttttgccacttgatttttcacgtaacagtttctaagagatcttttgatttaagtacattctttctaatgatgcatagtggtccatggtacatgtaggtatactataatttattgcctgattgatgtatatgtgggttattttttgttttcttgtaataatgctgcatttgacatctttttatacattttgtgaacttatgcaaatatttctgtaaaatagattcttaaaagtaaaattgttttgatgaggtgtgtggatatatacattttactagagaccaccgtattgccctttaaaaaggtggaacccagctatttgggaggcggaggttgcggtgagccgagatcgcaccagtgcactccagcctgggtgacagagggagattccgtctcaaaaaaaaaaaaaaaaaaatggtggaaccttcttacgtttcagaactctaaatgagaatgccattggcattattggatattatcaatcttttcttatcttaccagagtgatgagtgaaaaatagttgtgattaccgatgaggttgaacattattttttgtgagtgtgctgtttatatttgcttttgttttttacaaattgcttttctatatgatctgtccatttttctatttttcaccatactttttgtgtatctccattaaaacagtttttaaacatctttgtagttattgtcgtacttgtttccttgagggtaagaaatgaatatttcatccttgtgtctccgttacctggaatagtgctgataaacaaatgccttctgttatttctgacaatcctctaagaaacacatggtttaccatctaaggggaaactaaaaaatagagcttgttttgatctatagttttatactctttctgtcttgatatctaaggatactgttgctacttgttatttaagaaaaaacaagaacaacaaacagtttttctctagtagagaattattttctttgcatcaatctttgtgtgaatgttcaacttttgttctattgtattatagatacatttataaatatttctcttatcccagggattttatttataagagcctttttttccccttcattttcattgtggctctttaaatattggggtttttcctaaaaaaaatttcaaatttacaaatatatgtgaaacacaggcttgtcaagtttttaactttaaaaaaattgtctagatgcttcagaatccatctgagtttgcacagtcagtaaaatccttgctggaagcacagaagcagtccattgagtctggctccatagctggtggggagcacctctgttttatgggcagtggcagggaggaagaagacatgtatatgaacatggtcctggcacactttttacaggtatgctgacataaattatttcagttttgtttggttaatgttatcacctttaaaaaatttacatagataactttttgcttgtcagatttatctgtacttttcttggttttgtgacttgttaaggtcttctccagatttttctcatatgcttatatgatttttttatatttaactcaaaccatctggcatttattttgtgtaagaagtaagataggaattaaaaaatatttctccagatagcttacaaattgtacagtttgaaataccaccttattaatataccgagttcctctatgcatcaagatctatttctggattattatgttatttgatcttttattttttttctatttgttattatttttttgaaatggagtcttgctctgtcgcccaggctggagtgcagtggcgccatcttgactcagtgcaacctctgcatcctggattcaaacaattttcctgccttagcctctcgagtagctgggctacaggcacacgccaccacgcttgactagtttttgtatttgtagtagagatggggtttcactgtgttggccaggctgacatagtgatctccggacctcaagtgatccgccctcctcggcctcctagagtgctggaattacaggcatgagccactgtgcctggcctattatgttacattgatctttatgtgtatttatgtcctagtactttttacagtaactatatgattcattttaatatcttcatttgaaactgaataaatacatatgcatattcattcacaacacctagccatctttcctttttgtgtttaaatattgtcttcaacacaactaatttgaattagtgattttatgcaacctgtttctctgcttttttaaaaatgtcactcagtgatggcttgttttttattataatagttgcttattaggtattctttggcagtttatgtattaaagtccttactttgtatggtcctgaactatggaatcagcaagatggtaggcatggtacacaagccactcaatttggattcatttctatttatgttgtattttactgggaatctggtttgaaaaaattagtttaaagatgaaatccttgaaaagcaaaatcagagaaggaacaggatatttgggagaggaattgtaggataattttaaattttattaaaggaaagagtttagaagcatacagaataacaaaaataaggaaccaaactcatttcattcataaatttaactggtctactctaaaaatgcttcaggccaggcacagtggctcccacctataatcccaatactttggtagactgagatgggaggatcacttgagcccaggagttcaagaccaccctgggcaacataatgagaccctgtctctacaaaaaataaaaatattaactgtgtgtggatgtgctcacctgtagtccaagctacttgggaggctgaggcaggagaatcgcatgagctgggagattgaggctgcagtgagccatagtcatgccactgtactccagcctgggtgacagagcgagaccctattctcaaaaacaaaataaaataaaaacgcttcagtataaactatactgtatattgtaagggctgtcatagggcaagagtttggaatattgtgaacttttttttaattattcgagttctttatgtggttttatacattttttccccaacttttattatggaaagtttcaaggaaattgaaaagtagggagaactgaatgccataaactcattatgaagacataaccacatcattatcatactttattaaaaaaaatttaactagtgttcaagtttccctgattttcctaagatctaaaacaagatgttgacatttggttgatgtcttttaagtttcttttagtttataggttcctttttaaaattttttccttgcatgtatttgttgggaaaagcagttaatttgtgttatagagttccccacattctggattttgctgattacattcacatggtgtcatttatcatgttctgtccctggtattttctgtaagccagtagtttagagatgtgttcagacttctttgtttaggggaaggaggttctgagggggtgatgcctgcctcttttagatgataaatactatttagatgtcttttttgtgtttctctttttttttatttatattacttagatccattatgtttttagtagtttgcaaaatggtaacattcccttatttcttcataattagctgtaatgtttctttttatattatcttttaataaaggacccaaaatattttgaaagcttttaaaaatcactctgattacatcctaaaatactgtttaactaattttggtttgaccattgcactattgaaacaataatacaagcaaaatcaagacttgttaatagccttgaagttgttcccttcttcccacccaagcaccagaacttacaatgcataataaggtaaatggatatacctctctctgccaaagtccaaaatgtcaaggaaatgagaaagcccggtaatttaatgtatcacttggtattgtatttatcagtgttttagaactagctaaagttttaattaagtcgcagttttggaagaatttaaattttcttttccattacagaaaaacaaagaatatgtgagtattgccagtggaggatttatgggtaagattttgatttattagtttttttcctctatgtttcagaagaaattgtattgattatcaatagagttgatctggagtggtcacattagttaaagggtagactcttcattcattcaatattttcagaaaaggcaaggccaggaggacttacagataacagacaaacgtaataggcaattgaaattggtgactatttgatgtaagactattttaatagatttgtttccaaaaaatatttttgtaaagatgaatgaaaaactgcccatatgattgcctctatggagaagaaggattaaatgatgggacagggaaggaagacttcaaggaatactttttatagtataccctttggactctttaggtgttttgttattttatttttgaactacttgaaggtattctctgtttaaaaaatgttagctaagtggaacaaaataaactgatattttcagaactgcagactaatatttaataatctaggagagtaaaataattggcaggatctctgcaggcaagtattgagaattttactttgcagtaaataagattttaaaagagtaataagattttaaaagagcctgtcttacattagaaaaagagatactacaaaaatactgagctgtaaatgctggggaaaattaatgatcaaatcaaatcaatatgtaagaatcacatgctgaccagttgtgcaactgaagctccaaaaatcaaatcagtatatgttgagggtaatggaatcttaggctttaatcatgggagttaggctgtaacttaggattttgggaacattaggatgtatttcctcctggtcattgttgatattaacaaggattatgattatcttctgtatatcatgacctgataactaatgacttttgaggttcatacccagagtgatgtacaaaaggggttattttaataagtagtgttaaacatgtattggccctaggctcagtgttatttattaggaatcctggtaacgatataaaacttgattattaagcttgtaattctcaaaagtgtctgaaaagcattcttttatagtataacccagattttagaaaattttttaaaaccatgaagtatttctttaccaagaataatctctctttccgtaactgttaatggctaacaatgcttctttattatgggagagattgattgatatctccttatggtataacaaaagtcacaatcggttttctgttatcctttatgtcataaaaatgttgcagaaattatctgttaatacttgaaagatttcctttcaaagaagaaaacgtaaagcctatacagttatcatcacattggcgtcagttaagaaaagttatccgtgtacagagggttttagaaggaagaataggaaggtttgctctagcttggaggcctttactcctttacagacgtgcagaaagaaatacctgtgattatttccttcagtccttttttctcagctgtgacatgtttattgtatttcgttggtaatgaatttttccaaagagtgttgatattttaggtttttcttttttttttaatttatcttaagcactgcagcagcacctggcagacattaatgtggatggaccagaaaatggatatggccattggattgctagtacctcaggctcaaggagcagtatcaattctgttgatgtaagtatatgtagagaatatgttaccggatttggataagttcccagaaaaggtgattaactactaaacccccaccataacagaaatggagtcaaaacatttcaaacacatgcaatgaagagtcatattattgtgagattaatgagatgatacagcaagccattatttattgtgagattaatgaaatgatacagcaagccttcacagttaaactaggtgggagctcttgaagttcagctgctgaattcaaatttctccctgtccagctgtagtttggtatcatgtagtgacagttttatgttccagcttaaatatcaatggggacaaatctgggtcctgtaaatagctgggactcttaagcaagctgattccaggcatctcccagttagtttttgccagaatactagggctcataatcatctcgtgcacactatgtctgtacccatccccatcacagacttaaatgatttggacttgagtctatccacatttgagaattggccaggcagaggaagacaagaacaagttgccaatcctattttatttgatttttagttattgagatgtgtattactacccagttttgctacagtggataaatctgtttttctgttctttggaaatatttgggtaataggtcttttgtgcttttccagtacttcaatatttcatgtcagttgaattagatgtcattaaattattcataaataatggtcctcacatacctagtgattattctttaaaacagaaatagaaggaaaactgcagtacaaggtcacagttagtagcttgggcttacaggtctgacatacctgggttcagatttcatctacaacttactttcttcatgatctccagcaagatctttgagctgtggtttctccacctgtggaatataaatgttaacaacataaccttctttctaaggataacttgagaattaacagtgcaagtaaatggaaagtatagtacctgtcaccagatatttaatagtagttattacgaaattgtaactcactacctgtgttagttgaggtttatcttcagccatgcaaatcaaaatcagattattttcacatcagcagataaggtttgtctgagaatcttatttttaatttgatactcttatttttaacttgatgccattgtgtgaaatcaccattacttagtaaacgtttgctattttcactttaaataactaaataatatttcattttatgggtgtattataatttattcagttctctattgttcaatatttacattgtttccagtttttttctgttacaaacactatttaatttttgtagtgataaatttgcatatgccatgattattttgtcctggaagtggaataacttgattaaaatgttaccaaagtccttagacttctgcattattatcaaatggctctccaaaaaacattctaatttatattcccattcacatcactggatagtttttctattgaagcttttatattcagatttgaaaaacactgattgaggctattttagaaattatcttaaagagcattcttttcaaagtaccaaagaatttttacagtttaatttggctctgaatttagatatggaaatagaaacataattttttttgttgttaatgacatttcttctaaaaatgaaagtaggccgggcacagtggctcacgcctgtaatcccagtactttgggaggctgaggcgggcagatcacgaggtcaggagatcaagaccatcctggataacacggtgaaaccccgtctctactaaaaatacaaaaaaatagccgggcgtggtggcaggcgcctgtagtcccagctgctcgggaggctgaggcaggagaatggtgtgaacccgggaggcggagcttgcagtgagcccacatcccgccactgcactccagtctctgggcgacagaacgagactccgtctcaaaaaaaaaaaaaaatttgaaagtaacagatgttcattttagcatcatatgtaaataagaaaagtataaagaaaataaaatcacctgtagctgttaccagagataattttgccattcatattttaaagtattttcatcaaaccctttttagtgaatgtgtttctttattttaaaagtagtgatcatagcatacctagaattttattttctgctttttcactaaacatatgagcattttctagcattttaaaatgctatttaaaaataatatgagtttgtaatggctgtataattttccatcaaatagtacccaaatttctgggcacttccttctcattaattctaaagaggaattaattggcagaaaataggatcacttttaaatgtttgacacccatcacgaagttgccttctaggaaggtatatatgagcaatcccatgaaacaatttaagaattaatacagccatgcatggtggctcatgcttgtaatcccagcattatgggaatccgaggcagatgaatcacctgaggtcaggagttcaaaaattagccaggtgtggtggtaggtgcctataatcccagctattcaggagactgaggcagggagaattgcttgaacccaggaggcggaggttgcagtgagccaagatcgcaccactgcactccaacctgggcaacagagcaggactctgtctcaaaacaacaacaacaaaaaacacaaaaaagaattatactcgcatctcttacatttggtacatcaggataacttttcttcagaaaataaaggcctaagtggcaatgtctttaaaaagcaaacatttacaagggatatttaaaaatgtagctgcatggatagtagtttgattatacttttgcttatttttgaagactagtctgagataagaaaggttaatagttttaactatttcttattgaataaataaggtaatttcaggctccacactcacatatgtgcaaatagtagtttgatcatacttttgcttatttttgtagactagtctgagataagaaaggtcagtagttttaactgtttcttatataataaaaaagataatgtcagactccacgcacatatatgtgcaagtatatcctaaattttttattctaccttctttttttttttttttttttgagacagcgtctcgctctgtcgcgcagactggagtgcagtggtacaatctcagcacactgcaacctccacctcacaggttcaagcagttctctgccacagcctcccgagtagctgggattacaagcacccatcaccacgcccggctaatttttgtacttttagtagagatggggtttcaccatgttggccagtctggtcttgaactcctgacctcatgatccacctgcctcggcctcccaaagtactgggattacaggcgtgagccaccgcgcccagcatctaccttctattcttaaaatgatttcacctaatgaattagtttgcagctgccgcaacaaaatatcatactacaaactgggggcttaaccaatgtaaatttattttcttactgttctggaggctaaaagtccaagatgaaagtattggcaggtttagtttatcctgaggcctctctccttggcttgcagatggatgccttgccttgtgtgtccttacatggcttctctgttttcatgtgctcatgtctttctctcttataaggacaccagtcagactggattagagaccacctgaagacctcatttaaccttaattatgcctgtagaggccttgtctccaaatacagtcacattctgagatatactgggagttaggacttcaacatatgattttggtgggattgcaattcagtctataacatgtagataaccattagcagtagtatgtcttttagtcattcagaggcagttaatccattatgttctttttttagggtgaatctcctaatggctcaagtgatagaggaatgaaatcactagtaaataaaatgactgtggctttgaagacaaaatccgttaatgtcagggaaaaagttatcagttttatagagaatacatcaactcctgtggatcggtgagttgtttatacagtatgagtttatgatgagtaattaaaactaaagaaacaatgtcttagagtaagtaaatgttagttgaatttaatgtgttccagaaaaggattataaagtatattttctattagatgatttcatagttttcattagaattgcaggaatgtactttatatccataattattctctcttactactcaaagatgcaaataatgtatctgtcacatcatgccattcactaaaagaaatttatgtcccagtatgtatcacatttcatatagtagctgcttcccaaatgtcaaatggatggagaatcatctgccgaattcagtgatctcatagtaggaacttcttcttctgctccaagattttaaaacctagaaaatctggtcatgctaaatatagcagaaacccaccttctgatgtttaagatcagaccttcatagaatttcgtttacaaaaccccatttccttgtaaattacaaatgagggacatggttaacaatttagaaataagtttaaaaatatctgttatatatattgtttcttattgtaactgaggatacatttttttctccacgtataagtctgtttgatctttcttgttcctagagttcaaagctaaccttataattgcaacacagaatttgttttaaggaagcctcatattggaaatgtgttatagtatttggtttcactttcatgtcttgcagtatcctgggaaaactgacatattttactttaagaattgaatgtcagggatttgttgtctgtccctttattaagtatagtatatatgcatacaaaagcacatttttctgcatttagtaaatagccgagaaggtaatagattattttcattgatccaaaacattgtaccttatctaaaatggtcaactgataattactaaggtgttttatcaagcctgaaagacttgtttatgcagtaaagttatgtcttctcaaaagctaacccttttaccttttgttggtgcttctgagttggaggactattattgctacattttgtagcatgaacatttacaattttattttaaaatttatttgttttaaaatgtactggtgataactaagtcaaaaagactgctgccttgattagttgaaattggcttttctttgtttttctttgtacttgggatgatggaaacatcttctttataatgtacactctgggtgagaaaaactaaactgtaccatattttttgttttaaagctgttgcattttttttataatcattttgttctgtcctctgccttgatttgctatagaatgtctttcaatcttccttggccagacagatcatgtacagagcggtaagccaatgagtagagcatttttcttgaaccatccttttcctttaatatgcttcatgccatctataagcctcatgctgtcttggctcaaatttcatgcagctatttcaaatgctaaactttcctcattctgctttttaggagtgtgtcatgtttattgatacacttttctttttgttttttgcttgatcattttaatttcttttcctgcatgcttgtttgtatcacccattccacagatgaaaattaagtttgttcaaaacctgcagtttttattctgagacaggggaaggtgaaacaaagaaagtatgtggtcgcgagttggcaggttatctgctttggtgctcatttgcttctatctcccgcctagcagcagagaaaattatagcacctaaaaataggcaccgttcatggttcaaaatttttgttaatttgtgtacattatgtaattttatatttttagatttttcttaataagatgtatgtatataggttgagttagcatatataaatctcttccaagaaactacagttctagggttctgcctttggtttttgttgaaaaaaaattacatttttttctaggtagttgattactttaatgtataatctgtcacttctctaacccaaataaaacgaggtgcttctcattaaagacaataagtttaaggtttaaaaatctactggatcttcaattagggtaacaaaagaactttactaacttaactctgtgtgactttacagttcttatactcacagaatttttcagcaatttaatttagaatatcaattacagcaacacctacaaacatttaaaaagaaattctataaatcctaagtgggccagaaaaaaaaataaattctagtcatattttcaatgtaagttaagctttggaataatggaatggaatttttctcgggtcacttcagtattctcagtgacttgaagtagcatttttaagaataatacttcactctctaagactatactttcagccgggcgcaatggctcacacctgtaatcccagcactttgggagttggaggtgggcggatcacgaggtcaggaggttgagaccatcctggctaacatagtgaaaccccgtctctacagagtgagactgcgtctcaaaaaataataataataataataatataataataatagttcaccctctaataacttatcttctaagagttttgatttattgtgactatgcctacacaacgccaattacaggacttctgctaataattttacctagcactactttaaaggaaattgcttgttttaaaattacaatctatttgtgaatcatcctttccattttcttctgttacaggaccattgaattagtctaatttttttcaactcccaagttctcaaattattaatttttgtaacttaaatcatctctgatccacaggtagatatatttgttttgaaaagagaatctaatgagaagttagaatgaattaggtttctttctaagctcagtaaattaaagcctactcaaaccatactatagatgtttctactattaccatggcaaaaaaagtatagatattgtgctttaaaaaatagtacagctgttgaattttattcatttttagccagtctttcaagaaatgtctcaataatccttagcattcatgtttataaaaaatttgcattgtattataaatcttgattaacaattaataatttgttttttaggattatctctttactcatactttctggttatttggttatctggttacagcaaatgcttattcgctgtaaacatttatctttgttactttttatgttatggcagtttaattgtgcttaatattaggagaaaacttataatctaatctatataaaattttacaatctagatggcatcaaagcatttttagataaagctcttacctctgtctttgctttttgtaagaaagctgaatctgagtttcaaaggcatccaaattatatcattttctatctctcatgagcatagtttggtaatttacaggacaattttgtattagatatattttaacataaaaccaaatgattatgtcacttgtaatttaatcagactttaagcctatgtattgattaacctaacttgtaatttccaaagaatatttgttatacactaaactctcattatatttattgaggaatgttattttggaagaagtaaatcaacaaaattaggctacaaaatttttttttttttttttttttttttgtgaccgagtcttgctctgttgcccaagctggagtgcagtggcgcaatctcggctcactgcaacctgtgcctcctgggttcaagtgattctcctgtctcgccctcccaagtagctgggactacaggtgcgtgccaccacacccagctgatttttaaattttagtagagacggggtttcaccatgttagccaggatagtctcgatctcctgacctcgtgatctgcccacctcggatctttcggcctcccaaagtgctgggattacaagcgtgagccactgtaaccggcacaaaaaaaatttttattgatagtgtgtaaagtatagatttgatctctatcttctgggaaatttgaattctaaacctaagtaaaggccaagtgtggtggttcacacctgtaatctcagcactgggaggctgaggtgggaggatcacgggtccaagagttcaagaccattctgtgcagcatagcaagatcctgtctctgaaaaaataaaaaaattaggcaggcgtagtggcacacccccgtggtcccacactgtggtcccagctacatgggaggctgaggcagaaggattgctccagcccaagaattcgaggctgcagtgagctaagattgcgccactgtactctagcctgggtgacggagtgagaccctggctctaaaatactactactactactaataactaaaggcatgtaacttgattttttctcacattggaatagctcttgaaaatagaagattttgagtgttttcatgttacatgcacacacccaaaaaagctagagtcttcctttgtagtaggtaattttagctgaaccttatcctacaagtaaaacaatgcttttcccctcagaaacatgtagtattttattgacacattttaattttacctgttagtttatttgggattacctgaaaattaataggatattaatttttatattccaaagaaaggtcacacttcctatagacctaatcaagtttgagtttacatgttatttatgcctctgccttttgaaaaagaggcagattctttttttttttttttttttttttttgaaatggagtttcactcttgttgtccaggatggagtgcaatggcgctatcttggcttaccgcaacctctgcctcccgggttcaagtggttctcccgcctcagcctccagagtagctggaattacaggcatgcgccaccatgcccagccaattttgtatttttagtagagacggagtttctccacgttggtcaggctggtcttgaactcccgacctcaggtgatccacctacctcggcctcccaaagtgctgggattacaggagtgagccaccgcgcccggccgaggcagattcatttttatggcttatatttacacaacaaaagtagaatcttcatttctattgaaacaaaagtaacagtaataaaaaaatgtgaagataacccttaagacacctgcacttatatgagaagccttaaccaatcatattggaatttgaatatttggtgttagtaacttattttacctaacagacatgaaggtagcaccaggcattgtcctaatagttttacaataaaattgactgatttagttcttactataaccctgacaggtagatattgttagcactattttacagaggaggaatcagaaacacaaaaggctaaataacttccgcaaggccaaacagatctaagcattggttttaatatggatattgaaattgtttaaaatttaatttttacatatttaagagcattcagcctaccaaggccttatgccacttttgctaacataatttctttatcttcttttaatttccttaacatagctctcctaaaactatgggtagtacatggggttttgggggggtcaggtaaggaataattacattttgtgtgaatattcaaatgatgcttggtaaaaatctttgataacttcttaagtgattatttctctcctaaaattctttgaatataggcatgtgagcagcagtgacagagtgggcaagccttaccgtggcgtaaagcctgttttcagcattggggatgaagaagaatacgacacaggtgtagtaatacacttagctacagacagctttgctgtcattaggagtgattacagcagtcattctgggaatagccaatcaactgcttttttaaaaaaatgagattctgtagaaataattggagaatctgtggctttctattaagagtttggttttagacaccttgaattgttgtacgtattagaaatccaagcaccaacatggcacatgtatacatatgtaacaaacctgcatgttgtgcgcatgtaccctaaaacttaaagtataataataataaaattttaaaaaaaaggaatccaagcagaaatgttgagtagaggcagttgattataggtgtcttcagctaaggagagaggtttaaactgatgataatttggaggctatcagtgtggaaatagtatttaaatccaagtgatgggattgaaatccctttgatcagattgaaattcctttgatcagccacctaggagattgagagttgtgggactaaagcactgaaaattacaaaattgagacatctgaagtcttgaaactggaggcaatatcctaaagggccacaagatggtgatactgtgtcagggaagtttatcttctctgtggttatgttttaaaaaaaataatttaggccgggcgcggtggttcacgctgtaatcccagcactttgggaggctgaggcgggcggatcacttgaggtcaggagttcaagaccaacatgatgaaactgtgtctctactaaaagtacaaaaattagctgggcatgggagtgcatgcccataatcccagctaattgggaagctgaggcaagagaatcgctttaacccaggaggcggaggtgcagtgagccaagatcatgctactacattccagcctaggtgacacagcaagactctgtctcaaaaaaaaaaaaaaaaatttagtctttggtttataattctactgtccagcttatcctaattaagcaatcataactaatattggttaatatgtgtattgagttaggtaagcagtcataactaatattggttaatatgtgtactgagttagggaaaaaatatataaatgtacagaatgagaaaaaaagactcccaaatctcaccttgctttttccagttagtaataaatacatgttgcatattttccatttcagctcatgtatctcctcattctccttctatcatataaacataccatactttatttagtcagtcttccagttgacactggtggttttccaggttttttgtttgtttcaaatgacactggatctttatataaagatatatatgtagattagcttctgatgacagtatattcagagggtaaattctgctaagaattttaaattttaaatcttactgctaagtaagattgctaggttatagggaatcacatttgacattttaatagatacatgaaatcacttttcagaaaacttgcagagaggtaaatgtgatatttctgcttgtttccttttcttcttttttcccctctctgttgccatctctttctgttaactctctgaatatctcaacttcttccattaacaaaggggagaggcaaatggatgaataaattgtgtcatatttacatttatcatgtatctacacacacatatttacaatatggaaaattggaccataatgaaagtgagaaaactgaaactatgtgtatcagtatgtatgaatttcagatgttgggagtagggtagcagttgtggaagaatgcagttgagtagtctactttttatatacatttatatacatttaagtgtatatatacatttatatacatttaagtatagaatactactgtatattatttagggatatgcatatatgttaaagcaaagacatgtatggaactgataacaccaaattcagataattagtatttcttggtggggaagggaggagaatgtgagtaggaggagatacatgagagtttcacttttgtttaagctggtgtagataacgtgcgatttcctttttcattatgtctctatattttgcagtatttgttagaaagcaaaggacagaacctgtaattatttaccttagagactgtattatccctttcttaaattagaaaatataattattttatatttctcttagggaaaataaccttaaatttttacttatttatctcaggattgattttattattttccttaaaatcaaaaaagcagcaagataaaacgaaatctgccatctttactctcaagataggtgcctattgtttaacaattcagccatctctttacagactagtcagatcatagttaagttatgcatatcaaaacaattgaaataccccaaatggtttaatctttaaaagtgtattcttaatatttaaacctgactttgttaccatatgaaagtgatgtttgataataatatttctatattatcagtggcataaggaaatagagtagcaggattagaattgattgcgttattctttttttttttttttcttttttttgagacagtctcattctgttgcccaagctggagtgcagtggcgcaatctcagctcactgcaacctccacctcctgggttcaagcgattctcatgcctcagcctcccgagtatttgagattacaggtgtgcaccaccacacccagctaattttttgtattttttagtagagatggggtttcaccatgttgcccaggctggtctccaactcctgccctcaggtgatctgcctgcctcagcctcccaaagtgctgtgattgcaggcgtgagtcactgtgcccaggctgtttgtttttcaatccatatcttcaaaatactactgaaatttttttagactgttagggaatgtatcattttaaaagttggtaatatccatatttaatactttgtattttttatagatgaaattgacagttcttcaatgtcagatgatgatagaaaagaggttgtaaacattcagacttggataaacaaaccagatgtcaaacatcattttccttgtaaagaagtaaaagaaagtggacacatgtttcccaggtacttttaaaaatgtcttcataagaagtaaaattgaatttggggaagttaataatacaaaactgaactacagaagaacctttatttatcctagtacaataagatataattcccttctgtctacttgtattacaggtcttgaatttacagtattatgtaatttttattttgaaaaattttatacaaaaatgttgaaggaatagtacattgaacacccttatgattctttttttttctttttgagacggagttttgctcttgttgcccaggctggagtgtagtggcacgatctctgctcacagcaacctctgcctcccaggttcaagtgattctcctgcctcagcctccagagtagctgggattacaggcatgcgccaccacccccggctaattttgtatttttagtagagacggggtttctctatgttggtcaggctggtctcgaactccggacctcaggtgatccgcccacctcggcctcccaaagtgctgggattacaggtgtgagccaccgtggccggccatgattcttagatttatcaactgttaccaccttttaataccaccccatttcgtatgtatatatatatacatatgcatgtatatgtacatttttgtcaaacctttcaaaagaagtctacaaatgtgacacttcatccctaaatgcttcagcataaacttcccaagtatatgagcattctcctgcacaacttcaatgccattaccccacctaaaaatttttgtaaattaacatcatttaacatacagatcataccccaaattttcagtgtccccaaagtatcttttgtagtgtgttttttctttggtgatccatgatccagttcatggtttacacattgcattgtctgttatgtgtctttagtctcaccctgtgtacagcagaactcatccccccaccccctcgcttcccttttctcttcatgatgaatgaatcctttgagtccaggtcaatcatcctacagaatgttccacattctgcacttgtctgataactgtcgtattgtattactgtacataaaaaatgtgagagtattatattaaaaagaagctgagatacaggggttgggtgagtgttaataatactatgctcattttgccttcaggatccagttacagaatgtttacaaaatatgtagggaaacccaacaattgcctagtgatcttggatattagatataggatatggtgcattgaatgagaatagtttatgaatataggtaatagcgttaaaaaatctgaaacgtaatatactccatttcaataaaaaatatattattgtagtgatttctatgttgtatggaactttttattatatttattatattttcaatcattgcaggattatctgttaataaaatattaattttgcatacaattaaaaggtgttaatgtgtagcttacttgtttatagattaacctctgtttatatcttttaactcaattttatttagagttgaacatttctaataattgagatggttgaaacaacacctgttttgaattaaatttacttaaaaattctttttcttttaatgctttttttgtctcaagtcatctgttggttactgcaacacatatgtactgtttaagggagattgtttcacggaaaggattggcttatatacagtctcgacaagcgctgaattctgtagttaaaattacatccaaaaaaaaacatcctgaactcattaccttcaagtatggaaatagcagtgcttcaggaatagaaatcttggcaatcgaaaggtaagattttccttaagataatattatctgaattcagatattatctgaattactgtagttcactataaagagtttgtttctttattttggggaatggatggtggaataggatagctgaaccacttttagtgtttcttatctctttctccggagtccttagtcatgtgtggtttagccattagcacatgatttgagtaagtgccatagctaatttcataaagtttctgacccaaggatccttattgttaatctgtaccagtgctgcactaattgctggcttgcagagaaataagaaacttgttttagaatatgttgatatttttattttccttcatcgaaaaattcttgttttgacaaactgtcagtgaactaagcagtgtgctgggtgatataggtaatttacagcctggtacaagcccccctttgtctcattgtgggtcactaacagttcacagactggcccaagagctgtggaccacactgatattgatactaaaccattttttaattatagataaaaatatgaagcccagaggggtggaatgacttcccagatcctaacacttagtttgtgacagaaccaaatatagccttcctgactcctgatttgtggtttattataccttgcatcagttcaagttgttcccccactgggatttaggattacacttattatttacaggagtgcttggataaatagtaagcttaaggttatatcgcagcacttttaaataatcaacttcagttggaagaggaaattattcagcttctttcatcttgtactgacaattaggtagcaaacatcatgaatctatactgttttatgtaatttgttaaaagaaaataatacctgatttgtaaaaaaaaaaaaaatcacttcattgctttatgtaagaataaatatttacatagtgatattttcaattaataatataaagaatatgtcattctaattctctgttaacacattgatgtgtatcttctcagattttttttaatgcatatgttatttctctactaaaaactagataaatgtgatataggcttgtttttgtgttctgattttttaagaaaatagtatagtgtgaatatacttacattttaataaatataaattttttaaaattaattaattaatttttttgagacggagtctctgtcactcaggctagagtgcagtgttgcaatcacggctcactgtaagctccgcctcccaggttcacaccattctccctgcctcagcctaccgagtagctgggactagaggcgcccgccaccatgcccagctaatttttttatttttagtagagatggggtttcaccgtgttagccaggatggtctccatctcctgacctcgtgatccacccaccttggcctcccaaagtgctgagattacaggagtgagccaccgtgcccggcccaataaatataaattcttagctttttaatggtagatattctgttataaggatttctcaggagattgatttaacaagcctcatgttgattggcatttacattgttttcatgtgtttcactattaatcttctagtgggcctttaaaaacatgtatgtttacatagttgtccaattagtcttctcaggataaattcctgcaagtagattcaatgggtgagaggtatacacattttaatatctacttataaattaatcctaaccaaaggagatttgaattatgactctctcatgtatagtaaaagttgggaattgtgttttaaaggctttcccacaaattttgctaaataaattgaagtttattatatatggatcaacatctttttttttttaattcagagttttggaagatagtcttaatagtggaagataaagtaactagattctctctctccctttcttcattgatatttatggttctctattctgcctcgcatataacactcatagatgatttatacagtggaattgttaggttttaccgaagatgcttttttaaaaaaataccactatttttattctccaagaaaagaaaattgacatttaatctatggtgttgatattttgcaatagttatcataagtcttatcttttttaaatatttcagacctcataacgccattttattatgtacataaccctctgtaaagtttggataactatagctactttttatataggaatctgttttagtgaacttaaattatttgcttaaagtcaaactattaagtgttggaattgtcattgtctttggaattggataccaacaattcatgtgtgatttttgtagctaattgaaggtacatctgtattggggagtggaatattatattttttatcttgtgttttatctagctattacctatatttaataatggttcaaagaattttagctttacactatatgaaaaatcacattgcctttgcatttagattttctttcgaaataagctttggattatgttcaaataagctatgggagtacataggaggcatctctgctggctttgtgggttagggaaagcttcccattggaggtgacctatcagctgagtcttgaagggaaagcactgtatttttatatacatatacatatgtatatatatatgtatatatatgtattttttttcccccttaggtatttgattccaaatgcaggggatgcaactaaagccataaaacagcagatcatgaaagttttggatgctttggaaagttaatataaaagaaaattatataaaaagaaattaagacaaccaagagaaacatggacatatacctcctgactgaatactaactggagacctttcatttgctcatggggctgcttaaatagcaggtctaagaaagtgtaaattattataatcaatctgtggacagtaaactttttaaaaatttttcttctgcattttggttttataaaatgatgtattataaaggtcagttattaaattactttgaagtaactgaccctgtgcccttatggactaagtaagggtacagaatgcagttctgttttgaagagctgttttaagggaacatgcatcactttcgggatcaaaaacaactgtacacatacatatctgcagtgtcttcactgaaaattagagatagaattagttgaagagacttccttaattgctacattgttttactcactgagcaatatcagaaactaaaacatagattaataattcactcactgtttctattcttcttaaaaagagtgaaatctttttaatggaatggttgaagattcctgccaactcaaaatacagtacagctagtaaaatgttgaaacatcagtttctaaatcacctttgctccattagctaattttttggacactaaatgcttcaaagataagaaacttcatcctaatgatttctaaagagcagttaaaagcattaaaataagtaggtaggctgttaagattaaaattaacattttggggacagaattgtgtctgtaaaaatgtcattggttttattacaagcggattattttattcatattttaaaacaaatgtttaagccacattgatttatcctcattgaggattatggtctgtgaccacagtaatatccacttatataaatgccaaataatcagagagcttataaagtacaattgtttttgtcatcattttctgaatttctttctcttcttttggttttgtcctctcattgaagttccagtggtttgaaattagttttggacacattgtcttaatgtactgaaaattgctctgctgtattttgcagcgttcttcatttaatttataatggtccatattagacacatttggtaagagaagtccaggaacacatttagggccatggaatagtattttgtaaaatccatttgggaagttgcaatacccacaatctgacatgtcctaaaatgtaagggattatctctaaggggttgatgggagaaatatttagatgtaccctgttaacagccagtcattttgatttacttatggaaatcaagtgaataaaaggcaacataatttgggaaattttattctaatatctaataaaaacagtttgagtggttgaagacatctgcatgaaattgcacctaggtgcattacttgatataactctcccctaaaactgttgtaattgcattttttcccttttcttggcacccctttagaaatgtactgaagtctcatttttcacccatttcagccatgggacatttttcataatattaatgtaaagatgtttgtgttactgtttataaattacaattgtaaataaattactagtttgcccaaaactttgttcttaaag

SEQ ID NO: 1556 - DNA, 414 bp, Homo sapiens
gaaggcatgtagtaagttacctactaccatgaactacacagttacaggattatttatgactattaaatgaaaatacatttcattgactgttctaggcacttgtgtagatcatcctcccttcactggcccactgaccacagagctgggaatcactctggggtggccacctctcatgggctcttgtgattgcaaaggttgcaactttaggaggttgttttttgtattttcaagataaggaaaccaaggctcaaagaaattgagtgaaaagagaaagtattcctcttatctccacactccttggaaattatttttgtctgtgaaggtatacaattatttctcctatataggattgatgccatttgcccaccattaataaaacttggtcagtatgataaatttgtattgacatactca

SEQ ID NO: 1557 - DNA, 1290 bp, Homo sapiens
gccagagcccagaagctgggactacagttaggagggctgctggcagggctgtgccaagaaggacatgggcactgctggcgatgtccctgaagcaagacgggagaagacgctggctttaccaccagtgtctcctgttggccatgttgaccaggaaccaggagtgaggggcggggggcctctatgagacagtgcagggcactgatgagtgtggctgagctgtcactcacctggccagcccttgaggacagctggggctcctcacggcaggctgtgttgagaaggcatgccagctgcctggtgttttgtggacctagtaacacgtggccttcatttatcccaggagctggatggcccattctagactggctttctgataggttttaggtctttggacatgtataagacagaaccccaagcccatccagcctggtgagggtggggccgtgacgggcccacgcctgggggggcctcagacatgagcaagaaggggcctgcgctggggtgagagggtgtgccactgtgtgtggccctggtttttaaatctctttgttccttgggacttttccttagtctggccacaatgcacaacacagcctggagtcagctcacagtgggaccctttctcaccctcacgtgcattttggaagctctggaggccatcccaaccccttctcccatttgcctgtcaaatcatccactaatatgcccatgtccggaaaccattcactgattctgtgccaagccggaggctcaatgatgatgagccccatgtgcgcagggagcccctagcatggggcctggcactcaataaatatgagtggaatgaacggatgaataggtgatgcccgcccttggggagctcattggagcagaagaaatggaaaataattatcattcaggccgggctcagtgactcacgcctgtcattccagcactttgggaggtctgggtgggcggatcgcttgaggtcaggagttcaagaccagcctggccaacatggtgaaatcccatctctactaaaaatgcaaaaattggccgggcgcagtggctcacatctgtaatcctagcactttgggaggccaaggctggtggattacgaggtcaggaattcaagaccagcctggctaagatggtgaaaccctgtctctatttacaaaaattagccgggcgtggtggtgggcgcctgtaatcacagctatccgggaggctgaggcagggaggcggaggttgcagtgagccgagatcatgccactgcactccagcctgagtgacagagtgagactccatctc

SEQ ID NO: 1558 - DNA, 9914 bp, Homo sapiens
cgcgaggaggcggaaggagcagaggaccggcagccggcgtcgaggcggggcgcgggaacgacggcggccatggcggcctcggggcccgggtgtcgcagctggtgcttgtgtcccgaggtgccatccgccaccttcttcactgcgctgctctcgctgctggtttccgggcctcgcctgttcctgctgcagcagcccctggcgccctcgggcctcacgctgaagtccgaggcccttcgcaactggcaaggtgagcaggggcgggccgggatcgcggggcgagtccttgtcctccgactttgccggttcctgggctctagcctccgggactcgccccttcaggcctcaccgccagtctccccctgtctcggtcctcatcaccatgcccgccccccggaggaccgacctccagcaccgtctcttgctctccgtgttccacacctttgtctgcagaccccatcttcgtcatcactgtaatcccttccctacccgaatttgttcccttccctgtcgccaccagactggttaaggccccaaatccattcgctagcaaatccatgctcgctctccaagggtaaagatttttcgtctccccctcccatttcacatacacacctacgtctgctttaggcctaagccccactgaaaaacgtttttctctcacctacatcacgacaattggactttatccacaaacccctataagccctataaacgtcctgccctcttgagatttggaatttcttctgctttttcatctgtatcttaatcttgactgccattcccagctcatgggggtaccagggtgtcttctgcctttggagagaagtgtttgtttttctctaggggagagaaattttgcagaccaattaagtataaacatccattcctgaaagacattcctagtctccgtgtcttcctcattttctcgagaggaacacaggaaatttgcatatctcctgctgttttgcaaagcacacacactgatatgtattaatttcgtttaaccctcacaaggatcccatgacgtaggacctgttattggcccgttatctagataagattgaggtttcatgcagagaatcgcagagctgttgcgtcatgcaattgagataggaatctatatttttttttttattctgtgatgttttggaactagagccttcgggtagataatctccaaatcatgtacagttgcttctagaatcttttcatgtttatacttggaatttcagttttggaaatactcaacaaataatgaagtactcttcagataatgaagcctctggtgatggccagactgaggtatatggttccatagcctgcttccccactccaatctaaaactgttccccccaccctaggtatacatagcaccacctcacagacagaagcaaaatgccaacctaaccttaacctcccactttctggggttcactgcttccctgggtgtgggtttcgtggatatgtgagcgttagagacgtaagggacctttgaagtcctcaatctaactcttgttactttacagtgaggaaactgacgcctagaggacctgtgacatgattaaactcagccagcctggatgtaatagagccaagattccactccaagtctttagactcccaagtccaatattaccatcagttctttggtctctctccttgagtttagtcgtatttgggcatgcagggacataaaaatacttaagagataaccacttctaaaatttttttagagatagggtcttcgtcttacccaggctggagtgcagagatgcaatcatagctcactgcagcgttcaactcctggaatcaagcgagcctcctgcctcagcctcccaagtagctgggactacaagtacacatcatcacacctgactaatttttaaattttttttaaagacgggggtctcactatgttacctaggctggtcttgaactcctgggctcaagtgatccttccacctaagcctcccaaaatgctgggattacaggtgtgagccaccatgcctggcgataactgcttttagaaaaataaaaggccaggaatgatggttcgtatgtgtagtttcagcactttgggaattcaaggcaggaggatcactggaggccaggagttcaaggctagcctgggcaacgtagcaagactttgtctctacaaataaaaatttaaaaaaaggaaaaggaggattctttgatgtcttattacatataaagcatcagtttacctgtgagatcggataagcactttctgaggagacttataatttctataatctttattgttaatgatagtgttataattcttacagctgcaaaataattcatggtcccttttttcttcctctgaacagccactatggaaggaggggtcaggattacagcagaggagactggcacacagagtgttaagtgacacccactcaatccaccccgaagctgttacacttaattaaccctcaaactgcccagtgaggtaggtcagtatgaaaacctgaaaaaggattataaagcactttacaaattcagagactgccctctaccgaaaagtattatttttttccctctggaagtcagttaccgctaagagttgcaccaggcctggggaagtgtagggattagatattcatgcctctcctttgaggctctgggtccttcattgttgaacgcactgcttgtattgcctcctgctgcgactcactggctctcacttctctgtcacggaggggggctctctgcctttcctaggcggcttataacctggcttccctcctgggagcaacccgccgccaggcctctaacccgactccctctgcagtttacaggctggtaacctacatctttgtctacgagaatcccatctccctgctctgcggcgctatcatcatctggcgctttgctggcaatttcgagagaaccgtgggcaccgtccgccactgcttcttcaccgtgatcttcgccatcttctccgctatcatcttcctgtcattcgaggctgtgtcatcactgtcaaagctgggggaagtggaggatgccagaggtttcaccccagtggcctttgccatgctgggagtcaccaccgtccgttctcggatgaggcgggccctggtgtttggcatggttgtgccctcagtcctggttccgtggctcctgctgggtgcctcgtggctcattccccagacctctttcctcagtaatgtctgcgggctgtccatcgggctggcctgtatccttcctagcagagagctatagaacaacgcatgtcaaagggtgaaccaggctggagggtctggggtgtcaagtagataaaattgggcttactttgtattttttcgaaacagagtctctgtcacccaggctggagtgcagtggcaggatctcaactcactgcaacctctgcctcctgggctcaagcaatcctgcctcagccccctgagtagctgggactacaggtgtgcaccactacacccggctaatttttatattttctttttagtagacacagggtttcaccatgttgcccaggctggtcttgaactcctggtctcaggtgatctacccaccgtggcctcccaaagtgctaggattacaggtgtgagccaccgtggccgagtcatatctgatcataatttttttttactttttttttcatatctggtaattttttattttatgctagacactgaatgctgtattaggggctctagattttgttgttttcctttaaaaaatgttgacttttgttctgataggcggttaacttacttgaagattggcttgaaacttgaggtttgtttctaagctcttttcgggagagtctagcatagcctttattcaaaggctgaatctttgtggctgcctaatcagtggtgggtgacttaggtcagacgaccaggataccaccaagttgctggggatggtgacagggtatggaggaagcacagccagagaggcccacatgaagctcacatggtcgcactgaggcaggtgccctctatttgagataaaaggacgaggtgttagtccctcaggatgatactggtacagcctcctgccttatcctgctacaccagcagaggcatgtcctggcttctgactgactgcagtggctagaagggtgcaagtggtggcacacatgggtgtaggagaagggacagcattaataccccctgctgctgggcgcattcattcccggtgaggcacagtgagtagaaacctttggctctggggtcaggcgcagtggctcacgcctgtaatactagcactttgggaggctgaggcaggcagatcacgaggtcaggagtttaagaccagcctagccaatatggtgaaacactgtctctactgaaaatacaaaaattagctgggtgtggtgacgggcacctgtagtcccagctactctggaggctgaggcaggagaatggtgtgatctgggaggcggagcttgcagtgagccaagatcacaccactgcactccagcctgggctgctagagtgagactccatctcaaaaaaaaaaacaaacctttggctctgggtttcccctgagctgcaaactccagccagagtgtgcagcgtgctaagcatgaaggcttctgtagagtgagtgggaacctgtgttctccccggggagtgttcggccctcctccctttgctgcctccagtttcacttaacacgccaacctcagatggcctcacctactgctattccatcgacctctcagagcgagtggcactgaagctcgatcagaccttccccttcagcctgatgaggaggatatccgtgttcaagtacgtctcagggtcttcagccgagaggagggcagcccagagccggaagtaagtgacagaactcttaagtgctgttaaatcttttttaaaaaaaaaattattttttttttttgagacggagtctcactctgtcacccaggctgtagtgcagtggcacaatctcggctcactgcaacctctgcttcaggttcaagtgattcttctgcctcagtctcctcagtgtctgggattacaggtgcccaccactacatccagctaatttttttgtatttttagtagagatggggtttcaccatgttggccaggctggtctcgaactcctgaccttgtgatttacctgcctcggcctcccaaagtgctgggattacaggcgtgagccactgcccccggccaaatgctgtcaaatcttattctgtttttttattcttttttttatttgaggacagggtcttgccctgttgcccaggctggattgcagtggtatgatcatagcccgctacagcctcacactcgtggactcaagtgatcctcccacctcagcctcccaagtaactgagactacaggcacataccatcatgcctagctaacttaaattttttgtagggacagggtctccactgtgttaccaaggctggtctcaaactcctggtctcaatccatccttccttgatttctcaaagtactgggattacaggtgtgagccactgagcctggcctaaccttattattaaagcaactccagggcatgcagagggtgtggctggtttattgccgtaagtgataaagaaatgaggtgcggcagattggaaaataatgcacagatgtcttctgagcattctggattctgcacaactgcttctgaagtagcaacagcaggaaagggaaggcatttgaggacacttaacatgtgatcctgagtgacttgtagataggctgggcaggagggcccccatctaattgacattagacacatacctgctgcaggtcagcctgggctgtgacacacaatagcctcgataagtgcagatagggctgggtgcgatggctcacgcctgtaatcccagcactttgggaggccaaggtgggcagatcatataaggtcaggaatttgagacgagcctggccaacgtgatgaaaccccatctctgctaaaaatacaaaaattatccaagcgtggtggtggttgcctgtaatcccagctactcaggaggctgaggcaggagaatcactcgaacctgggaggtggaggttgcagtgcaccgagatcacaccacagcactccagcctggttgacagagcaagacactgtctcccaagaaaaaaaaaaaaaaaaaggtgcagacagtccacacagccaactaggctgcttaggaggtggcccagcccaggttttctggtgaggtttactgttttccagttggctgattaactcacagatggaaagtgctggtaagccgccagagcttgtgtggcctggctgcttcattttatagaggaggcccaaagaagacaagggtctttctcacccactctgtttccaggtaacagagtcaggagaggggccatctggaagcacgtcccctgcttaggaggccacctccctccctctcccctgttcccagtgcctcctgcctctgagttctccgctggtttctgtccatgctgagacctcacagtgtaggattttttctttccttcagtggtcctccccccaaaaaaggagctcgctgggaaaggcgtgttcatccattttgtattgctataaagaaatacctgagcctgggtcatttataagaaaagaggtttatttggctcatggcttcgtaggctacactaggatcatggcaccggcctcaggcagcttccaatcatagggcaaggggaggcggcaccacacattgagagagggagggaggtgctgggctcttaaacacccagctcttacctaaactcagagggagaactcattactacggggaagaagccaagccactcacgcaaggtctgcccccgtgacccagacgcctcccactgagctccacctctagtgctggaacactgggaatcacgtttctttttttttgaaatggagtctcactctgtggcccaggctggagtgcagtggcgtgatctcagctcactgcaacctccacctcctgggttcaagtgattctcctgtctcagcctcccaagtacttggaattataggcgcgtgccactatacccggctaaagatccatttcagcacatgatttggagcagaggaaacatccaaagtgtatcagaaggcaaggtgcttggtccttggccctttttggcccgccaccagctgtggagtaaattttcccctgcacgctggcctggatgtggggtttttgttgaataggaagctgcccttagagcttcttccaagaggtgctcccagctgtcaacagctcagagcccttggactatttttctaaaaggccaggagggctgctgggaaaacagaaatgcggactcaccgcattattgcttcaggcaagtaattcctggggtctcaatgtgggggagactgtacatttaggactaggtgttttgtgggttttagttgttctcattgaatctggagaactgtctgtcaccaaggaatcccctctgtaatagctgatggtggtctccagctgtatctcacatacaagagctcactctccaagactggccctgatgagaaagttcttccatgctgaagggccgggcgcggtggctcacacctgtaatcccagcactttgggaggctgatgcgggtggatcacgagatcaggagatcgagaccatcctggctaacacggtgaaaccccatctctactaaaaatacaaaaaattggccatgtgcggtggtgggcacctgtagtcccagctactcgggaggctgagccaggagaatggtgtgaacctgggaggtggagcttgcagtgagccgagatcgcgccactgcactccagcctgggcaaaagagcgagactccgtctcaaaaaaaaaaaaaaagagttcttccatgctgaattgcaatcagcctcacagacactgccacacccagtgccaggtctgatcctgcctcactgtgacaggcagatcttagggtttaagaggaagatggtgttccttctgtgttccccacgtgacatggagtccagtccctcaggtctggtgcctgctgcagacactcagaatattgtgtttcaggcagcctgacagtgggtccagggccatgtcatgacacgcatgtttattttgtcagcaagatggccgtttggacagcttgtctcctcagaggctcttgttgatagataattttttttttttttttttttttacacatggtcttgctctgttgcctaggctggagtgcagtggcacagtcataactcactgcagcctcaaacttctgggtttaagcagtcctcctacctcagcctcttaagtacctgggactagaagcatatgccaccagacctggctaattaaaaaaaaaaaaaaacaatttttttttttgagacagagtcttgctctgtcacccaggctggagtgcagtggcacaatcttggctcactgcaacctctgcctcccaggttcaagcgattctcctgcctcagccttctgagtagctgggactacaggcgcctgccaccacacctggctaattttttttttttaatttttagtagagaccgggtttcatcatgttggccaggctagtctcgaactcctgacctcagatgatccacccgccttggcctcccaaagtgctgggattgcaggtgtgagccaccatgcccagcctgaatccgttctctttgggcagaattgtcgagccagccacacaggcactggcagctgtgacctggtcccaacgctccatctggtttagaagctgctgtgagcaggtcacccctccggtggtctcagtggcaggtccagtgtcctttcatacaactcccttgctgcaggactgcaactggccccaccctccctgggcatctgtggtctgattggttgaggttaacctttctcccacttggtacttagagcaagtcacagaaaacatccaaggcatgttgtactagaaagcgggggcaacctcaagcacaagatgccatgaccttgccaagactcgctgaaggaccattttctctcttgttccattccagactgaacccggtgcctggctcctaccccacacagagctgccaccctcacctgtccccaagccaccctgtgtcccagacgcagcacgccagtggtcagaagctggcctcctggccctcctgcacccccgggcacatgcccaccttgcctccgtaccagcctgcctccggcctgtgctatgtgcagaaccactttggtccaaaccccacctcctccagtgtctacccagcttctgcgggcacctccctgggcatccagccccccacgcctgtgaacagccctggcacggtgtattctggggccttgggcacaccaggggctgcaggctccaaggagtcctccagggtccccatgccctgagagaatttctagggaagtcatctcacttggccttctgaaggtcctccctaagagtctcctgacaaaagttacttattgaacacctctatgtgccaggctctgtgttgggtactttgatcaatgcccctgtttcagtctcatctgtactcacggcagccctgtggagtacggtgtactggcccagcttacagatgcagaaagcgagacgttctgccatcagataaagtcacgtggctctttagtaacacggacaaggctcctcgccaaggaactcgtggcagaagagggcagcagttggcagtagctgccgatgtctgtccccagctccaccattcctccctgtggctgtgccgtgctcgtggtttcagtgtccgtgtgtccatgtgtctgcccttcaggagctcgcagctggtgtgcttggcggtcccaggcctgtgtagtgtctctcccctgctgcgggcgcccccaccccgattcctctccccagaagcggtgggatgggcccccatgaactgcagcagcatgctgaggtgtccatgttgtctgcctttgtataaagaaacagcctctgacctgcc

SEQ ID NO: 1559 - DNA, 11474 bp, Homo sapiens
acagctcaagtctcttatgtaaaatggcataatatttgcctataacctacatatatcctcccatatattttaaatcatctctagattacttataatacctaataaaatgtaaatgctatgtaaataagtcttatactatcttttgaatgtacgtttttttattttttttctgaatattttttatccgtgttggttgaatctatggatgcaaagggctgactaggatatgtaaacctagatcactttagaaataataactacaactactgtcagtggagtcttactctctgccagacatgttctaaagatattgaatgtattgagtcaactgatcctcaccacaaccctatgagggaggcactgttttattccctttctcagatgaggaaactggatcacagaaaggttaattaatttacccaaggttacacaactatagtattacagccaggattcaagaacttgtgcacttgatcttaactactgtgtagtagttaattgctatctctcccagattttataatcaggttaactatttgaataatatgtaaatatagtcatcatatttagaaaatccccaaaacaactgaacagagtgttgagtcttatcggaacgtttgctgaactctataatttgtattgggtgattgtactggggtgtataggaaggcatcaccataacggatggctgggcattagcacaactagagttgatgatcagggtttcaaaacctgggattaaaaaatgtgttaatgattttttttctacttgtttttcagtgtggtttatagtggtactgatttgattttggtaaatcaacatttattatgactgtagtcttgagtatatgagctcagctgtagtctagtttagtggttatttaacaatggatttagttaaaaatccagtagaatgttcatacaaggattaattttgtgttctttctacctctttagtaaaataaaacagggtctgttacctagcttggaagatttgctgttctatacaattgctgaaggacaagagaaaatacctgttcataaatttattacagtaagtttttatatttttctatcttaacttaaaaaaatcaataataataaatatatacagtattattgaaatatagtcttaaaggtcgtctgacatgtagattctgactgacaatatttctcttattatgttttcaaatttttgtcatgctcatttcaaggtaatcagtgaaagaaaaagaaagaaacaatgagaaacttgtccagaaagtgggtaatagtgacactaagatgccatattcatgttcaagtgttgggtagaagtttttatatacaggaataaaatcttatagttggtataagcatatacattatttgcactatatatttacaaactcttatttttttaaaaacaggcactcaaatctacaggattgcgaacgtctgatcccaggttgaaagagtgtatggatatgttaagattaactcttcaaacaacatcagatggtgtcatgctagacaaagatctttttaaaaagtaaaagtttctgccaaacctttaatggtgatttgctatgctatacggtgattctgcttttaaaacaaaattgcatctttgaaggccactgcttcctgtgtaatggaaaaaggggatttataaacatcatttgtttgaagaacttggtacatattaggttctataatacaccgggctaagagtattctttctttaaatctgttctaagcaaatttagccaccgatgtttccagtttacagtacttggagattgcattcagtttgagtagagcacatcctttgtcctgtcattgcttatattgatccccaattcatctgcatgacttgcacgctttctcagcatggtctctagttcttttccacaaggtgatttaggtgacatcataaaatgagagggcttcagacagacctgtgttcctcacatttacatacctgcattgtctgctcctctcctctcttcagacatattgatacataggcttttggctattttcattttcttcaaaacagtaaagaactaaaggcaactttggcgattaaagccttgatttggttgaatgagaatttttactttgatgttcctgtatttgcatatatttattatttatcttcattaatgtgtttctattagtttgattacttaaagatttaatggacatgtgtgtaatggatcccaaagaatcaaatagtattttaaactactactatttaagtagaaactagtataaaactgtaaatactactataagacattggctttttccagacatggatccaaaaaatttctgcatctactttgaaagtttgttatgtatggttgtatttacttttgttttatcttcttttgggggttgggtgatttgttctagatgtctcctggagtatgaagtcatctgaaggtataagtatttaactgtggttctctgaagtttcctggcatgctgtgaagcactgctgacagcttgggtttcttatcttttcacgaggaggttcttgtttctgttaacttagctgaccttaaagtgtagactttaggtccgtgttgcagttggtattaggaattttgacttccagaacctgctttttaagagacagaaaaacatcatttctaaatttatttgtgtctttgcggtaaggattatttttcgtgttcatgaactgtctgcacaatattctgattaaagtgctttctgtgggcattattttgttgtatctgtgaatgaagttgttagagtaatggttggtagatctgttgataatcagtaggggaactgctttggaattttaagtggaagcagtattttacactttttttttttaagagacagagtctcattctgtcgcccaggctggagtgtagtgacatgatcttggctcactacaacctctgcctcccgggttcaagtgattctcccacctaaattcccaagtatctgggattaagggcgcctgccaccatgcctggcttttttgtatttttagtgagacggggtttcaccacgttgtccaggctggtctcgaactcctgacctcaggtaatccatccgcctcggcctcctaaagttacacggttttaatacttgaaaaaatatttatgttttgtaaacatgttgttatgtttaaatatgaaattaaaaacaatttaaatcctctgattattaagccagggaactgcaaacattaaattttctgcctgcaattaagagatagtaattattgttttaaacactaatccaatttttaaaaatctatgcttgtaatacaggcagtttccaacttgacaaatgttttatggtctatatgagcaaccagtagaaaagtacaagtctctagggcataattatttctctttattcttagaatgaggtggttcaaaacctccaactgttaaccttttaatagctttcagtcacctggaaaggtgattgcttcagagatgttcttttctctgttttcaaatataagaagttacctagttagtgttgccagaaataaacttctccctttcatgcagctagggaggagatgttaaaacatgggattcatttttccccagagaaataatttataaaggtgggtaggtttggttgaagcagtgtgttaatattttacctaaaatacattgtagattaatatttttagactttttcggtaatctgagaaaactattatgtgtgactttttttaacttgggaaaatacgttctaagcatactttttggagtaaaacctgttcgaaagttggagactgcctgtacccaggttgatagtcaattgtttttaatgctagtaaatcttaacactaatacaagtaaaaatatttgtgtggaaaactaatcctttctttattcgtgcatttttaactttataggtattaaaactttctttgtatgatcataattttttgatctttttgttttgcaagaaagtgaatggtagcctttcatttgtatgtttgattttcttaaaaatttcatatttattatgttattttacaaatgaaaaattatttgtgagaaatgttttgtcaatcattgtgcattagtttttagttataaacacttaaggaaagaaaatgattattcccggcttacagataagaaaactgaacaaaggacagagatatatataacttgctgaaaagcataagcacctcctcagagttcattttatatgacttctcatttcctagttagactcatggtatctatattaaaataactcccaagaaaaaccttactgtttggaatggtgatcggtatgcagttagatactctcctgagaggcaaaattggctttgtcagcctgttaatattaccagtgaaggctgttggaacagctttaccagcaccttctgctagagcagaacatttgtaaagtttcactgagtgtataattttgttaattataaatcctttttttttgagatggagttttgctcttgttgcccaggctggagtgcaatggcgcgatcttggctcaccgcaacctccgcctcccaggttcaagcaattctcctgcctcagcctcccgagtagctgggattacaggcatgcaccaccacgcccggctaattttgtatttttagtagagacagggtttctccatgttgaggctggtctcgaactcctgacctcaggtgatctgcctgcctcagcctcccaaagtgctgggattataggcgtgagccaccgtgcctggctaattataaattcttttaaaggtactgattaaaatagttaaatggtagtaggttaataatttaaatttgttcagcagctctcatttttgcatttataacttcttgaaaaatgaggaagtgcatttgatttgttgtagatataaatactggtttaagatcaggaattctatttttctttcctctgagaaaggtgttctttgatgtacatctcttgcaactctgatacttggaagttggattttagaagctatttgaaacattaaaaatattaaaataatggtaatacttttgagattaatattgaaactatctgaaaatgattgcttattgaagtaaatatttcttagctctggggtgtcaatactatataagttatggaaattaggactgtaatttttttaatgttgtaatagggggatccttatgactgaaacaatagtcatttctattaggattttatttttaaactgttaattttatattgaacaaatgagtatatattattctgaattcttattaatagttaaactgtgaaacctggcttttagctttaatttggtttcatctagaacaacttgaattaaaatattgacatttaaaaatttctcatttattacagactaaacaagaaatactgagagtatcttactcttaagatttattatcgttggtattatggcttaacaccgtgtttagcaagtcttcctttgttaattaaatattaattaaatattctattactgcattacagagacttaagaagctcagaatatacaattggctgtaatccatttgcaaaacgttttaaaggctacgttaatatactgattttctggcttaaattctttttagcaaaaagcagaatacagttcaaattattagatttcagaatatcatgctctcccatccacttggtttactatatttttaaaatacttttttaacagtgaaacatttttattctgcattatatttacatatcttacattaaatagcatattgtaatataacatttttggtgactcaaataatataaaattaattattacactacttcatatgaaattttatttcaaattagagattatttttacaagcatatcaacagacatttcatttaagacataaattaatctgactaaacaaagttgatataattaaggaaaatatgttataatgcaaaatgtttaatttttgaatgaaatgctagtaatagttatataagaactaagagatgtatttctgagattacttggtaaataaacaagatctcaaccttggcagtctgaattttgttaaccagatgtcgtcatgctgaatgttaccaactctgattgagtaagaagcttgtttcagatggtcttaatacttaaacctggtggaacgccttgtcttaatttgtgacacaattttaggcacatccagattaatctcttacacgttcaacagcttacaagcaactacttgaaagactgctagaaggaaagataatgtagaaagcataatttatagaatttagttgtataaaatgataaatttatctattatttaaatagtgtcctaattattactgttattaccaagttctgatatttgaaatgtacccagtttattaattatctttttacattctacagatgtgttcagagcaacattgttttgttgacacaagcatttagaagaaagtttgtgattcctgactttatgtcttttacctcacacattgatgagttatatgaaagtgctaaaaagcagtctggaggaaaggtaatgcttttgatgtacatattttcataaccgaatcacttaataaattcagcttaatttgaggtctagagagtaaattgtgtagttgtgttttgctaaagaaaacactttagcttcgcttaagaaatttaagtgaagccactggatttagtgtttttacggtattttaaatatttaactttgttattctggttaaagagaaatctaagggtaagaattttttattttcagatgatggtgatggattttaaatttttaagttaaaaaatcttattcagaatttctgcagatctgatatccttcagtattaaacgaaatgtttctagtttttaaaatcctgtaaataatactaggaactatttgattttcatatagaaagttttcattttcttttgttttaactttgggtagctttagtataatccagttggcccttgaacaaagcaggggttagggatgccaaacccacacgcagtcaaaaatctgagtataacttttgactcccttaaaacttaactacttataactactgttataagcgttaccgataacataaatagtctattaacacattttgtatatttattatataccgaattcttacaataaagaggataaaaaatggtattgagatcataaggaaaatatatttactgtttattaagtggaagtggatcaccatgaaagttttcattgtcatcatcttcatgtttagactgaagaagaagaggagggattggtcttgtgtcttgggggtggcggaagcagaaaagaatctgcatataattgcactgtttgaagtttaaatccatgttcaagattcaagtgtataacaacttcagtgtaaatacttactacttacttttaaatacttgattcctaatgttttagtgaaaccctactagcacccatgaccctgattaaataaatttacttttttcctgcttaaaaaaaaaaaaagttcaagttcctctgctagactctcctgctaaacatgagaaagaaagaatgcattggaaaataagaaataatagagactgagaaaagtcactttagatctcataattctcaagtctgttttgcctttagttttcatgagcattgttacagaagatagactatgaagccactgagtgttgtagaataactagtcattggtagaaggtaaaatgagataagaaatttgttggtggaagaaaatacattatttgtcaatattatatctattcatttctttccaatcttttggataggttgcagattatattcctcaactggccaaattcagtcccgatttgtggggtgtgtctgtttgtacagtagatggacagaggtaagtttatttcaaattcatgaaaaccaactctaagccttaacttttgtataatggtgagaatgacatggagaagatcatcttttataatggaaattagtcctaacaggatataatttcaaaaggtaaataaatttaaattttaatgtaatttttaaaaactcaaacagtaacattatattaagttttatgagacatctattttattcacagttgtagtcttgttttttgagtattattcaaatacctgcagttaccaatttgtttcagaaaagcaggcttgtcaaaacatgacactattctctaatgaactgactactaataaaattagtccctatttctcaacttaacattggtaacccatctgtcgttgtctttgttccttgtgttcctgataaaattagcatgagaattaagacagtgcaacataacgtatcccaaagttaaaagtcagttgcaaaacatgtaggatttcatgaagtccatgaaagcagcatttgggaattgcttacattgcaggcacagctgctgacagatgaggaacttgcagaattataaaaaggatagtgatgtgagggcgctttagaaagaatgatttgatttaaaaatcaaagaattaagagaggcccttggaaaatggtaaagttctagaatattttttcaagaatgaccgtgttcattgtgctgggaattagacataaagattgttatcatcttataatttggttttattagaaaattacgccaaagagaaaaatcaatattcttttttcactcatttttaaagacttagctcagagatatattcctttgttttttgtttttttattaaagtatttctgttttatcaaaatagaacttacataagatgtacaacttgtaagtgaacacagcttgaaaagtttatatcagagttgtaattttacctaaatttcgttaaaactactaaaagccgtttaacctagtaattttagattttacttttcaagataatgttgcaattaaaaaccttttttccttttatgaaaatttgatcttttatgttgcccaggttagttttgaactcttggcctcaagtgatcttcctgccttggcatcccaaagtgctgggattataggcatgagcccctgccccccagccaaaaatctgtgactcgtaaggaccttcattttaggtgattttaatttttttttactaattatcctcaagtacttacagtaaaaaatatatgggttagcccattcattttgaaagtaaggaatctgaggaccatagttgacatgatattggcaaaggtgaaatgaacacctaggtctcttaacttctagtctattttttctttcattattatatgcctttatcctcatttgggtcagtaaaatgtactgagcagtcaccatgtgttgaattaaatgttgtgtgctatgaagggacacaatgaaatgaaaaggcatggtgactttatcccttgaagcaaattccggtagggaatggtattcctgtttttgcattttaggaaataatttatcaagtaatggaagtctttgaatttgaagaaaattattatcatgtaatattgaatatgatttttctcttcttaaacattctctatgtctcttagtttttttatctagagaattcagaaagttgacttcagaactagaacatatgtatttttaaatccaaaggtagtaagacaagctcttaatcattttttagaatgattgtcaagtttgaagtaacaatcttatatagtataactatatagtttaagattatagttacacatgaataaatttgataggaaaaaaatatagtgcccagtttcattatgaatgactttcactatgaatgaatgctttgtgatgtgttgggacattgttcagggaacctgggaggtatcagtaagtaaatcaaagatctctgcctttgtgaagcttacattataattgggttggccagaactttttcattcccaaatcttttctctacttcatgtacttctcagtttggtggtaatataaagctttctttttgctctgttatttatctgcatggtaatgatgactgcctactgaacttagtgccagctctgtcatgtttataaaactggatgcttttttttttaatggggcccaggattgtgagtggatgtggcttgcaatatgaggcatttgtagacagggtcccagagaatagtattgaatctaaactgagttctgtttaactttttaaccatggtttagtcacagcttacagctctgagttgaaaaaaaggtgaataatttctaaaagggctagtttattttatgtgattgaatacacgtgggagtaaggaggagcatgctcttactctcttgccctcagaggaaaatttccacattacatatttattatctactttaaaaccattattctgttacgtgaatactttcatgcttttgctttttttcacagtatttctcttaaaataaacataggtcaattctgtatccatggggtctgcacccatggattccaccaaccacagatcgaaaatatttgagccaaaaaagatggatagttgtggctgtagtaaacatgtacagacattttttccttgtcattattccctaaataatacagtacacctatttatatggcatttacattgtatttggtattataagtaatctagagatgatttaaaacacatgggaagatgtgtgtaggttatatgcaaatgctatatcattgtatataagggacttgagtgtccatggagtttggtatcacagggattcctggaatccacctcccacagatatcaaaggatgactgtacttaaatttattctgtaattttgacataaacttgtggttgaattatgggaaaatttttgttggaattgttaacatgtaaaaagaataattccaactatgcagttacatttttttcccagttgatgttattttttaaaaatctccttttaaataggcattctactggagataccaaagttcccttctgtcttcagtcctgtgtaaaacctttgaaatatgccattgctgttaatgatcttggaactgaatatgtgcatcgatatgttggaaaagagccgagtggactaagattcaacaaactatttttgaatgaagatggtaagaattacataaacattggttgaaaaaagaaatgtctcattttcctatgtaaatctaagtcgttttaaacattttttgattaaaattaaaagtatttgtcatgtgatttctatataatccattgagagagtttcatcacctacttttaaaaatgattattttaggcatctcataccactgggaagtgggctagggagaacatgaacttctctcttcataaccacctttagggaaatatagcgaaatctcaaaatacatgagatttgctttaaaataatttagttaaggcagctgggagtgctgggtatgattattactatatgttggtaattattgcagctaaatgataggtgcatgggtgtttgtatattattctatctattatattgtatatagtagttgaaagttttattgtggccctggttgagatagtgaggattattatttttcagtgagtgtttttactttttatccttataacattaaaaaatttgaaag

SEQ ID NO: 1560 - DNA, 113 bp, Homo sapiens
ttatttacatagcttttaggcaaagcaaataccatttacttgtgtgataaatacatagaaagcttattctgcagttttttaaagtgacaaactaccactatctgaagtttatt

SEQ ID NO: 1561 - DNA, 173 bp, Homo sapiens
cgagtagctgggactacaggcacccgccagcacgcctggctaattttttgtatttttagtagagatggggtttcactgtgttagccaggatggtctcgatctcctgacctcgtgatctgcccgcctcggcctcccaaagtgctgggattacaggcttgagccactgcacccgg

SEQ ID NO: 1562 - DNA, 5011 bp, Homo sapiens
gttgccaagggtgccctggctggtgaggacacaggtgttgtgacacatgagcagttcaaggctgcgctcaggatggtggtggaccagggtgacccccggctgctgctggacagctacgtgaagattggcgagggctccaccggcatcgtctgcttggcccgggagaagcactcgggccgccaggtggccgtcaagatgatggacctcaggaagcagcagcgcagggagctgctcttcaacgaggtgggaggacagggtgggacacagacgggggcgttggggatgggcagtgagcagccagccaggctggacatctgtgagcaggggcagtgggtggccatgcgtctgggcactgtgcctggcactcaggcccccgcctgcccccaggtggtgatcatgcgggactaccagcacttcaacgtggtggagatgtacaagagctacctggtgggcgaggagctgtgggtgctcatggagttcctgcagggaggagccctcacagacatcgtctcccaagtcaggtgggcagctgggagggctggaccctgagtgcaggctgccctcaccatggccctgccagggcaatgtggtcttctgcctgtggcccagaagacttgggatgcctgggctcccctgcctgctggggtaactgagacccaggggtcttgggagtggagaagagaaggatagcttctagccaaagctcaggccccagttttcaccagggctatggcctgactgtgctgccaaacagattgcctgggagctgtggggcctagcaccagggactcctactctgctcagccaccccacgacctgccagagctaacgttctctttcatcgggtggccccaccttcctgtccaggctgaatgaggagcagattgccactgtgtgtgaggctgtgctgcaggccctggcctacctgcatgctcagggtgtcatccaccgggacatcaagagtgactccatcctgctgaccctcgatggcagggtaggtcccatcctgtccctggcacagccacgctcccacttcctcctgatccaccactcactcccttttcaaccgcaggtgaagctctcggacttcggattctgtgctcagatcagcaaagacgtccctaagaggaagtccctggtgggaaccccctactggatggctcctgaagtgatctccaggtctttgtatgccactgaggtaaccgttccctccaccccccagacctcccaaaagcaacttggcaactggcagctcttctgctgtggcccctccagtgagctcaccaaaagcagccctggttttcagagtcccacctagtcaacacccttccccctttcgatggggctgctcttacccagtgactttgctgccaggaacgagtcctgcaagtgctttcctcagctcaagggcagaatggggtatggccgggcctcctatgtatgatggcctttctctgagtgactgacagctgtgtccctataggcagtggtcactcatgcaggcagtaactggccacagggcaggtgaccaggggaggaaggagacagacccaccaaggagagctggggccagctgtcccccctccaccactgctgccaccagaacgcagctaccaatgggccagggtctggccatggggtcagggacattttcctcctgcaggtggatatctggtctctgggcatcatggtgattgagatggtagatggggagccaccgtacttcagtgactccccagtgcaagccatgaagaggctccgggacagccccccacccaagctgaaaaactctcacaaggtcagttggcacacaagggtgcgacctcgcagaccccattcctcctgaggcaaggggaccagaacctgggctcccagcatctcccttccactgaagccacagggtctgggctcctggaaaaggctcctctttccccacacaaaacccgcacctgggtgtggagccgcatctacgcacaagttcgcatgtgcgctccgacaagtcgcctcccacggctgtggcaggagagttgctgcttggcagaagggttgctgcttggcaggcactggtcggaagcccagtggggcccatgagcagggaaagccaggacaccagcaatccctgctgtccagggagggatccggagaagcttcactgagcacaaacccttctaacccgtgtcgggagatccataccatgattcgatgtccctgtccatcacggcgagtcggctcatgctccatcgttgcacaccccgacacagctaagccacagcgttccccttaaagccagtataagtgcatggaagtgtatacatgtaaccctttttgccaaatcggccccaaccccgcaggccttactgtggacgccccctgctggcaggtcagcacggggctgctaagtggcaccgccatctggtggccaaaacaagaaatgtctcagagggctgaagcctctcctctaaaatagcaaaaaaacaagagttctgtggccccaacacaaagctggatgggaggaccaacaggaaacatcttccaagacaactggtccttggagcccgcaccgctaaccccaaaattagcatataaagatctccagttggctaattcctcagaggatgtagccttctgcccaagactcagcctcatcccaagatactggctcaaaatgaaccaagataagcccttgctttagactcttaaggcctagagcaacaaagaaatcttccttttcaggtctcactttattttctatttttcagagtacttcctcatccttgacttgtttgtttctgttgttgttggttttttttttttttttttttttggagatggagtctctctctgttgctcaggctggaatgcagtggtgcgatctcagctcactgcaacctccgcctcctgggttcaagcaattctcctgcctcagcctcctgagtagctgggattacaggcacgtgccaccatgctcaactaatttttgtatttttagtagagacagggtttcgccatgttggtcaggctggtctacgaactcctgacctcgtaatctgcccaacttggcctcccaaagtgctgggattacaggcttgagccactgcgcccagcgacctgtttttaaaatctcaaaagccctatgtggcagacagggcaagcatactttatcactagcccattttacagatgagaaaactgaggcctagagaaaactgtgacttgcctgagatcacggatagagccagatctggatcactgatgccaatcctctgccccttccacagagctatagcatctgaatgctgagagccttgagggggtggggagggacaagggaacaggaagttaaaaaaccagcgaattcatgactttcaaacaatgataagtccaggcaatcaggtcaccccgaagtgactgcaaattgtggcttcatcttactgccctgcctctacaggtctccccagtgctgcgagacttcctggagcggatgctggtgcgggacccccaagagagagccacagcccaggagctcctagaccaccccttcctgctgcagacagggctacctgagtgcctggtgcccctgatccagctctaccgaaagcagacctccacctgctgagcccaccccaagtatgcctgccacctacgcccacaggcagggcacactgggcagccagcctgccggcaggacttgcctgcctcctcctctcagtattctctccaaagattgaaatgtgaagccccagccccaccctctgcccttcagcctactgggccaggccggacctgccccctcagtgtctctccctcccgagtccccagatggagacccctttctacaggatgaccccttgatatttgcacagggatatttctaagaaacgcagaggccagcgttcctggcctctgcagccaacacagtagaaaaggctgctgtggttttttaaaggcagttgtccactagtgtcctaggccactgcagagggcagactgctggtctccacagatacctgctgttctcagctccagcttcaaacctcgagtctcgagagggccacggggtggtttttatgaccggaatcccgcttcctccctcacgtctgatgtcctgaaggtgcagtcccacctgtacagcccctccccgcccagaactgtgaatggcctgctccaggccatggctgggggcagggagtgaggggacaatttctgagtgaaagagaaagaatggggtcggtggtgaaggtgctctcactttacagaatggagagaacatcgtgtgtgtgtgtgtgtgtgtgtgtgtgtgtgtgtgtgtgtaaggggaggaaagccaccttgacagcccaggtccctccaggtcacccacagccagtttcaggaaggctgcccctctctcccactaagttctggcctgaagggacctgctttcttggcctggcttccacctctccactcctgtgtctacctggccagtggagtggtccatgctaagtctaacactcctgggagctcaggaggcttctgagcttctcctgtactgtgcatcgtgagggccagagacaggaatgtaaggattggcaactgtgttacctttcaagtttatctcaataaccaggtcatcagggacccattgttctcttcagaaccctatctgggagagaaggcgaaccacctccgggtttccatcatgtcaaggtcacaggcatccatgtgtgcaaaccatctgccccagctgcctccacagactgctgtctccttgtcctcctcggccctgccccacttcagggctgctgtgagatggaattccaggaaagaacttcaggtgtctggaccctttctatctagataatatttttagattcttctgctccctagtgacctacctgggggcaaagaaattgcaaggacttttttttaagggtcagagttttcaaaacaaaagcatcttccctagaaatttttgtgaattgtttgcacttgtgcctgttttaaattaaattgagtgttcaaagccatt

SEQ ID NO: 1563 - DNA, 1052 bp, Homo sapiens
taatacactggatttattaactattctttgagttctaacagtccttccaccacacagtatcactctgaaagggtgtgcatgtctcacagctcacacacacaccacttctgatcttagggtaccaagtgccagcatcctgggtgactcttcacaatgacaaaagcaacaagaactggaaaagcaaaatatttagaaaagtctcttctgaaggtagagattgctagagaggacccagcctcaacaccctggggctgacaaagggagttcaggagagaaaaatgtggtaaaacatggaagttctgcacagagccgggcctgggaaggagtctgtatgtatggacagcaaggcagtcagacacacgatgcagttcagacaggaaagagccgctgcagttgtttagaaacatcgctttctaccaccaagctctcggcagctccacagagaagagccctcatggttgtttatccagtcaagagggcccagggtgacattcaaccagaaagccgtatatcagagatactggaaagattacagcacctctgatacaatgtgcaacccagacttcatgctgttaagccaaaatacttgcatttctacaccactaaaaacgtcattaaaattcaacacagttgaaaagggagtacataagcaagcaagggtcagaaagcagcagtttgcacttggggtgtccagtggtccccaccctaccccagaccctctctctcaggcttttcaggcacttggtattgtgcacccaccacccagacggggactgaggagaggcagatgttttgggagaagaggggagggagagggcagaatacctcagaaaccaaagctagtatcagaagaaaactgcataatcggcaggtcccaagggaagggttggcagctccagcttttcggaagagagctgtagctctcagccttaacttggaagatttaacttggggtccttattgaagggtctgggctcctgctactctcaatgcgagttttttgttcattgtccctcacttcactgctgtaaagtgacttcaagtatccggat

SEQ ID NO: 1564 - DNA, 427 bp, Homo sapiens
ggcggggagctggccttctctgtcttcccaggtgcagcagagcgagtgtaaggagctgtcttgggcctgcccagcctggtgccctgcgggggactgctggcacaggactgtgactgggcttcagctctgtctgaaaatctttgctcagagcacctccctagtttgatctgataccccgcctgaccctgccagagtccagaggtcacggcggccagcccctgcctccgggaaggttattccaaatgctcccacagccctgacccttcctgttgctttgtccctgcagcccaactcctctttccgaccgccgcagaaagacaaccccccaagcctggtggccaaggcccagtccttgccctcggaccagccggtggggaccttcagccctctgaccacttcggataccagcagcccccagaagtccctc

SEQ ID NO: 1565 - DNA, 3818 bp, Homo sapiens
caggctgttggagagccgcccctcttcctggctgcttctatcttctttgccatcaaagatgccatccgtgcagctcgagctcagcacacaggtaataacgtgaaggaactcttccggctagacagccctgccaccccggagaagatccgcaatgcctgcgtggacaagttcaccaccctggtatgatgcccctcaagcatccactcagtccaggggaggccagggataggctggcaaactgcagggaaggttctgcacagaggagaggtgttgggctctctcctaaccgggcagccttgcatcaatggccacccttcattgtgcatggtatgaagcacacactcgaacttgcaagagaataatgagaaacctccttaaagctatagcttgtagctgggcctccttagagatgggaggaatgtgtggtgcacagtcataactcacagattttattattttccatctagataaggatgatggatgaaactccagagagcctaatctttagtatgagtcagtcgctagcatttttttttttaatttatgttaaggacactgtatgaatattggggggatggagggaaaaagaggaaataattaattagatcaaccacatttgtcctgtgatgatcatgtgccattctgatactggggacacatagatgtccttgaggactttgcaaccttgggaaaccagatgattccattatagggtgattgattactgccttggaggtgtatgtggcagaaagtagtagaagaattccgtagtcattggaatcactttaagaagcacctatgtgatacttgtagttggcaatgcctaacaaaagaagactttgctaggacggttgcttccgctttggggatctcagaaccagcccagcctctgagtggtgctgaagtgggctctgtacagtggctttaattgcctttgcaactgcaacctgtgtggagttagcaggactgggttcttcctgatactcaggtggggcttcctcttttttttttttttttttttttttttgagacggagtctcgctctgtcgcccaggctggagtgcagtggcgggatctcggctcactgcaagctccgcctcccgggttcacgccattctcctgcctcagcctcccaagtagctgggactacaggcgcccgccactacgcccggctaattttttgtatttttagtagagatggggtttcaccgttttagccgggatggtctcgatctcctgacctcgtgatccgcccgcctcggcctcccaaagtgctgggattacaggcgtgagccaccgcgcccggccggggcttcctctttttaaaattcgatatgctttttggatttataggtaaagtgggtacatgtggtcccaagtggggagggcacagaggaaccccaggggcagacaaatccaccatccgcagacctcaacacagtgggtgaaggaggcatatgggtccccattcaggtcttccttgggtctaccaagagctttagctatggagtgagaactacacagaccgtgtggcactcccaggcagtaaagatgcccacatctgtgcagcaacctacccacagcccagaaccttcccactatggctcccaatgctgacaatcacccaaacccatttccctgagaggagtgggtggcatggctcccaataagctgccacagtttgcaaggcgagctctttgccaacagtctgatgcagaactcagtcattttcgtaagctctctgtggccccagacctgaaacaaagatccgtttctatgttacaacataccagcgatttaaaaattcttgccatggatttgcatgagcagctgattctatgaactttttaaggactgtgagtttcaaaagggatcacatctgtattgtttgtcaccatatctccaaaacctaatagaacgcctgccatgtggaaagtgctcagtgaaaataaatgaatggcttaggaaattaaggagtcctgccctgaggcattctcaacagctaggcctgcagagtggtgcttggccttggaatgatggttggcagtggtgggaggtgaggtatgcaagagagtgggaggagcatgatcagcagaccctggcaatgagaacactatcattccttcctagtgtgtcactggtgtcccagaaaactgcaaaccctggtctgtgagggtctaaagagagagtcctcagcagagtcttcttgtgctgcctttgggcttccatggagcaggaggaacataccacagaacatggatctattaaagtcacagaatgacagacctgtgatttgtcaagatgggatttggaagacaagtgaatgcaatggaagattttgatcaaaaatgtaatttgtaaacacaatgataagcaaattcaaaactgttatgcctaaatggtgaatatgcaattaggatcattttctgtctgttttaatcatgtatctggaatagggtcgggaagggtttgtgctattccccacttactggacagcctgtataacctcaagttctgatggtgtctgtcctttgaagaggattcccacaaacctctagaagcttaaaccgaagttactttaaatcgtgtgccttcctgtgaaagcctggccttcaaaccaatgaacagcaaagcataaccttgaatctatactcaaattttgcaatgaggcagtggggtaaggttaaatcctctaaccatctttgaatcattggaaagaataaagaatgaaacaaattcaaggttaattggatctgattttgtgaagctgcataaagcaagattactctataatacaaaaatccaaccaactcaattattgagcacgtacaatgttctagatttctttcccttcctctttgaagagaatatttgtattccaaatactctttgagtatttacaaaaaagattatgtttaatctttacatttgaagccaaagtaatttccacctagaaatgatgctatcagtcctggcatggtggctcacccctataatcccagcactttgggaggctaaggcaggagaattgcttgagcccagcagtttgagaccagcctgggcaacatagagagctcctgtctttaaaaaaaatttttttaattagttggtcttgatagtgcatgcctgtagtcccaactacttgaaaggctgaggtggagagatcatttgagctcaggaggttgaggctgcagtgagctatgattgcgccactgcactcctgcctgagcgactgagcaagatcttgtctctgaagaaaaaaaaagaaataaaaatgctgctatcaaaatcaagcccaaccagaggtagaagagccaagaagcctgggttctcatcctagctctgtctcttctgtctctatctttgtgatcttggactgtcaattccccttcctgtgatccattttactgcaaacataagggttgcagtaaagggttgtctcacgtcttctgctttaaaagcctataaatatatgacctgaaaactccagttacataaaggatctgcagctatctaaggcttggttttcttactgtcatatgatacctgggtctaatgaactctgctgagatcacctcaagtttctgcggttggtaaagagaacaagggaagaacaaacatcccttttattgctccaaatggtgatttaatccctacatggtgctgggtggacaacgtgtcactgtcacatgccttcactgtataaatccaaccttctgccagagagaatctgtggttctggccatggagggaggatagtggaaatgatatagttggactggtgcttgatgtcactaataaatgaaactgtcagctgg

SEQ ID NO: 1566 - DNA, 3500 bp, Homo sapiens
caggctgttggagagccgcccctcttcctggctgcttctatcttctttgccatcaaagatgccatccgtgcagctcgagctcagcacacaggtaataacgtgaaggaactcttccggctagacagccctgccaccccggagaagatccgcaatgcctgcgtggacaagttcaccaccctggtatgatgcccctcaagcatccactcagtccaggggaggccagggataggctggcaaactgcagggaaggttctgcacagaggagaggtgttgggctctctcctaaccgggcagccttgcatcaatggccacccttcattgtgcatggtatgaagcacacactcgaacttgcaagagaataatgagaaacctccttaaagctatagcttgtagctgggcctccttagagatgggaggaatgtgtggtgcacagtcataactcacagattttattattttccatctagataaggatgatggatgaaactccagagagcctaatctttagtatgagtcagtcgctagcatttttttttttaatttatgttaaggacactgtatgaatattggggggatggagggaaaaagaggaaataattaattagatcaaccacatttgtcctgtgatgatcatgtgccattctgatactggggacacatagatgtccttgaggactttgcaaccttgggaaaccagatgattccattatagggtgattgattactgccttggaggtgtatgtggcagaaagtagtagaagaattccgtagtcattggaatcactttaagaagcacctatgtgatacttgtagttggcaatgcctaacaaaagaagactttgctaggacggttgcttccgctttggggatctcagaaccagcccagcctctgagtggtgctgaagtgggctctgtacagtggctttaattgcctttgcaactgcaacctgtgtggagttagcaggactgggttcttcctgatactcaggtggggctttctctttttaaaattcgatatgctttttggatttataggtaaagtgggtacatgtggtcccaagtggggagggcacagaggaaccccaggggcagacaaatccaccatccgcagacctcaacacagtgggtgaaggaggcatatgggtccccattcaggtcttccttgggtctaccaagagctttagctatggagtgagaactacacagaccgtgtggcactcccaggcagtaaagatgcccacatctgtgcagcaacctacccacagcccagaaccttcccactatggctcccaatgctgacaatcacccaaacccatttccctgagaggagtgggtggcatggctcccaataagctgccacagtttgcaaggcgagctctttgccaacagtctgatgcagaactcagtcattttcgtaagctctctgtggccccagacctgaaacaaagatccgtttctatgttacaacataccagcgatttaaaaattcttgccatggatttgcatgagcagctgattctatgaactttttaaggactgtgagtttcaaaagggatcacatctgtattgtttgtcaccatatctccaaaacctaatagaacgcctgccatgtggaaagtgctcagtgaaaataaatgaatggcttaggaaattaaggagtcctgccctgaggcattctcaacagctaggcctgcagagtggtgcttggccttggaatgatggttggcagtggtgggaggtgaggtatgcaagagagtgggaggagcatgatcagcagaccctggcaatgagaacactatcattccttcctagtgtgtcactggtgtcccagaaaactgcaaaccctggtctgtgagggtctaaagagagagtcctcagcagagtcttcttgtgctgcctttgggcttccatggagcaggaggaacataccacagaacatggatctattaaagtcacagaatgacagacctgtgatttgtcaagatgggatttggaagacaagtgaatgcaatggaagattttgatcaaaaatgtaatttgtaaacacaatgataagcaaattcaaaactgttatgcctaaatggtgaatatgcaattaggatcattttctgtctgttttaatcatgtatctggaatagggtcgggaagggtttgtgctattccccacttactggacagcctgtataacctcaagttctgatggtgtctgtcctttgaagaggattcccacaaacctctagaagcttaaaccgaagttactttaaatcgtgtgccttcctgtgaaagcctggccttcaaaccaatgaacagcaaagcataaccttgaatctatactcaaattttgcaatgaggcagtggggtaaggttaaatcctctaaccatctttgaatcattggaaagaataaagaatgaaacaaattcaaggttaattggatctgattttgtgaagctgcataaagcaagattactctataatacaaaaatccaaccaactcaattattgagcacgtacaatgttctagatttctttcccttcctctttgaagagaatatttgtattccaaatactctttgagtatttacaaaaaagattatgtttaatctttacatttgaagccaaagtaatttccacctagaaatgatgctatcagtcctggcatggtggctcacccctataatcccagcactttgggaggctaaggcaggagaattgcttgagcccagcagtttgagaccagcctgggcaacatagagagctcctgtctttaaaaaaaatttttttaattagttggtcttgatagtgcatgcctgtagtcccaactacttgaaaggctgaggtggagagatcatttgagctcaggaggttgaggctgcagtgagctatgattgcgccactgcactcctgcctgagcgactgagcaagatcttgtctctgaagaaaaaaaaagaaataaaaatgctgctatcaaaatcaagcccaaccagaggtagaagagccaagaagcctgggttctcatcctagctctgtctcttctgtctctatctttgtgatcttggactgtcaattccccttcctgtgatccattttactgcaaacataagggttgcagtaaagggttgtctcacgtcttctgctttaaaagcctataaatatatgacctgaaaactccagttacataaaggatctgcagctatctaaggcttggttttcttactgtcatatgatacctgggtctaatgaactctgctgagatcacctcaagtttctgcggttggtaaagagaacaagggaagaacaaacatcccttttattgctccaaatggtgatttaatccctacatggtgctgggtggacaatgtgtcactgtcacatgccttcactgtataaatccaaccttctgccagagagaatctgtggttctggccatggagggaggatagtggaaatgatatagttggactggtgcttgatgtcactaataaatgaaactgtcagctgg

SEQ ID NO: 1567 - DNA, 5347 bp, Homo sapiens
cgcgtgattgtgcgctgtgtgagtgaggtgcgcgccgcgtgatcgtgtgctgtgtgagtgaggtgcaggccacgtgatcgtgcgctgtgtgtgtgtgaggtgcgcactgcgtgaccgtgcgctgcatgtgagtgaggtgtgcgccgcgtgatttgggaagaggcttctgcaatgggcaggcttctgggtacatcacttaattcgttcaggccggctcctacctgctgtccagtgatgaagtctccacacaggaacaggttcatgctggcgatgactatgatgtggggtatcgctgggtactcagaatccttttgtgtatcaaaagctggaatgcttcaaatttttcataagtgccttgttttccttttaacattgatctggaaacagtgctgtctgcaaagctgaggcccactcctctctgctggggatcaggggtttcagaaggcaggggccatgctgggccactgtcctgtacaagcagcctggcctccttcacgctgccagggcatctggcgcagggcatgctttctcattcatagtctgctttgaaagtcttggttttaggagaggttcaggttggtcttgctggcatcttcacctaaaatagggtctggcagacaggcccatgcgctgcatcctgcccacggcctgatagatggcctgtgaatggcttttttacattttaaaagtggttgaaaacaaattaaaaatatatttcatgacatgaaaatcatgaaattcacatttcattatctgagaataaacttttatggatgcagccatgcctgtctgtccatgtcttatctgtgtctgctttgtgctacggctgcagagtggagtggctgggactgagacggaacgccctcctcacggggccgcgtctctccaccaggaccgcggggctactctgaggctctgcttcttccccagcggggttggcttcctgctattcctcagcatcctgccttggtcctgagttggtccctctgccaagagccgtttctgtgtctcagtggatggcgcagctgccttcttgctggtaccttgactgatagactggttcctgttcacctgcccgaagtcatcccagaaatacctcttacagttgcatgggttgaacccagctccgcgtgtatttagagttttgtctcttgccccttcacccagaacagcagcacccaccaccttcccgtcccctgtgactgcctcgcaactgggtctgttctgtgagatgtcgccaccctgtttgccatctgggaggatctcactccttcaatttaatctgctctcttccgttatttttttagtttctatgtattttacttttaggacattccttggactttgttctacctctttaattgatgaagaaaatttggtcattgtatctggtttttttttttgagacagagtctcgctctgttgcccaggctggagtgcggtggcacaatctcggctcactgcaacctccacctcactgcaacctccgcctcccgggttcaagcgattctcctacctcagcctcccgagtagctggattacaggctcctgccaccacgcctggctaatttttgtatttttagtagagatggggttttgccatgtttgccaggctggtctccaactcctgacctcaggtgatcctctcgcctcgcactcccaaagtgctgggattataggtgtcagccactgcacccaatctattgtatttaattctaagcactttcttccagacggtctcactctgtcacccaggctgaagtgcagtggtgtgatctcagctcacagcagcctcaacctcccaggctcaagcagtcctcccaccttggcctcccagagtgctgggattacaggcacgagccattatgcccagcccgtctttcttcattttgattacagtgtgcgtactgtacatccgagaagtgcatgtgaaatgctggaactgggatttcagcaactgaatgcacgtgtgtgactacccacgagaagcaggacacttagcacctgctgagaagcccccacgcccatgttcccttctaggcactgcacaggcatgctggccggcctgacctcagtttccctcttgctgtggccgcttctgctccactctctgtgaggctcatccaccttgttgcctgtggttgtggattgttcattctcagtgctctgtatgccaagtactccattgtgtgaaaatcccacagcacgttcattctattatcaatgggcatttgggtagtttccacagtttggctgttaggaatagtgcagtgatgaacatgctggcacctgtcttctgttttttttttatttttagagacagggtcttgctctgttacccaggctggagtgcagtggtgtgaccttggctcgctgggcctcctgggctcaagcgatcctcccacctcagtctcctgagtagctgggactgcaggtgtgtgcctgcgtgctggctaatttttgtagtttttgtagagatggtgtcttgctctgctgcccaggctggtctcgaacttctggcctcaagcagtcctcctgccttagtttcccaaagcactgggattacaggtgtgagccactgcccccggccagcacccgtcttctggaacatttgtaagcatttctgttgggtgtgtacttgcgcgtggaattgctggctctcagttatgcacatttcttagaagatcctgccagtccttcatcccagaccccgaccccagcgtggaaaacgcagtgcatcctcaacgcctagtgtttgcggctgtggcggctcatgatcgacttggaaggcccacagtgtgtggtgtggagttttgcagggagccagtgacactgcccaccttcgatccagacctaaccttgatcctgttctctgaggccaccttaccaaaaccttgacttacccgtcttagatcacttaccctgggggaaatgtgccgcaagctcacgagggcactcagccagcctacaaaggttaccatggcagagaactgaggcctcctgccagcagccagcagcagctgaccagccgcgagggcccctccgggaaggagagctttctgtgtttcttcctgtaccccatatatgttgacgtgatacgttttactttctgatttcccttgtgagatctttggtctgtgggttatttggaagtatggtttaatttccaaacatttagggttttcctccagattttgttgttgtttctggtttctggttttaattccactgtggtctcagaatatactttgctgacttccctctctttagatttgttgagccctgttttgtgcttcatagtgggagggtgattgtatgtgcacgtgcagatatgtgtggcccccacacggtatctccagctatccgtgtcttgcctctccgtgcccagtgcacccttctcagccctgccgtgtgaccctgggctgggccctccctgtaccctcctttgcaggttggcacagtgtttggctctgtcactggaaggagctggagggactccacaggagggaggggcctgccctcctggttccagtgtgcttgcttttcctggcttccgtggtgtgtgcctgccagcctcatggtgggggcgggggctctcagtgacagtctgcaggagtttagcaacacccaggttcattcaccacggtgggaaggattcctgctaagcttccttgcctctgtccagctcccagggcgtctgcctccctcctgccccagggagagcttctgggtgagtctcgctggcactcctgccccgggcttcctgctctcaggccttggcctgctgcaccttggccaactgcaccacccggcacatcatagccccactcaggtcagagctgcgtctcagccgacgtggggttccgaggttctcaccaagatccagactcaacgcttgtgggtttgttgtctcagtcctggcggtggaggttctcccgaggcctcagcgcctccgttctcggaagtctctttacatgttagtggaaccctctgttcctgttgaatcattcttcgtgttaaatgtttctatctcttgactgatacatgatagtcatcatgtatgtattctgcggctgcttttgtttttttctctttatccctggttttctgtaatttgataagctttagggtatgtgtgtgtgttttgggggtttgtcaagatttgtaggctttgtcatttttatgcaatttggaaatattctagctattcggtctcttcccctgcctcctgcagtcccaggtactcgaatgggctgcttgctgtggactcatgggtccgtgagtctgctcatcttcttcagtttgcgtttcatttttggtagattctgtttccacgtcttcaagcccactgatcttttaagctgctgttaagctatggccattttctgtatgagccattgtgttttttcatctctataaatttggttttggtatttaaaaaaatgtcttccagctaggctggcggctcacacctgtgatcccaacactttgggaagttgaggcagggggattgcttgagcccaggagtttgagactagcctgggcaatacagtgagacctcatctttaaaaataattaaaaaggtcaggtgcggtggctcacgcctgtaatcccagcattttgggaggacagtggatcacaaggttaggagtttgagaccagcttggccaatatggtgaaaccctgtctctactaaaaatataaaaaattagctgggcacatgcctgttgtcccagttatttgagaggctaaagcaggagaatcgcttgaacctgggaggcggaggttgcagtgagccgagatcgcgccactgtactccagcctgggcgacagagcaagaatctgtcttaaaaaaaaaaaaaattagccaggtgtggtggcacatgcctgtagtcccagctgctcgggaggctgaggcgggaggatcacttgagcctgggagtttgaggctgcagcaagccgtgattgcactactgcattccagcctgggtgacagagtgacggtctcaaaaaaaaaaaaaaaaaaaaaaaaaagcacaccagtgtcttccatttctcttttaatcataatcatgctttaaaaaataccctcgagcatatggagcaaatttaagataattgttccttttctgctaattcattattactgtcatatctaggtctgtttctgtcgactgtggaccacttatgtgcgatccgtggaccacttgcgtgcgatctgtcggccgacgatgagcttgttcggatgtagctccatcgtaagtcgaggagcatctgtgatttgtcctctgcttatgggatatgtttttccgctactgagtctgtgtagtaaatttttgactaggaa

SEQ ID NO: 1568 - DNA, 161 bp, Homo sapiens
gtgatcgtgcgctgtgtgtgtgtgtgaggtgcgtggtgtgatcgtgcgctgtgtgtgtggtgcacgccgcgtgatcgtgcgctgtgtgtgtgaggtgcgcggtgtgatcgtgcgctgtgtgtgaggtgcacgctgcgtgatcgtgtgctgtgagtgaggtg

SEQ ID NO: 1569 - DNA, 1971 bp, Homo sapiens
cagggcccaaatgacttcactgacacctgtttccaggagggggtcttcagagcctccttaggctcttgtcagtatcataaataattcctcttcttatagcggatggggttaccaaaaaaaataaaaagtagggaagagcttctccatgggatcagatcacagctttggggagtgggatggggcctctatgctttgatctatgcatgagctggggtgagaagttcccacctgcacctgactgcaatgactgtaatggctggaattgtcacctcttctccctgataggctcttcctcacctggaggatcggggctggtgggagggcagggaaggggaggccatcagccagaatgtattttctttcagttccatttcctgaggaagaacttgcttttaaaggaggaaagggacagaatcagacctaaataaaattcctgagtatgcaatatttctctttagtgtctcttcacctccctttctgagtttctttcctacatcctggctcttcattttcccaatgcccaatataatcatggttgctgaaattctcactgccttctactttcctttccccatcaattaacccactacaaaatgacccctttcatttctcgcttaagcatacatggtgggtcatttaactaagtgttaggaagaaaacaatttaaagacactaattttacagtttgcgttctgtaaaaggatacttgctggataatctaagtgaattgatggattaggtcatttgggattgtgatatatattgttcttgctgacaagaaatgacccatgaatgtctagatctatcctgtccaatattgtagctacatgtggctatctaaatttaaatgtaatttaattaagccaggcataatggcacaagcctgtaattccggtgactcaggaggcttaggagggaagatggcttcaggccaggagtttgagaccagcctcggcaacatagtgagaccctgtctctgaaaaaaaatttttttaactagctaggcatggtggcatgcgcctgtagtcccagctattctgaaggctgaggtgggaggattgcttgagaccaggagttcaaggctgcagtgagccatgatcatgctactgccctccagcctgggcagcagagcaagacccctactctttaaaaaaattaatttaattagaaactccatttctcagttgcactaactacatttcaagtgttcagtaaccatagtggacagtgcagatgtagaaaatttccatcactgcaaaaattctattggacagcactggtgcagatcattgctactcaaaatgtgatccatgggccagcagcatcaatattacctgggagcttacagaaatgcagaatttcaggcccactgcagatctaccgaatcaaaatcttcctttagcaaaatttctcaaacgattagcactggcctacatccattttatccttccttagctattagggatgtgaggtccgagggcttcaaaaggtccccggaatagcttgttccttcatccactgtgtcctattcattcttcagctaactccagcaatgagctgaaactcattcatcacccttgctgagttttcttctcaatccttattcctaattctggttctagatgagccctacctacccagtggttgtatttttgtagccagtgtgggacacaggagattggcagaccaacacagctagcctctctctagccctccctccacctctaagtcactaacaatccatgtttgttcagtttgttgacatgtggcatgttcatttgttcacaacttaatcacgggggacatttcagaaaaatgtgtactaagttaaaaccatgtttagtctcctacaacttgtacattttcattttctcttatcagtagattgtccttgttgacatagctcatgcatgaggacacatagcagtacacacacattgaatgaattgttagtcatgcaaaaaaagaaaa

SEQ ID NO: 1570 - DNA, 1971 bp, Homo sapiens; identical to SEQ ID NO: 1569

SEQ ID NO: 1571 - DNA, 1971 bp, Homo sapiens; identical to SEQ ID NO: 1569

SEQ ID NO: 1572 - DNA, 413 bp, Homo sapiens
tgcatgtcacatctaatactgtaacactttaaatagctttcatgtcagttttaatgttaatgggatttaatttattactaaagtacatttttgttggttaagggcactgcacttttctgttttttaatgtgggattttgcgtaaatattctgtacctaagactttgtgaaagtgtgtctgtgccataatcaacaaatgatatacatcacatgcaagtcaattttatttcaatctatcataagcagtaggcgtgcacgttaagaaaattctctggatattttcataaaattacatgctcccttacctgacaaaacttgttacagctttccaaaccaaaatttccacattttgtttctaatttttaatttcaatttaataattatttaatattctatttgaatttataatatagt

SEQ ID NO: 1573 - DNA, 1252 bp, Homo sapiens
tggaacttatttttaacaggaatcaaggaagaaaatattcatgcagagctatgacttagaaagttataggggctgccactatacagcacttctaaagtaaaacatcttctatctccaactgggctgtcaacatagtggactttcatgttctatggatatgaattctttaaggatatagcccttaattaagctgtaaaaacaatgcatctctcaaccttgacatttaggatctctcctgtctgccccctctacgccccactccaattaactcatcctacatctctcagatgtaagttggataagagtgggtttgaagtttggtaatacaagtggcagttttaaaacaccaaattctttagatcagctgaaaagaagagtgagaattgaaaattcctccactagtaattgttagccaatagaatagcctcccagagcagtccccacagcacttggttgccatgggtttctctcctctcactgcctgccccagtgccatgatgtctggggcttgtctcttctatggcatcccctgattgacttttgtatagcaacctctgtgtcaagtcagtaatatgatgccattgtaataggaggccttcctaaagaagtaactgcaacttttaaaacgtgatgattattggtttttataatacacaaagcattaattttttcttatcttattttctctttattatttctttccaacttttgtttggagacatttatgttagaagaaaaactataaagttttatcattgtagagaacagagagatcaaagacagctggactgtacctgtttgtgtaattatttctgatatttttaggaaaagaagtttaacagagtaactcagactgagactgttaaactctgttcatgataaactccatattacataatataggtgaacagattaattccctccatgtaactaagatactctatttacattatttatatactctcttagttttttatgcacttccaagttttagttggaaaaatgaaaaccaagctactacttaaaagttattaaaaacttcacataaaatatttcattttagctacaagttattcattgcataggattttataaatagtctgggtatttcataggaactgcatttcaaaagtgaattaaccaaacctaaaaaaagggttacttttaaaatgcattaaaataaagaagtttcatattcagttgataaggccattaaggtaggataatgcagttacatatacaaactaaaaaa

SEQ ID NO: 1574 - DNA, 1252 bp, Homo sapiens
tggaacttatttttaacaggaatcaaggaagaaaatattcatgcagagctatgacttagaaagttataggggctgccactatacagcacttctaaagtaaaacatcttctatctccaactgggctgtcaacatagtggactttcatgttctatggatatgaattctttaaggatgtagcccttaattaagctgtaaaaacaatgcatctctcaaccttgacatttaggatctctcctgtctgccccctctacgccccactccaattaactcatcctacatctctcagatgtaagttggataagagtgggtttgaagtttggtaatacaagtggcagttttaaaacaccaaattctttagatcagctgaaaagaagagtgagaattgaaaattcctccactagtaattgttagccaatagaatagcctcccagagcagtccccacagcacttggttgccatgggtttctctcctctcactgcctgccccagtgccatgatgtctggggcttgtctcttctatggcatcccctgattgacttttgtatagcaacctctgtgtcaagtcagtaatatgatgccattgtaataggaggccttcctaaagaagtaactgcaacttttaaaacgtgatgattattggtttttataatacacaaagcattaattttttcttatcttattttctctttattatttctttccaacttttgtttggagacatttatgttagaagaaaaactataaagttttatcattgtagagaacagagagatcaaagacagctggactgtacctgtttgtgtaattatttctgatatttttaggaaaagaagtttaacagagtaactcagactgagactgttaaactctgttcatgataaactccatattacataatataggtgaacagattaattccctccatgtaactaagatactctatttacattatttatatactctcttagttttttatgcacttccaagttttagttggaaaaatgaaaaccaagctactacttaaaagttattaaaaacttcacataaaatatttcattttagctacaagttattcattgcataggattttataaatagtctgggtatttcataggaactgcatttcaaaagtgaattaaccaaacctaaaaaaagggttacttttaaaatgcattaaaataaagaagtttcatattcagttgataaggccattaaggtaggataatgcagttacatatacaaactaaaaaa

SEQ ID NO: 1575 - DNA, 1252 bp, Homo sapiens; identical to SEQ ID NO: 1574

SEQ ID NO: 1576 - DNA, 413 bp, Homo sapiens; identical to SEQ ID NO: 1572

SEQ ID NO: 1577 - DNA, 10797 bp, Homo sapiens
ctcaagtcggtgctgaggaagaccgaggagccgcgcgccaaggaggccgtcgtcgccatggtaaccctgatggccagcgggagccgtcccccctgcgcggctctctgctccgtcatgaccctggacctgaagctccctcacctgcccctagatcggctccgtggagcgcttcatccaccacgtgaacgcgtgcatgcggcagcggcaggagcggcagcggctggcggccgtggtgagccgcatcgacgcctacgaggtggtggaaagcagcagcgacgaagtggacaaggtgggcgtgtgtgtctgcgggggttgccggctgggagagaggaaggcccagctggcaggcaggggctgtgctgggcatctcactgaggatgcctagctgagatgggagtcagtctctggcctcccctacgttcacgccatccgtccccagctcctgaaggaatttctgcacctggacttgacagcgcccatccctggcgcctccccggaggagacgcggcagctgctgctggaggggagcctgaggatgaaggaggggaaggacagcaaggtgattccagggccaccccacccctgtgccctgcccttcctagggacctcctgggccccagtcactggttctcagctctgcagtcccttcggtggttactcaagaaccagtgaccttgtcatagtgaatgacagttctctgcctgccattcacaaatccagcagtagggtcctagcccttgaaggcaccagttgtgcccatttgttggtgccacatgggttcctggtgggagggcagccatattccacaagtgggccaggaaccccagagccttgctactgtgccatggccccttcaggcatggggcaggctgagagcttgcacacggtgacttcaaagtcaccagtcttctttttaatgtaaacttgtattgagataagtcatcaacgtacatctcagtgaaagagaatcatcttcctcttcattttaattttacttgaaggttcatggtgggaggagtgtttgacaaaaaccgagtgctcccaggggaggctggtgccacagtccctggccctgaccctgctggcctctctggccaccccccctcctgccactgcagatggatgtgtactgcttcctcttcacggatctgctgttggtgaccaaagcagtgaagaaggcagagaggaccagggtcatcaggccacccctgctcgtggacaagattgtgtgccgggagctacgggaccctggtaaggagccctggtcccctgttcctggtcaggggctgtgatgggtgggggccatcgtctctgctgacactgacttgggccttccctaaccagggtccttcctccttatctacctgaatgagtttcacagtgctgtaggggcctacacgttccaggccagtggccaggccttgtgccgtggctgggtggacaccatttacaatgcccaggtgagtgcagagtagtgagtgggtgggcaaggcagattagggagatgctggtcacaacccattctgtcccatgtaccccaaccttgcctgcagaaccagctgcaacagctgcgtgcacaggagcccccaggcagtcagcagcccctgcagagcctggaagaggaggaggatgagcaggaggaggaagaggaggaggaggaggaggaggaggaaggcgaggacagtggcacttcagctgccagctcccctaccatcatgcggaaaagcagcggcagccccgactctcagcactggtacgtctgctcatgaccacccagcaggtcaaaccaggacaagtactctagcccaggactcctgaaggcccagccacgctcccttcctcccaatggcctcttgtcatgaacactgtgggagcggggctctgtctcccccagagtccgggtggggagggcagacacctttccatgtgctgccagccctgatccattcgtggtagctgcctggggtgctgtgctgaggatccttagggcagatccagccttggcagggaagagtgctgggctcgctactgaggtctgttgtgggcactggagctggaagatctgccacacctgccacatgctgccatctctgagcctccagccccaggagggcagagggtataaaccaccgtgcattgcccagcctggggctgcctcaggccatctaggtttcatggcctgggctgactctgctcctggccccacagtgcctcagatggctccacggagaccctggccatggttgtggtagagcctggggacacgctgtcctcccccgagttcgacagcggtcctttcagctcccagtctgatgagacctctctcagcaccactgcctcatctgccacgcccaccagtgagctgctgcccctgggtccggtggacggccgctcctgctccatggactctgcctacggcaccctctccccaacctccttacaagactttgtggccccaggcccaatggcagagctagtgcctcgggccccagagtccccacgagttccttcccctccaccctcgccccgtctccgccgccgcacccctgtccagctgttgagctgcccgccccacctgctcaagtctaagtccgaggccagcctcctccagctgctggcaggggctggcacccatgggacaccctctgcccccagccgcagcctgtcagagctctgcctggctgttccagccccaggtattaggactcagggctcccctcaggaagctgggcccagctgggattgccgaggggcccctagccctggcagcggtcctgggctagtcggctgcctggccggggaacctgcaggctcccacaggaagaggtgtggagacctgccctcgggggcctctcccagggtccagcctgagcccccaccaggggtctctgcccagcacaggaagctgaccctggcccagctctaccgaatcaggaccaccctgctgcttaactccacgctcactgcctcgtgagtggcctggactggggtagggcaggtggctcagggcactggcatgggggcccactcatgcctgggagcatcgcatttggggagggtcatggcggagggagcctgaaccctgcccagtgtctgggcgcagggggctgtggtgggcagcagtgaaggggcctgaggagtgccgtggggaagagagggtgaccagagccactctgaatggcgtcagccaaagaaggactctgtcccctccccaccctgtagggaggtctgagcagagggaggcccccaagagtgccattgaccaagagacagcagacagcctgcctcctggggcgtgccggcacctgcttcagctactgcctcctgtatgcatgagccggatgctgggcaggatccctgcctacgcccgggcccgatttgcgctttgccggactggatggagtggaggaggcccaggccacagtaccaccccacctgcccaggcagcccctcgtcacctactccccgaagttaccagctcagctcgagtcttcagggctgggctcctaggctgcccatcctacttctaccctcactggcctccagtgggattcactcctgccctgcccccaccttcccagtcccacaggccacccctggcttgggctgggttctgtgaagttacgtatttattgagcttttggttcttttataaagacttgtctagactccactgggaagagtcctttgctttggggcccagtgactcggggcacttgagttcagggcggcctccttgtgttcctgtgctcctccacttgccacggatgggccacggatggagcttgccatgggaagcactgggaagtaatggggtgtggggtgccaccagaccaacacccccagacttccccaccttcagccaccatcagagcctctccccaggtgccccccggggattcagggctgaatctgcccagttcccacactcaggccagccctcttgggaaggtgggtcctccatgggggtcccttcaggaactttttttttttttttaatacagagtctcactctgtcacctaggttggagtgcagtggtgtgatgtcggctcactgcaacctctgcctcccgggttcaaacgattctcctgccccagccactctagtagctggaactgcaggtgtgcaccaccacgccgggctagtttttgtattttaagtagagacggcatttcaccatattggtcaggctggtctcgaactcctgaccccaagtgttccgcccgcctctgcctcccatagtgctagaattacaggcctgagctactgcgcttggccccttgcggtacttttggcccaacctcctccatggctggggacgcggaggccgagagagaagtcacttgccctggctctaccttgaagtggttctcagggttggggcgagagtcggggtggggaccgagatgcagctctatcctgtgcccctggtcgcagcaggcagcccagcgcttcgcgtgttctacttggcctgtccgctgccgcctaatgagctcaggtctaggccgagcagagggggcacctggtcggactcggttgggctcgggcggccccgcctccccccgcccgccaggcgggcccttctagacggcgcggggcgggccctgcgggcgcggggctgaaggcggaaccacgacgggcagagagcacggagccgggaagcccctgggcgcccgtcggagggctatggagcagcggccgcggggctgcgcggcggtggcggcggtgagttgagacgcaggaggctaggggcagctttgagccctgtcccaagagcctcggtgaaggaaggggccccgggcgcgtctccactccaagcctcactgggggctgggttggccgccctttccgatctcgttaaaggctcctccagggcgtagcccttccactgagaggaaacccctcccaggagggtctgggggccccaggcagagcattatcagtgtccctcccccaacagaaagcatgggtgggggtgggggcgctgctggattcctgctctggtggaggggaaacttgtgaggggctggtaagcgccccctccgaagcctggtgtgtgcgcggggggaaggaagttagtttcctctccacccatgggcaccccttctgcccggggcctgggaagtgggctgctctgtgggcaaatgctggggcctctgaaatggaggagacgcagcagggagaggccccacgtgggcagctgcgctgagagtcagcagcacctgtcccccaggcgctcctcctggtgctgctgggggcccgggcccagggcggcactcgtagccccaggtgtgactgtgccggtgacttccacaagaagattggtctgttttgttgcagaggctgcccagcgggtaagtggccacaggggtgggagaggcatggggcaggcagggctggagaggtggcgggcaggcccgggaggtaagaggaggctggcaggggaggtaggggtaggctgacagagaagtagggagctggagagaaagagggagggagggcagggtggaaagcaggtcgggggttgctgggcagcccctctgcctgcctgacccctgcctggttccacagggcactacctgaaggccccttgcacggagccctgcggcaactccacctgccttgtgtgtccccaagacaccttcttggcctgggagaaccaccataattctgaatgtgcccgctgccaggcctgtgatgagcagggtgaggggcttctcagtgcttggcagggagttcctaaggacaggcctttctgaaggaagtggctggctcgggcccaaacttggggtgtgagggtcctgcacccacccttgccagaaccctccaccctgatcctccttcagggtgcccttgccccttctctcttcctggtgaccttcccatctctccatgtgccttggcctctggtcggccttaatctctgagcttctctcttttttagggtagccctgtacctgtctgtctttcgcctatttctgtctccattatcttgggataatgcctctgcctctccatgggagcctttggccctgactaactctccactccccatctccctgcacccccaccagcctcccaggtggcgctggagaactgttcagcagtggccgacacccgctgtggctgtaagccaggctggtttgtggagtgccaggtcagccaatgtgtcagcagttcacccttctactgccaaccatgcctagactgcggggccctgcaccgccacacacggctactctgtgagtacccccacccagggctctctactcccagacccccttctccctgcctgacccactcctgtcccatggtgacgcatgcctctcctggattgcaggttcccgcagagatactgactgtgggacctgcctgcctggcttctatgaacatggcgatggctgcgtgtcctgccccacgtaattcctagctgtcgtgggatggagggaagggcggctgggagcagagcaggggcctggggtggggcaggtgctgctggttcaggaataggaagaggggatagggaggagggagccttggccctgtgatgggtgggccccacttcaggcaaacttagatggcaaaagagcaatctggatccgccttagccagatacataagggtatttgccttcactttcagccagcattccccccagcgatcctagccagatattacagatgatttgtcacttacacagagagtcacattgatatagctttaaaacttgggctgaaggaggttgaggctgcagtgagctatgatcgtgccactgcacttcagcctgggcaacagagcgagacctattaaataaataaataaatattaaatctattaaatattaaatattaaatctattaaataaataaatacaaagggctgagagtcaggactgtgctgctagttctctaggggatcttgggcaagtgcagagaattcgcgtctctgatgtgtggtgtccctttctcaacatgggatgttagcagctaattcacaggcctttgatcagaggtaagggactttctgtagctattcaagtcttttttttttttttttttttttttttttgagatggagacttgctctgtcacccaggctggagtgcagtggcacgatcttggctcactacaacctctgctgcctgggttcaagtgattctcctgcctcagcctcccaagtagctgggactacaggagcccaccaccacccccggctaattttttgtatttttagtagagacggggtttcaccgtgttagccaagatggtcttgatcacctgacctcgtgatccacccgccttggcctcccaaagtgctgggattacaggcatgagccaccgcgcccggcctccattcaagtctttattgaatatctgctatgttctacacactgttctaggtgctggggatgcaacaggggacaaaataggcaaaatccctgtccttttggggttgacattctagtgactcttcatgtagtctagaagaagctcagtgaatagtgtctgtggttgttaccagggacacaatgacaggaacattcttgggtagagtgagaggcctggggagggaagggtctctaggatggagcagatgctgggcagtcttagggagcccctcctggcatgcaccccctcatccctcaggccacccccgtcccttgcaggagcaccctggggagctgtccagagcgctgtgccgctgtctgtggctggaggcagagtaggtggtgtgctgggaatgcgagtgggagaactgggatggaccgaggggaggcgggtgaggaggggggcaaccacccaacacccaccagctgctttcagtgttctgggtccaggtgctcctggctggccttgtggtccccctcctgcttggggccaccctgacctacacataccgccactgctggcctcacaagcccctggttactggtaagtacacacacccacacacgcacccagaagcctggggtcaggatgggtagcccagagtctactcaaccctgatacagaaggggaaactgaggcagggagtgtggggtgcagaggaaccctagaggagctgtaccagcacccaggtccaggaggcttgcctggtggctgaccgcaatctctctgtgtctgtcagcagatgaagctgggatggaggctctgaccccaccaccggtaagaacctcactgtgtgattctgggctgccttctggagctggaagatcaagccttactatgatccctggagcttggcacgcggccagcaccgggtagccctagtggacagaggtgttgggagcagagtcatcagtggatgagaccagcacagtgcctgccctcaaggggtgctcagtcagctggagttcagattcgtacacaggagctaacagttcaatggaaggagagccccatggtgctgggggacaagaggaaggaggcgggggcaggggactcaaggcagaagcaagagttctgctgggctacagtgagagcagggccaactgtgggaggtgtcattgcgggggtgtctgctgactgaaccagggactgtcccctcctggagaggcactgcgggtaaggggccttacttggcaagcagggctgacctggggcccctcttggcttccaggccacccatctgtcacccttggacagcgcccacacccttctagcacctcctgacagcagtgagaagatctgcaccgtccagttggtgggtaacagctggacccctggctaccccgagacccaggaggcgctctgcccgcaggtgacatggtcctgggaccagttgcccagcagagctcttggtaagggacatcagtggcctgaggccttgaccccattctcctgtctgcggtgggaagttgtggtttcacaacgtgttccctttctgccccctaactgacggagtccgccctatgccctgacccaccggatccagcgggcttcagccctggggtacccgcacgaacgcccctgactctgcctcccgaccgcggcccacgtaccccaattggctctctctggccctgccccaggccccgctgctgcgcccacactctcgccagagtccccagccggctcgccagccatgatgctgcagccgggcccgcagctctacgacgtgatggacgcggtcccagcgcggcgctggaaggagttcgtgcgcacgctggggctgcgcgaggcagagatcgaagccgtggaggtggagatcggccgcttccgagaccagcagtacgagatgctcaagcgctggcgccagcagcagcccgcgggcctcggagccgtttacgcggccctggagcgcatggggctggacggctgcgtggaagacttgcgcagccgcctgcagcgcggcccgtgacacggcgcccacttgccacctaggcgctctggtggcccttgcagaagccctaagtacggttacttatgcgtgtagacattttatgtcacttattaagccgctggcacggccctgcgtagcagcaccagccggccccacccctgctcgcccctatcgctccagccaaggcgaagaagcacgaacgaatgtcgagagggggtgaagacatttctcaacttctcggccggagtttggctgagatcgcggtattaaatctgtgaaagaaaacaaaacaaaacaaaaacggcttcttggcgtttctgcggggctggggtgttaagtggactggacttttctcgagggattcgaaggggacgggaatcttgtcaccccgggatctggcacccatggtggagtccagtgtggccttagctcccaagcctgcccctcccgagtccactctggctcaattaccccgagaaggagagagcaagtcgcggccacagcgagtgagtgaaccggagcccagatgagagcgctttaatggggctgcgaggtggcggagacagggtcgggatggggtgcagcagttggagacacagggtcagggcccctcatcctctattcactccaccggggcagtgaaagggtcccggcagcgagtgggtctggctggggacggggcgcagacttgagggaggtggggccagaggtggggtcccgggggccacaagtgcggcccggccagacaggcagttttcatgtttctggtaaacaaatgactgagaggaaacccttggcggggataagaaatgaggcccgggctaggccgcgcgcagatctgggtcagagaggaagggaaaaccccttccccgagctcggggcctgcctccacccaggatgcgccagcgacgccggttccggggtgcgggggagggggctgcatcctggagggggctgagccccgcaggaaaacaaagtcaccacccacggggctggggagagctctgcactctttgatagtcaacgaacatgcaaatatatgtaagtcggcatgcaaataagcagcatttgttgttgtttgcgtcagcagcttgggcactttttctgggcaaccgtggcggcgtgtgcactccagtgttgccaagggctggggatacggggggccagggtgggggtcagggagggtttccagcgcaggaggggagggctgtgcggctcccagcctttccaccagggcctggctggctggggctggggcggagggccccacggagctgcgaggctgcggacaggagtctgcggcctctagtacttagcgatgtcccccttcttcaggatgacctgtcgctgccagggcgccagcttgctctcatcgtagcccagcgtccgcagcttctctgactgttccttctcccgccgcagctcctcctgcttctgtcgctcctcctctttcc

SEQ ID NO: 1578 - DNA, 105 bp, Homo sapiens
ttacaggagcgtgccaccatgcccagctaatttttgtatttttagtagagacggggtttcaccatgttggtcaggctggtcttgaactcctgacctcaggtgatc

SEQ ID NO: 1579 - DNA, 12822 bp, Homo sapiens
cccgctgctgaatagctgagaggcgcacccgggcggccagctgggctcggagtgcagcggggttaggatggacgaggacgtgttgcaccctgaagagcctcatcatcggtgagagtggggtgggcaagtccaggtgaggcgggcgtgcgggctgtgatgagggtggctgggctctttctgcctccgtagccgctgtctcttgggccgcggtgggaactgtcaaccgctgcaagtgtccacgatggcggccgggctcgggccggctccgcccgcgccctcctcggcctctgggccgcgctctcccgcgacgtttgctttcctctccccacccgcgcctgcctgttcccggcctctgccacgcccaagttctctgggtcgctctccctcctgtggcgccgagaaaacaccattccgagggccgccgctcggccggccggtttgctgcgcggagctcagggcgtggcgggctggtttgggcccgaatccggccgggggcgcctcgcctcgagcccctcggggttcaggctgcctgccaccccgagacccagaagacgtaactttcccgcttgagggtttctgtggggccttctctaaatacataatgtcctcgggaagtttcgtgatgccttaggacccattcctggcctgtttgggcgcagcttaatgtcgcttcttttacttttttattagtcgtctgtgaaagaacagctggatcttgtgaagtgctggaaattttctctttagtgtaagtggtccacggctgaagcagtcggaccacctttgaaaataacgtgtaattgttatttctcattttgccacatcctgtggagacaaaagattagtgttgtgtcttttcattttttatttttcttcttggggaaaataatattgacaatggagttgagtataaggtaagacatggatctaggtggatgttgctagagggttgtgatttcatcgaggtcttggaacagagttcaggtgaagtcattcttgccatctgattatgagtaggttatgttcaaggccgtcctaatccttaaaccacatttacactccaggggctgtaatcagtttcatattttagctataccttctgatacacatattttttttttttttttttttttttttttgtgacggagtctcgctctgttgccgaggctggagtgcagtggcgagatctcagctcagtgcaatctccgcctcccgggttcaagcgattctcctgcctcagcctcctgagtagcagggatttcaggtgtgtgtcaccacacccggctaatttttgtactttagtagagacggggtttcaccatgttggccaggctggtctcaaactcctgacctcaagtgatccacccgcctcggcctcccaaagtgctgggattacaggcgtgagccaccgcggttggctgatacatatctttcaaataacttgttattcatgtaaaattttataaatggaagtatccttatacaaagtagaatgaaagctttcctcaggtaacttttaaaattacaaacctgcacattctgcacatgtatcccagaacttaaagtataataaataaataaataagattacaaagtcctacttttttagctacttcaggattttaaagcttactatgtaatatattctgaattttttttgtatttttaaagtttgacaatacatttttccagtattcctcacttaatgtactctatgtctactgtagtcagaggggtttgcacataccaaggaatagaataatgaaacactatgggtaagcaaaccagtatgatttgtgtgtgtgtataaaagggatgaataaaattatttacctgatcatctgttattgcatgtacatatttgagggttaaaaagttaatataataaaaattgccttaataggaattttataatcttgtgatctttctttttcatttctcttttttttccttgacatgttggttctcatgtaagttcaggcatatgaaattggcatttttgaagtcacgaatggttggttgtcatttcttgtagttcaacccaatacatgaaattgggttgaaattggttagcactttatgtaaatttattgcatgggtgacaagttagggtggttaaaattttctggaacgttaactggagtatataaatgagattcgttccccgtcccccgtccccgcaccactgcttttttttttttgagacagggtcttgttctgtcacctgctggagtgcagtggtgtgatcacggttcactgcagccttgacttgcctggctcaatcgatcctcccacctcagcctcctgagtagctgggactacagggacgaatcaccatgcctggctagggttttttatagagacaaggtgttgctgtgttgcctaggctgttcttgaactcttgagctcagtggatcttcctgccctcaatggatcttcgcaaaatgctggtatcataggcataagccaccataccctgctctacttttaaaattttttttgtagatgggatttccctatgttgcccaagctagtctggaactcatgggctcacgccatcctccagccttggcctctcagggtgctgggattacaggcatgagccatggcacccagctgagagtccctttttagaataaggtctgttaagtgggatttatcagtctctctacttcactccccagaaacaaatgtatttaggcctaatcttttttaaactttttcctcaatgtgtagtggtggattatcaactgctcactgcaaaattttggcactgtattacctctttcgtgaaaggactgcatttagtgagaaagttgtcttatttgtctggctagatatacattattggcctatgtgatatgctatggaaaagaaccttaaacacttatctttctggataaggtgggaataaatgactccactaaaatagaagcctatactttttaaagtgagttagtacagaaacatttgtcatgggtgtgaccttaaagggttgtttttaccaagtttgttctgtttctttatagagctggagctagtggaagtgaaatagcactcatgttggggaattattgcacaacaaaggatatctttaagctgaattagtggattactttctagtgtatttcatggcgttggagtctaaagggtatatgatagtaatcagcagatcaggattatgaaactggggctgccacttgtgtggccttgtgtgtgatccttgaatgctctaggccttcatttcaaaagtgagggggttggaatagaaacctctcaaaccctatctagtgttaaatgtataagactgcgattctgtagctaggcccggtgaggtagaggtagcagagtgtatcaagaactggaagggattaaagagacctattttgtaaattgctgtccctcctatgcataccctagccttgccattcgttttggtgaatttcatttgtagataaagaaatgcagattagttataatcacactctgtttgttgtaaatttggtctcatctaagtgccatggtggtagttactccttccatctctacctctgcatggaaagcattttgctcctttaactttgaaatatgaaggtgtaaatatacaatattgtaagaatggtgcttctaccaggtgcggtggctcatcctgtaatcctagctactcaggaggctgaggcaggaggatcacttgaggccaggagatcgagaccagcttgggcaacatagcaagaccatgcctctaaaaaactgaaaaataaaaaaattagccggccatggtgatgcacacctgtcgtgccagttacttggggggctaaggtgggaggattagtgagctgtgattgtgccactgcattccagcctgggtgacaaagtgagaccctgtctctttaaaaaaaaaaaaaaaaaagggtccttcttaatcattttgagattgcccattcctttcaaaatgtaatagagaaatggactctctgcccctttcaaagtctaataaatagagaaatggactctctgcctagaaaaatgcacacatggaatttagaatacattttgggctaccagggtacccctggctaagatctgatgtgtacccagagcctgtattaaaatttgttgcttcacaccatgccaccaattccctgcctctcctgacaaagtaccattaatgacaatggctgttgtaaggattagcaatcatgagagaaaaacctctggctttttgtctgcacattgccatatgttcaataaataatacccaatatcattattattacttgtattattattattattattattacaactactctacaaggttatattaacttatgtttttgtaataatattttctgtggtgaccacgtgtagatatgtatcttttctattcttagattatgggtaactgttgggagagaagaaaatttttgtaagttttattttagagtcttattagtgctgtcacctaacttatgtttgaagtaagtaaatatagttaagatgtgaaatagagaaatcttgaatttgactctcctgttttactttgattctgtggtgctcgttttatggtaaacacaagaaaacaaaaccaagtaaggcagagttaatccttcaaatataattaatgacactgggtttggaaactaccaggaggtcattatgttttgcagaatactctgtggacaaaacatatctctagcagcagtaatcacaaccttatgaatattagaatctaattagaaattagaatattaggaatattcatcagatttttctataatttagacatctgatgactgtttctttgattttattaatacaagcaggtcaacaggacagacttatactttagaagttaacaagtgaagttgagtgattttaaaatttagggctttaacattagcttttatttttgaagagcttctaataactgacacttctgcttcatagttagtaaaataattctggaagatgaaaaaccttagagtatccttctaatctggtgtcttttgcttttatccttcctttctagtttcctaccatttcctaggtttagtcctttgttctctcctgccataaccgtggcagttttcttctgttgatttttcttccattttttgttggcattaacttttcaaaacaaagagcagttcttgtcataactttgtttaaaagccttcaatagcttccagttgcctacttggttttgtaaaccctacctggtgtttgcctgagtatacctactctgtcctgtgatcttttttttttttacctctctttttactgtatcttttcttcccacttaggtggtagccatactgcctgttatagaatgctaggctttgatatctttctgtttgtgcttgaatttaaagtggattacacatcagatttttttaagttactttactttgttgcattccaagaaactttattttttctcttttcatccatgtcaattaaagcatgacatgttgctaatatcagtgtctcaggacataccggaacagttaaaaacaacaacaaaaacccccaccttttgtacttgggggattgggtaggagagcatggggaatatatttaatagtaaactactttgctcttggcagtttttaaattgcctttctagtaatttaattcttctgtgtatacctgctctgaggcagtatttctaggagcaggcctccatcagttatttttatctgcatttaataatttgtgactggatataataatcatgaacacacttatcatatgattagaaagaaaaattctaattcctaacctgtctttttaatatctctttcagcctgctcttgaggttcacagatgatacctttgatccagaacttgcagcaacaataggtgagcctgtgtttaaaaattcaatagaaatgtctaatattttcttgcctttgggcttttttatctaaatccttctaccttcctcttaccacgccaccacctccatgtctgttgacattttatttgtccttcaagatttaactttggtatcgttaaatctcttgaagcctttctagatcttaccaagagaaaataatttccttatctgttgtatcatgggactttattaaaactactgatattatggttatctatacacacatttctttcctctattatggattgtcttttattttgcaatatacaacagttatttgagtacttactgtataccaggcactgttactaagaggtgggggtataatagtgaataacataaacttggtctctgtcatcatggacctaacagtaaagtacattaattgtgtatgttcagcatttgctacagtgtttgacatgtattctgatctttacatatgtattcatattagttattaaggactgttaggagcaatgatacttaaatgccttttaaagataaaatttagatggcctgaaagtggttagtcacactaacttatgaaaatatatgagaagatagagataagtattttggtgtcatgtgtttagaccatagacaacaacgtaaaggaatgaaaagaccgcttggaatagttgaaaggtagctgagctgagtcagagctagataatagtcttggctttgccttgaattaggtgtaatcttgacttactaacttcatctgtaaattgggaggttttggggagagagaatacttttttttccctgagctttaaaatttaaatcataaaattttaaatttgatgatctgatgagagtatagtaaagatgatcctagcagtattattagggaaagcaaatagtttatcttaactgcctttatttgtttacatttattgtatgtctattttttcagactcatatatctgtaaaaatagcaaaaataattcttgtatatcctactaaattactccatccaaatgttaatatttgtcacatttgctttatcattctctctatgtatacacacacagtattcttttaaaaaaatgcatttttttctggttttttaaaatgaattatttgagagtggattgcagacatgatgtctttaaaatgtctacatactttgtatatttcttaaatcaacatagatacaactctattgtctatacacagattttatcagttatcccattaatgtcctacatagcaaaagacaaataatcgttttgggttcaggatcatacattgaatttggttatttctcttcagtctctctttttttttttttttgagatggagtctcgccctgtcacccaagctggagtgcaatggtgcaatctcagctcactgcaacctccgcctcctgggttcaaacgattctcctgcctcagcctccgaagtagctgagattacaggcacatgccactgcgcccagctaatttttgtatttttttttttttaatttttgtatttttagtagagatgggatatcaccatgttggccaggctggtcttgaactcctgaccgcagatgattcacccacctcggcctcccaaagtgctgggattacaggcatgagccactgcgcctggccactcttcagtctcttttaatctgaacagttcttcagtctttgtgtttccagggccttgacatttttgaagagtaaataattattttgtagaatgctgcttaatttacatatattcggtgtccttatggttggattcaggttatgcacttttggcaggaattccacagaagtgtttctcagagcacagtgtcaggaggcacatgatgtctgtttgtcccatttactggtgttgggactttggttactattgggtgatacatgccaactttttcctctgtgaagttattatttttcctcttgtaatgaatatatttcttttggagagatacatcgaaactttattagatatcctccttttcatcgtattctttgccctcttattttagcatccattgatattttttgcctgtgacaagcgagaaggacagtatatgatcctgctgttctaactgtggtggctatcaaatgacaatttttttcaaatgccatcactctgtctacatatcttatttggaattctgtaaggaagggctctttgttttatttttaaatttgagacagagtctcaccctgtcactcaggttggagtgcagtggcatcatctaggctcactgcagcctccacttcccaggttcaagcaattctcccacctcagcctccagagcagctgggactacaaacgtgtgccaccatgccgggctaatttttgtattttcagcagaggtggggtttcaccatgctgctggccaggctggtctcgaactcctggcttcaagtaatctgcccaccacaacctcccaaagtgctgggattacaggtgtgagccactgcgcccaaccaagagctcctttttgtttttctttttttgtgaattcggattctttatattcaggagttttacttaaactttgaatctgaaagaaactttaggaggagctcatagatttgtgggaagaagcaaatctacattattttctctcttctaaaatcatattccatgtattttgatcttttactgaattttaacacattgtttcatcactaacataaagtgtttcaatagtttttgtaactcacacacaaatactggatttaaaagttatatacctgagtatatttttgtggcaggtggtccactttacatcactttccagacaactggaatttgagacaatgtctgtgacagcagtccctttgttttcacctggcatatgttctcatcatactgcttgcagtcatatcatgctgcaggtaaaaagctttgattggtttttaaatctcttactttgtgaaaaatattttattgtggtaaaatatatatgacataaaatatgctattataacaactcttacatgtataatttggtggcattaattacatccacactgtcatgcagccatcacaactatctgttcccaaatatttttcatcaccccaaacaggaactctgttatcattctgcagtaactccccatcaccaccagccccccattgccagttaacctttaatctgctttgtctctgtgaactttcctattctaaagatttcatataagtggaaccgtatatttgtctttttgtgactggctcatttcactaggcataatgttttcaaggttcatccttgtagcatgtatcagacttcattcctttttatggctgaataatactgagtcctccaactctgttcgtctttttcaagattattttggtcatctgagactccttgcaattccatttgaatttaaggattggcttctctatttctggggggaaaaatggttgtcagaattttgatggggattgtgttgaatctgtagattgttttgaataggactggcattttagcaatattgagtctgccgacccaggaactaaggatctttccatttacctaggtctttttaagtttcttttaccaatgtttggtagtattcagcatgcaggtctttcacttccttggttaaatttattcctaagcattttatttgtttagcgctatttaaatggaatagccttcttaatttcctttttagattgttcattgtacatgtacagaaaaacaactaatttttgtgtgttggtcttgtatcctgaagctgtgctgaatttattaactctagtagtttccttctggattcacatgtatgtacttctagctactcgggaagctggggcagaaggatcagttgatccaaggagtttgaggccagcctggaaaacacagcaagacacctacaggtgtgtgcccccacatctggctaatttttgtatttttagtagagatggggtttcaccagtttgcccaagctggtctcgaactcctaggctcaagcactctacctgcctcagcctgccaaaatgctggaattacaggcatgaaccaccgtgcccagtctaaaactgtgatatcttgttctcattaatagctgtagaaattataacttttggctgggtgcggtggctcactcctataatcccagcacttagggaggtcgaggtgggcagatcacctgaggtcaggagttcgaaaccagcctggccaacatggtgaaaccctgtctctgctaaaaatacaaaaaaccaggtgtggtggtacacacctgtaatcccagctactcaggaggctgaggtgcgagaatcacttgaacctggcaggtggaggttgcagtgagttgagatcgcaccactgcactccagcctgagcgacagagcaagactgtctcaaaaaaaaaaaaaaaagaaaaaagaaaagaaaaaaaaattataactttttgtaaatttttattaggttggtgtcttctactatttcagttgcataaatatcatttgaggtgggcttagtctttgaaggctctttccagcaggtgtctctttcaccaggcttatttataagcctttattttttttttttttacagtaaaagaaagtctataatatatcaactgtgccaagggaagacaacagtaaacttacaagtctctttccagcaatctaaattagtaattcaacaggacaaaataaagacatttttagacaagagctttatctctctgtgctgcctcctggttaatttccttggttttatctttcagtgtattaattctttccagccgtattcagtctgctgctcagtatgaccaacgggccttagattctctgtgtgtgtaatttttacttctagaagttctatttggttctattgcaaatcgacttcttgatttctactttatacttttatgtccttaatttgtttaattacacttatttatagtcttgttcagattgatcaaatctggttgctcacattttctgttctctctcattgatcatgtgttttattatttggaattatgagctcatctttagtgagaatctgcaatgatttgatttaggcatttatcttccagctctgttctgtatttgcttcttccagacaatgcaggaatcacatgaacctgtccatccacagataaagtggtaaagaaactgccgtattagatacatgatggtatactcttcagccataaagcttcgggaaaccctgtcatccgcaaccacgtggagaaacctgtccatccacagatgaagggatcaggaagctctggtatatatactgaagggaaatgctttttggctaccaaaataatgaaattttgttgtttggagcaacacagatgaacctgtccatccacaaatgaagacatcaagaaactctagtatgtacacaaggcaaaacacttcagctatcaaaatcatgacattatgtcacttggagcaacacagttgacccgccaaggcagcctcttcctccatagatggatgaacgctgtggccgctgctcctgcctgggccatgccctgatgctgccaacaccactgctcctctatttataagtcttagtagagttgctgacccagcaataactgaacagctgatatgtacctcacactaagccaggcgcttcatatgtatctaacttgaaaaatgctgagctagttaccttaacaccattaacttttacttaaaagtttgtttttcttttttaatcccagtgagctccaaacaagttttaggaggctccccaaaaccagtgaagactttaactaaaagtagaatttcaaagtattagaaaccaaaccccaaaattaaatgtgaagatcagtgtctgtactgagctggcccatctggtggacacaggatttgcgttatcgactgcaatgttacccaggattcacgatttctagcatctgtcagggttaagaaaattggattgagtaccaaatacagcagagcaaacccggctttgaggcaagggccccatcaagtagtcatgcagtacttttgttagggttctgggtgcaaatcttcctcgtccctcccaccttctcctggcctccttgtaaacccaaaccgccaggtacctcaattttcttcaagaccaggctgttcttaatgttggtaaattggtcaaggaaatgggtgagccactgcttgctctgcacatcgtcctcagagtgctcggtcttcaggcagtacagcagctgcatggctttggcctgcaggagtaagtggcccattcctaggctgtccccaaagatgtgtcctctgaagaagctggtcaggtagagggggtgtccactatggttatagatggggaaggagatgctgcccaggtcgagcgttttgtccacctgccaggtgtacaggagtgggttgggggcaccacgcagagcatcttgtacctcgcgcacacctgctggtactggagctggcttgcgtttccctgtgccacacgcagatcctgcactgtactgtccagtcaactgacttcagcaaagatgtctgggttcagcagcgagttgctgtgtgaggccaccagaatggaggtgatatcggcctcagtgctcatcctggaggtggagaagtggtcagagtcctctgtggtgaaatggccctacaccaaagtgggagacattcagaatcgaggcgaaattggcctcagtgctcctcttggaggcagagaagcagtaggagtcggtggtgaaatggccctgtgtgaatgtggaagaccagcagattggaggtggaattggcctcagtgcttgtcctggaggtggagaagcggtcagagtccttggtggtgaagtggccctgcacaaaacgttgctcccccttggccggtgaaagaataaaagaaagctggccacttgcatttccgtttcagtttatagaatacatgttttggaaatagtatcttctagatctgtctttttctcttctgatttaacttagtaaagctaagttttatctcttca

SEQ ID NO: 1580 - DNA, 1021 bp, Homo sapiens
tgaaaggtagagagaagattacttgatcattatgtgcttatttgaaagtcactttcctcccatgcctcaacatctcactttttagaatgcacactgaatgcctggaatctctttgttttagaaaagacaaagttgcattgttttttttttttttttttttttttttttaattttttttttttttttattatactctaagttttagggtacatatgcacattgtgcaggttagttacatatgtatacatgtgccatgctggtgcgctgcacccactaacgtgtcatctagcattaggtatatctcccaatgctatccctcccccctcccccgaccccaccacagtccccagagtgtgatattccccttcctgtgtccatgtgatctcattgttcaattcccacctatgagtgagaatatgcggtgtttggttttttgttcttgcgatagtttactgagaatgatggtttccaatttcatccatgtccctacaaaggacatgaactcatcattttttatggctgcatagtattccatggtgtatatgtgccacattttcttaatccagtctatcattgttggacatttgggttggttccaagtctttgctattgtgaatagtgccgcaataaacatacgtgtgcatgtgtctttatagcagcatgatttatagtcctttgggtatattgaaaactggcacaagacagggatgcattgttaaaaaaataatatttctggggaaaaggctcagtgctcaacggttactctataaagagatttaaaaagaaagtcaagggaagataaggaaggtagcatggctaacaacctcgtgggttctactagcattatttcatgcaaaatgtcattaacctttatataggagagaataagtctgggaatcaactggcatctaaactccatttcttgttttgtcactgcttccctggttgactatggaaaatacatttggtcttttgataccttggtttcaacaactataacatgacttaagaacttttatgc

SEQ ID NO: 1581 - DNA, 9717 bp, Homo sapiens
caggtgtctaatatcctggggatggatgtgtgtggcattgacctgctgatgaaagatgacggctccttctgcgtctgtgaggccaatgcaaatgtaggtttcatcgcctttgataaggcttgtaatctagatgtagctggtatcatagcagactatgccgcctcccttctaccctctggccggctcacccggcgtatgtccctgctctccgtggtgtccactgccagtgagactagtgagccggagctgggtcccccagccagcactgctgttgacaacatgagtgcaagttccagctctgttgacagcgaccctgaaagcacggagcgagagctgctcaccaagctcccagggggcctgttcaacatgaaccagctgctagccaatgaaatcaaactactggtggactgactccactggtaattaaccaacaaaacccttgtaaaactttctttcttcttttctatttttaaaaccaacttgcaatgctgttcatggaggatgctcaggaagatgagagaaaattagtaggattagttggagagagtgggagatagatgagacctctgctagtaagatgttactttcatttacaaatcctacaaatagagaggcagaataggtggggtatagaaaaatgtcaggctctcatagttacccttttaaattgctaaaaaatgtgtatgctcataggccatgaggaacaaatactttttttttttcatggtcccttgcttttgtttttgtacaaaaaaaaatggttttgctacaaatatccaagtagcataacttcacattgtgttggaagatttgtcatcagtgaggaaaacatctgcttaaattacaggaatttttgtattatacagctctgaaaattctgccatttccttattaactagcagctttagtttgtagtttatgaaatcttgaggggctcttttactgggatttcttatttttttgttttttcccgcttaatttggtgggaggtcaaattgaatataacccaataaaggcttcttaatgacaaaattggcatgtttgcatgatgaaatggaaatgaacagtattgcaatgtccggtatacaaaataacattaattcaatgtagataaaattacactagtttaaaatatgtgcattcacttgtatttgttagtgttttagtcttttttgaaagatgtgctctgttaatgttgcttttttttttttttttaatacatgctagtctaacatttcctgctctatgcctgcatctttaacaatggccaaagtgaagaaaatgctaccttttttgttaacaagacactgacttgaaacatgtacatttaaagccttttattttttccctttttgttttggtagttgggcatttaaataaggacaaggaaaaatatttttgggggcaaatcaagagcctatgagttctaagtataaagctgaagtgatttcgaatgccagcgttatatatttgcatttttcacattttacgagggagtatatgtgtatgtgtgtgcacgcatgcatgtgtatgtgttttgctttttgtttccatcaactaatcaaaaaggataatttagaaaatggagcatgatgggaaacagagtttttgactttaaaaaacagatgagttgttttcataagtagactccactggggtagaggtattcaccttaaaacatagggtgagtagatgcttttttaggcctttttgtgtatatgtacgttgtttgtttttttccttttgtttctagcctgttcagtgtacagtttattcaaggctacatgcttttctttaatgcttctggctatgcattttctctttttacatataggatttgggattgggggtgggttggatgtttttgtttggggacttatttagtagtattgagtctcttatagccctactcttaagccttcaatactgtccactctttatattcctttacttgcagaatttataaaagcccccaaactgcatataatatgagcctttaaaacatgggtaaaactaatcccattgatgggtttggatggtatgttaagaaatggagatgctgcagagcccaacgtaattttttaaacagcaagttttccatctccctacgaatcctctgaagcttttacccaagccctttcttgcctctccagtgctattttccttcagatggaccttaaacataatttcttggacactactagagagacttcgaggcaataataaaagatcagtattaaccagctataacagaggtttgatcatgcttacttgtacagtttttcccccgttttaaaaaggaatgtaataaaatttgttttttccatagaattaaataatattaaaattgagtgaaaggttgattgttgatgaatagaatagtacctctcatctgtgcagtgtctcatttcacctcagagaaaaggatacataagaggagtttgtaatttatcttaggatattctaattgcatttaaaagaacttatcttgcgcagggtaaatgggggactcacatacatatattaatacctctgactcattaacagaaagaaatacttggtacttctttcgctgaatgaccatactgtggaggatgcatactatttggtatagagaaataaatgaggaagaaagaactgcttaattaaattatcattcatatgttcatatagagaccatctggttgccatgtgtattatgacacatacactttgaatagttacatatcacaagtatgtagttcatgtttgtgttggtggggtaaggcatcaggaaaaatgtagttagtcttttcttaacttataccaaattaaccaactatattataggaaatatgtgaaattagttcattagctttattcactattatgcattcacatgatattaaaacgtacactcacatgttagaatgaaaagagcagtagttatcttagattttaaaaacatggatatcttcttgaattccttcaagattgaggtagagaataagagcaaatcattctggaagtaccttaaggaaacaaacagcagcagatatttaggttaaacttattttcataattgtttaataacttttgtataatcttcattgctattatgagagagaatgtatatatcaaatatgtgtaatgataaaatctgaattgtaaaatttttgtatattgttaaaattgtaattctaaattgtatttcaaaaatgattatttctgatattgtttttatgtcacccatgatgaaaactggactttatatatctaaacatacaagtatgaactattctatttaaaatttttaatagtttttttcttttttggtgcctataattgattggtcatttctgctggcttttctccaatgaacattgaaatcttcctgtatatgttaccaataagaaaactaccctggaacagtagaaaaacccaacaagagacttggcattcatcaagcacattatcagactttgagaacatattgaaggcattgactttgaaaatcatctctttttctcaagaagaaagcaatggagaagcaaatttgtttcattcagtgaatccccagtttggggcttgtggggcttagagacattgtgaaatcaaatcttgtgttatacttttctcctggctcactttttttgagaaggtttatgggctatttggctggtgagacacgatcccctcctaagaaaatgtaggtgctcagacaggtaaccactgctgctactgtttttatttgtttgtttgttcaattttatttaagatttgtttttgttgtactaggattttaaaaaatgtaatatattgcaggatttataaccaggttcactgactgcttgcttgctttcttttttttttttttttttttttttttcttcttaaaaaaacaaaacaaagtttcatttaaaatacatttaggcacctttggagcttggattttggaatgtttcagtagtggacagaaatctgctgttggaatcttctagtcttccaggtttaatttgaaatgtttttagttttgttttggatttttgtgtggtattttatttcctttataccaatgccattttgccatgctgttttggggtggctgcctaactctagtgaaaattctttctatattaatgaaagtttggcctttgaagatccttaatgttttgcattttttacattgtttttaaagaaatattctaactgcttgcactgttactgttctttaccagccttttcaggagccaaaaaaacaaatacaaacaaacaaaaaaatacccagagaaaaaactttccttcttcccccttcctgatgatgagtgagaagtattgagaactttcggggtcagtgcccttctaaactccccttcccccaataatgcagctgtataatgaatggtaaatgcaccggtttggattcaggcacagccccagtctgcctacaggtaatttaactctttctcctttctttccatcactaggctaactttctttttttaaaacttcctttctttacgtactttaaaaagtaaccatgggtttgtcataattctcacttaaaaataatgcataaatgtatctagcaaataatatgattaaagaagagcttttgggggtaaagtttgacttggttatgatatactcaagacttgggaattttgtttagccatttagatgactccatttcttgcatatatgtctataattaagtatttcagagtgtgaattttttggctttgtttttgttttgggtttgtttgtttcttccattgtgctactctggcttaagctttttcaggggttggtgttccgaatacacagtgagctcacagtataaagacatcaattaggagttgacaggtatggaaaactagagttttgaaaggtaaaattaggctctaggttatatatatggtaaaaactcaacatagcattcattttaccttagtgcttctctctgtgactttataaaagtgaaagggaatagtaagacgaagataatacaaaaaaatttagttcttttaggagcaatgtgatttcagaactaatcgttttagcatttctaagatactagttctaacaaggagatgtgagcagtttgagattatcagaaaatcatggtttaaaccttcaaaaattacaggtttgaacagataggaggacatttctgaagcacaagatggctaagcacattaaccaaggacataaaatgtcagggataggactacaactcgtccattttaatagcctttctgttaggtaataaactaaactatcctctcctccgtctttaccccagtctacctacccattcttcctttctcctatacttcctaaagttttagttctgagcttttattattttgggatattgtcatctttctaataggtagaattttagtgaaagtaatcaggaccttttcaagatagacttctgcataatttcatcctgtggctttggacgtactatccaaagaggctgtacatccagcaagtcactagttagtgaataggaattcttggcgtgtaatgccatttcttgtagctgaaggaagacatgtgataagtgattaacctgttctgtgcttcagttgactcttataaggacagtcattccctttaagcatcttaagacaaaaatatttatctgttgaattggaatttactaacagagggaatttgaattggaatttacttccagctgcactcatgcaagaatttgtgatgtatactaaaaaataaaaaaaggctcattcaggagagccttgtactcagcaagagtggctaacattagagcatacagactatgtgattgtataaggcatggagagttaaacaacctccagtcagctgcctgtttgaataccactgacttgttaagaatgatcttgcttttagattttaccatattcaaacttattaggtgagccttatatagcatatatacctggctgctattgtggggtttgggaacatgaggggtggggtgaactgttgttgttttaggtttcagtcagacagacatccctgtgcctcagttcccagaagcacagcaggcctctaggagcatccgtgggaacggcgcagtcctgacatcaccaactctcctgctcaggctcatcccatatacagaggtcaaagggtggggtttgagatcgggggaaggaatgagaaagtagaagcaatgtcacttcagtgccactgttgactagtctttggtgcttatgtcagtatttgttttatttcctgatttttttaaagttggcaaaactacatatttttatcttgatgaaggcagtgggagggtggaacaaaaacaagccattactgctatttctagttcatttactggagactgtcccttaatagctaatgtagaataaatttgaaacatagacctagatgacaaaaagaatgggaatagaaatgaatctcaggatttgaacaaacagaagacgtttatgctgtgttgatgcccagttctacaactgctattacatttgtcattctgtctccccttttcccctaattcttttatgtatgtatgtatacagtttgaggaaatgtgcatctatggtcagtcctttttaaaagacttaatgaatttattactcttttgcaaaaaatatacccactgcttatatgggcatacaaatgctaccctattttaaatgtaggtggcgtatgtgttcgtgttttaatgtattcagagccattgggcaataagcagtccagaacattgaaaactcaagcaggtaaagcacctaacacccttagtttctagaattactttaaaaaacttttatattgctgcatcttccacagttctttgggtagtctctgaacttaaaatttgtaggagttgtagactacctaaatttttaagttatggtatttgttcataggttgtaggggtaggtaaagaaggaaacagacaagaaaatggcttcttgaggtggcagctgctgagtggctaaatcttaccactttctttctactttttttggaaattttcccagcttagcatgaacatggatcatacagtgtttgattttatgtgattgagatttttgttttttatttttggagggaaggtcttggagaaacattaaaaagttggtgtatgtgcaaaaatacgaaatgttaaacaaaggaattttttcttatttaatctgaatggtaagcaagaactttttctatatacccttctgctgcagcagacaactaaactggtaggtggcagcagaggaaggaattcttcagattgatggctactgacttaaagtctgcataggagaagagatagagcatgacataccaagtgaagcaagggggacaaaaatggaaacaggactaagattcctgcattttgactctaaatggtaagttatctttaactaagaatgtgtttttagtctgatagcaatgttatataaattatatgattggtactatggcatgtaatcataaatgcctgtaggtccttgccttaacgttgaatttgacctcactggtaaactgtcattctttactttgaataataactaatagtatgtaaaattaggatttttctcctcagcatgttggtatatgtgacctttaattatggcaaaattatgtggacagtaaatctgaatgtttttaatttgcaagataaataaaatatgcattgttaatcattttatacaaataaaaggttctggccacgtactgtggctcacgcctgtaatcctaacactttgggagactgaggagagtggatcacctgaggtcaggagttcaaaactagcctggcaaacatggagaaaccccatctctactaaaaatacaaaaataagctggacgtggtggcgggcacttgtaatcccagctacgcgggaggctgaggcaggagaatcgcttgaaacccaggaggcagaggttgcagtgagtggagatcaagtcactgcactccagcctgggcaacaagaacaaaactccatctcaaataaataaaaatcaaaactaaaagattcttccctttttagtgggagctttgggagataacaaagagtataattggaaaaaaaattactgagggtggcgtgatctcttccagctggctatctaggtcaagacccatttctttgtcactgtgccatgttccactctgccatcagttccaccctgcctgttcacctttctctcttgcttatctggctgggcttttcccctgttcctctatctctccctgtctttgtgcctctcccttatccaagtctgtttgtaagctgctttttctcacattcagtcctgaattttaattatccgatgttgccattttccatctctgcctgcctgtttttcctaagagagtgtgcatgtctgtctttctcttcctccctctctccccacttttcatttgcattcttcattagaatttgactagactgaatagaaattaaatgatactttgaagttctctagaattaaagaatgtaaatttcaattaaatttatagaatgtaaatgtcaattaaatttataagatgcagacctgtttattcacccaactacttatttaactatagtatctgttgtttctggcaaccaagctgtgtatgatcagttggacagaaatgaaaggcatatggttcttatcttatttcagctttttttttttttccttttttccttgagacagggtctcactctttctctactgtacttgagcctgggtgacagaacagtaattttgattactatataaaaattttaatgctttagaactgaaagaaaatgagttttaatctgaatcaaaaattgtttttttctgtaatttattgttaagttaacctggaacacaagagagcatttaacttgaattttgtttgtctaggcatattggcacaataattttgttttattttgtatgttctacaaggaatttttgttagattttttcttttggtacaatttttctgactaaaatgcagcataattgtctttattataggattgctaaggagtaatagtacggagacatctttgtggttttatacacacacacatatatatatttaacataagctgtctaaaataagtcacaaaacttgcagattagaaaaggaagcacattttggctgttttggtgtcagcatcttaattaagtagaaaatattatggacctataaattgaacttgcgactgttcactcactagagagaacaatttccagggagttagaatagtttttcctgaaggagagtcaaataaatttgggaaataaggttgctcttgtaaaacagtaatagatttagcttttattttttaatgataagaacattaaatgtcttctaagtcagaatcagagtatatctttgttaactgagctcaccaagacaaagtgataataacacaaaactgtggtttttggtagtctaatcaatttagaatgttttattgtcatgttagttgattttctgtctttatttgtattttttcttatcctggttatagagacttttaaaatctatgatttaaataagttgtgtttttcccccctaggttcttttgaagtaaccagtgatcttttttgcttaccctcatcaacagaatggatgaagatagatttgactgtgtgctttttcaagtggagaatatgaatatacagaacaagaaagcaataactccaacctgtttgattccgtctgttttctaaataaagacactatgcgctggaaataacatagca

SEQ ID NO: 1582 - DNA, 2718 bp, Homo sapiens
agacttggagcttcttgactgaggggagatcgggtccctttggggaagaaggaagccttcaatgttgtcacaagtgtatcctggaaatcttcctctaagccttcctagagagacctgataatatgacttatgatacagtgaccccaaattcagggtgttcttgtctactctcaagaatgcaatatcttcttcctctgaattgaacgtagtaccaatatttgtgtgtagctatgcaccttaatagaccatagctaattagatgaggaatggtagacccaattcaaccatacaggcgtcaaccatatcagcatacaggcatccctctcccaccgtttccttcttgtccccactccaaagccttctccattttatttgtattaactttctattgctgcatactaaattactgcaagcattagcggcgtaaaataagaatgatttattttcttgcagtgtccacagatcagaagttcaggcctggattcgctgggtcttcttctcagggcctcacaggctgaaattaggctgggtttctttctggaggttctggggaagaacatcctctcaagtttcctcaggttgtcagctgagttcagttccttgtgactgtaggactgagatctctgttttcttgctggctgtcagccaggggcctctcgctgctcctagaggcctcccatgttcccactgcatgcttcctccagccagcagaggaggatcgccctgcatggaaaccctcctgcacttcacatctctccaggaagtcctcagtccctccaaggaactcaccttcactaggtcaagctcatcagataatctgtctatcttaaatttgaccgatttgggatctcgattacatctgttaacttgtttttgccataaattgtaacacaatcgcaggagtgacatctcctcagtggctttgtctacactcaggaagaagtgattatataagagcaaagatcactgagggtcatcttaggattctgtctaccataatattataaagacacagtaattaaaagagtataacagatttctgcttctgtctgttagaataaatcatatcagactaaccctgcctccataaacaaccgtaaaattgttttcagcagtgtacgacaggcagtacaacagaaaacttaagggggaagccccatgatttcctagttctttggggagaatttctcagcagctgcatagtgggctagagtccactcagggcagggcagcccactgagctgagaaggcagagatcagagttcaagaccattgaagcaactgcaatctgcagggcagggcaccaatgaggagacagctgatcaaaggtgcagctctcaaagtctatgtggggttccatatgcatccttatcaaggactggactgtacctgcacaaggaaaagactaacagatttaacagaggggtggctgctataaaattgagtttggaccagaggtacttgaggcggaggagggttggggaatgtatgatggagtttctgccatccacggtgggaagaactcatgcacacctcattagcacccaggtatccaactgagacactagaatggatgtgctttaggaataagtgtcacacttttcaataaggcctattgttcaccaacctggtaaagcctaaagccaaaccctgacaaaatccacaaaggggtggattggtgattgagtcctgccaaattagagggtcttgggaaattctgtgggctttccatgaatccgttgtaataaaacataaaccagtccacataagtccaaagtgatcgatcagacagtaattttacgcccactagagcaaaattaattcacacaatcaatgacacaagttagccaagtcgacatttaagcaaaatacatctaagaacagctaacaaataactctcctcaaactcacatagagcattcaccaagatagaccacatatgctgagccatccttagtattttctgtcctttctctttgactcgtgtatactgtgctcaaactcttaaaattatacactttaattatatactttaatgattatacactttcatgcatctcaattgcatgtaagttatatttcaatatatttgttaaaagtttataattaaaaaaactgtcctagcttgattccagaaatcttttttatattttagaaaatgtaatgttatatattatcagggcaaaagagaaaaaccgtatgattaccttgtcatacacagtaaaagcatttggcaaaattgaaaaatttttcatgatttataaaaacaaaccccagaaaactcagcatgataagaagagaaggcaacacttccaaccctattaagggtagatttgaaaaaaactcacaggtaacattatattaaatggcatgggattgaatgcttttctattaaatcagataaaaaagtagaatatctgttgttattctttcaattcagcattatactagagatctaaatcagtgcaataaagtaagaaaaataaaagtattgaaaagattgaaaagaaagaattgaggctgtctttattcacagataatgactgtgtatgttaataatcctagaaatctgcaaaaatctgccaaagctaattagtgagtttggtaatgttgcagagtataagctcaatagaagtagtcttttgtatttctgtgtattagcaatgagcatttggaaaatgaaataaaaatacaatttcatttcaagtaacttctaaa

SEQ ID NO: 1583 - DNA, 2722 bp, Homo sapiens
agacttggagcttctcgactgaggggagatcgggtccctttggggaagaaagaagccttcaatgttgtcacaagtgtatcctggaaatcttcctctaagccttcctagagggacctgataacatgacttatgatacagtgaccccaaattcagggtgttcttgtctactgtcaagaatgcaatatcttattcctctgaattgaacgtagtaccaatatttgtgtgtagctatgcaccttaatagaccatagctaattagatgaggaacggtagacccaattcaaccatacaggcatcaaccatatcagcatacaggcatccctctcccaccgtttccttcttgtccccactccaaagccttctccattttatttgtattaattttctattgctgcatactaaattactgcaagcattagcggcgtaaaataagaatgatttattttcttgcagtgtccacagatcagaagttcaggcctggattctctgggtcttcttctcagggcctcacaggctgaaattaggctgggtttctttctggaggttctggggaagaacttcctctcaagtttcctcaggttgtcagctgagttcagttccttgtgactgtaggactgagatctctgttttcttgctggctgtcagccaggggcctctcgctgctcctagaggcctcccatgttcccactgcatgcttcctccagccagcagaggaggatcgccctgcatggaaaccctcctgcacttcacatctctccaggaagtcctcagtccctccaaggaactcaccttcactaggtcaagctcatcagataatctgtctatcttaaattggaccgatttgggatctcgattacatctgttaacttgtttttgccataaattgtaacacaatcacaggagtgacatctcctcagtagctttgtctacactcaggaggaagtgattatataagagcaaagatcactgggggtcatcttaggattctgtctaccataatattataaagacacagtaactaaaagagtataacagatttctgcttctgtctgttagaataaatcatatcagactaaccctgcctccataaacaaacgtaaaattgttttcagcagtgtacaacaggcagtccaagagaaaacttaagggggaagccccatgatttcctagttgtttggggagaatttctcagcagctgcatagtgagctagagtccactcagggcagggcagctcactgagctgagaaggcagagatcagagttcaagacggctgaagcaactgcaatctgcagggcagggcaccagtgaggagacagctgatcaaaggtgcagctctcaaagtctatgtggggttccatgtgcatacttatcaaggagtggactctacctgcacaaggagaagactaacagatttaacagaggggtggctgctatgaaattgagtttggaccagaggtacttgaggtggaggagggttggggaatgtatgatggagtttctgccatccatggtgggaagaactcatgcacacctcattagcacccaggtatccaactgagacactagaatggatgtgctttaggaataagtgtcacacttttcaataaggcctattgtagaccaacctgctaaagcctaaaagcaaaccctgacaaattcacaaaggggtggattggtgattgagtcctgccaaattagagggtcttgggaaatgctgtgggctttccatgaatccgttgtaataaaacataaaccagtccacataagtccaaagtgatcagacagtaattttactgcccactagaacaagattaattcacacaatcaatgacacatgttagccaggtcgatatttaagcaaaatacatctaagaacagctaacaaataactcttctcaaactcacatagagcattcagcaagatagaccacatgtgctgagccatcgttagtattttctgtcctttctctttgactcgtgtatagtgtgctcaaactcttaaaattatacactttaatgattatacactttcatgcatctcaattgcatgtaagttatatttcaacatatttgttaaaagtttataattaaaaaaactgtcctagcttaattcaagaaatcttttttatatttaagaaaatgtaatgttatatattatcagggcaaaagagaaaaaccatatgattaccttgtcatacacagtaaaagcatttggcacaattgaaaacttttttcatgatttataaaaacaaaccccagaaaactctcagcatgataagaagagaaggcaacactttcaaccctattaagggtagatttgaaaaaaactcagaggtaacattatattaaatggcataggattgaatgcttttctattaaatcagagaaaaaagtagaatatctgttgttattctttcaattcagcattatactagagatctaaatcaatgcaataaagtaagaaaaataaataaaagtattgaaaagattgaaaagaaagaattgaagctgtctttattcacagataatgactgtgtatgttaataatcctagaaatctacaaaaatctgccaaaactaattagtgagtttggtaatgttgcagaatataagctcaatagaagtagtcttttgtatttctgtgtattagcaatgagcatttggaaaatgaaataaaaatacaatttcatttcaagtaacatctaaatacatgttgtgctt

SEQ ID NO: 1584 - DNA, 2721 bp, Homo sapiens
agacttggagcttctcgactgaggggagatcgggtccctttggggaagaaagaagccttcaatgttgtcacaagtgtatcctggaaatcttcctctaagccttcctagagggacctgataacatgacttatgatacagtgaccccaaattcagggtgttcttgtctactgtcaagaatgcaatatcttattcctctgaattgaacgtagtaccaatatttgtgtgtagctatgcaccttaatagaccatagctaattagatgaggaacggtagacccaattcaaccatacaggcatcaaccatatcagcatacaggcatccctctcccaccgtttccttcttgtccccactccaaaaccttctccattttatttgtattaattttctattgctgcatactaaattactgcaagcattagcggcgtaaaataagaatgatttattttcttgcagtgtccacagatcagaagttcaggcctggattctctgggtcttcttctcagggcctcacaggctgaaattaggctgggtttctttctggaggttctggggaagaacttcctctcaagtttcctcaggttgtcagctgagttcagttccttgtgactgtaggactgagatctctgttttcttgctggctgtcagccaggggcctctcgctgctcctagaggcctcccatgttcccactgcatgcttcctccagccagcagaggaggatcgccctgcatggaaaccctcctgcacttcacatctctccaggaagtcctcagtccctccaaggaactcaccttcactaggtcaagctcatcagataatctgtctatcttaaatttgaccgatttgggatctcgattacatctgttaacttgtttttgccataaattgtaacacaatcacaggagtgacatctcctcagtagctttgtctacactcaggaggaagtgattatataagagcaaagatcactgggggtcatcttaggattctgtctaccataatattataaagacacagtaattaaaagagtataacagatttctgcttctgtctgttagaataaatcatatcagactaaccctgcctccataaacaaacgtaaaattgttttcagcagtgtacaacaggcagtccaagagaaaacttaagggggaagccccatgatttcctagttgtttggggagaatttctcagcagctgcatagtgagctagagtccactcagggcagggcagctcactgagctgagaaggcagagatcagagttcaagacggctgaagcaactgcaatctgcagggcagggcaccagtgaggagacagctgatcaaaggtgcagctctcaaagtctatgtggggttccatgtgcatacttattaaggagtggactctacctgcacaaggaaaagactaacagatttaacagaagggtggctgctatgaaattgagtttggaccagaggtacttgaggtggaggagggttggggaatgtatgatggagtttctgccatccatggtgggaagaactgatgcacacctcattagcacccaggtatccaactgagacactagaatggatgtgctttaggaataagtgtcacacttttcaataaggcctattgtagaccaacctgctaaagcctaaaagcaaaccctgacaaattcacaaaggggtggattggtgattgagtcctgccaaattagagggtcttgggaaatgctgtgggctttccatgaatccgttgtaataaaacataaaccagtccacataagtccaaagtgatcagacagtaattttactgcccactagaacaaaattaattcacacaatcaatgacacatgttagccaggtcgatatttaagcaaaatacatctaagaacagctaacaaataactcttctcaaactcacatagagcattcagcaagatagaccacatgtgctgagccatcgttagtattttctgtcctttctctttgactcgtgtatagtgtgctcaaactcttaaaattatacactttaatgattatacactttcatgcatctcaattgcatgtaagttatatttcaatatatttgttaaaagtttataattaaaaaaactgtcctagcttgattcaagaaatcttttttatatttaagaaaatgtaatttatgtattatcagggcaaaagagaaaaaccatatgattaccttgtcatacacagtaaaagcatttggcacaattgaaaacttttttcatgatttataaaaacaaaccccagaaaactctcagcatgataagaagagaaggcaacactttcaaccctattaagggtagatttgaaaaaaactcagaggtaacattatattaaatggcataggattgaatgcttttctattaaatcagagaaaaaagtagaatatctgttgttattctttcaattcagcattatactagagatctaaatcaatgcaataaagtaagaaaaataaataaaagtattgaaaagattgaaaagaaagaattgaagctgtctttattcacagataatgactgtgtatgttaataatcctagaaatctataaaaatctgccaaaagtaattagtgagtttggtaatgttgcagaatataagctcaatagaagtagtcttttgtatttctgtgtattagcaatgagcatttggaaaatgaaataaaaatacaatttcatttcaagtaacatctaaatacatgttgtgctt

SEQ ID NO: 1585 - DNA, 1338 bp, Homo sapiens
agacttggagcttctcgactgaggggagatcgggtccctttggggaagaaagaagccttcaatgttgtcacaagtgtatcctggaaatcttcctctaagccttcctagagggacctgataacatgacttatgatacagtgaccccaaattcagggtgttcttgtctactgtcaagaatgcaatatcttattcctctgaattgaacgtagtaccaatatttgtgtgtagctatgcaccttaatagaccatagctaattagatgaggaacggtagacccaattcaaccatacaggcatcaaccatatcagcatacaggcatccctctcccaccgtttccttcttgtccccactccaaaaccttctccattttatttgtattaattttctattgctgcatactaaattactgcaagcattagcggcgtaaaataagaatgatttattttcttgcagtgtccacagatcagaagttcaggcctggattctctgggtcttcttctcagggcctcacaggctgaaattaggctgggtttctttctggaggttctggggaagaacttcctctcaagtttcctcaggttgtcagctgagttcagttccttgtgactgtaggactgagatctctgttttcttgctggctgtcagccaggggcctctcgctgctcctagaggcctcccatgttcccactgcatgcttcctccagccagcagaggaggatcgccctgcatggaaaccctcctgcacttcacatctctccaggaagtcctcagtccctccaaggaactcaccttcactaggtcaagctcatcagataatctgtctatcttaaatttgaccgatttgggatctcgattacatctgttaacttgtttttgccataaattgtaacacaatcacaggagtgacatctcctcagtagctttgtctacactcaggaggaagtgattatataagagcaaagatcactgggggtcatcttaggattctgtctaccataatattataaagacacagtaattaaaagagtataacagatttctgcttctgtctgttagaataaatcatatcagactaaccctgcctccataaacaaacgtaaaattgttttcagcagtgtacaacaggcagtccaagagaaaacttaagggggaagccccatgatttcctagttgtttggggagaatttctcagcagctgcatagtgagctagagtccactcagggcagggcagctcactgagctgagaaggcagagatcagagttcaagacggctgaagcaactgcaatctgcagggcagggcaccagtgaggagacagctgatcaaaggtgcagctct

SEQ ID NO: 1586 - DNA, 2718 bp, Homo sapiens
agacttggagcttctcgactgaggggagatcgggtccctttggggaaaaaagaagccttcaatgttgtcacaagtgtatcctggaaatcttcctctaagccttcctagagggacctgataacatgacttatgatacagtgaccccaaattcagggtgttcttgtctactgtcaagaatgcaatatcttattcctctgaattgaacgtagtaccaatatttgtgtgtagctatgcaccttaatagaccatagctaattagatgaggaacggtagacccaattcaaccatacaggcatcaaccatatcagcatacaggcatccctctcccaccgtttccttcttgtccccactccaaagccttctccattttatttgtattaattttctattgctgcatactaaattactgcaagcattagcggcgtaaaataagaatgatttattttcttgcagtgtccacagatcagaagttcaggcctggattctctgggtcttcttctcagggcctcacaggctgaaattaggctgggtttctttctggaggttctggggaagaacttcctctcaagtttcctcaggttgtcagctgagttcagttccttgtgactgtaggactgagatctctgttttcttgctggctgtcagccaggggcctctcgctgctcctagaggcctcccatgttcccactgcatgcttcctccagccagcagaggaggatcgccctgcatggaaaccctcctgcacttcacatctctccaggaagtcctcagtccctccaaggaactcacgttcactaggtcaagctcatcagataatctgtctatcttaaattggaccgatttgggatctcgattacatctgttaacttgtttttgccataaattgtaacacaatcacaggagtgacatctcctcagtagctttgtctacactcaggaggaagtgattatataagagcaaagatcactgggggtcatcttaggattctgtctaccataatattataaagacacagtaattaaaagagtataacagatttctgcttctgtctgttagaataaatcatatcagactaaccctgcctccataaacaaacgtaaaattgttttcagcagtgtacaacaggcagtccaagagaaaacttaagggggaagccccatgatttcctagttgtttggggagaatttctcagcagctgcatagtgagctagagtccactcagggcagggcagctcactgagctgagaaggcagagatcagagttcaagacggctgaagcaactgcaatctgcagggcagggcaccagtgaggagacagctgatcaaaggtgcagctctcaaagtctatgtggggttccatgtgcatacttatcaaggagtggactctacctgcacaaggaaaagactaacagatttaacagaggggtggctgctatgaaattgagtttggaccagaggtacttgaggtggaggagggttggggaatgtatgatggagtttctgccatccatggtgggaagaactcatgcacacctcattagcacccaggtatccaactgagacactagaatggatgtgctttaggaataagtgtcacacttttcaataaggcctattgtagaccaacctgctaaagcctaaaagcaaaccctgacaaattcacaaaggggtggattggtgattgagtcctgccaaattagagggtcttgggaaatgctgtgggctttccatgaatccgttgtaataaaacatgaaccagtccacataagtccaaagtgatcagacagtaattttactgcccactagaacaaaattaattcacacaatcaatgacacatgttagccaggtcgatatttaagcaaaatacatctaagaacagctaacaaataactcttctcaaactcacatagagcattcagcaagatagaccacatgtgctgagccatcgttagtattttctgtcctttctctttgactcgtgtatagtgtgctcaaactcttaaaattatacactttaatgattatacactttcatgcatctcaattgcatgtaagttatatttcaatatatttgttaaaagtttataattaaaaaaactgtcctagcttgattcaagaaatcttttttatatttaagaaaatgtaatgttatgtattatcagggcaaaagagaaaaaccatatgattaccttgtcatacacagtaaaagcatttggcacaattgaaaacttttttcatgatttataaaaacaaaccccagaaaactctcagcatgataagaagagaaggcaacactttcaaccctattaagggtagatttgaaaaaaactcagaggtaacattatattaaatggcataggattgaatgcttttctattaaatcagagaaaaaagtagaatatctgttgttattctttcaattcagcattatactagagatctaaatcaatgcaataaagtaagaaaaataaaagtattgaaaagattgaaaagaaagaattgaagctgtctttattcacagataatgactgtgtatgttaataatcctagaaatctataaaaatctgccaaaagtaattagtgagtttggtaatgttgcagaatataagctcaatagaagtagtcttttgtatttctgtgtattagcaatgagcatttggaaaatgaaataaaaatacaatttcatttcaagtaacatctaaatacatgttgtgctt

SEQ ID NO: 1587 - DNA, 413 bp, Homo sapiens
tccatcctgtctcatgccactcggggctcgtcccttctagaatgcattcctggctcccctgcatgcacacttccagttaggtttagcaatggagggcacctgatggagcctggaagtgagaggaaggtgaggtctgtatttcttccctctccctccctgctctggcactgagtatctggcaatagctgcatctgtctattacttcagtggccactcttccacagccccagttctcagtgggtcccatagcattatttacctttgttcctttagctcccatcaaggaagatccagagacattctccttaccaagacgttaagaaatgcacaggtgaggagaacagcggcatgcgtgtaaaggtcctgtggcacccatcctctgcaggctggaggtcatggcgggagatgctgca

SEQ ID NO: 1588 - DNA, 2219 bp, Homo sapiens
ttactcctctcctcactagttttgtgacctagggaaattttgcaatctttctgagtttgttttctcatcaggaacaggataatacctaagtaacaggatagttgacagatttaaatatgatcgcatggcggtggacatgagccgtaattagttgttaagaatatattgacactgaactctcctttatccatgttaaaattgtagataaacaacaattgacaaagaatagacaaaatgttctaacataaatattcttcccttgtttctagaaagaagtcacacatacggtaaaaataattagagaggacctagttcatattgaacaatcttccccaaagcctgaaacaggtcttctttctaacaccagagatatcttgagtgagtccaacccctgcagtcccctctgtctggaatagatggaggaagtttgctccagccttagaagagcatgggctggcaagcgttctcagagaggtctcgacttcaactctaaagggcctgaggaatatgtgcaactgggtcgggttaaggccaagctgaatcacatgaccagggctctcaccagcgccaaagtcagtggaaggatatcagtccccagagctctgtcacaggccatggatgctccatggaggggtggtgagcatatgaataacaatcaggagaaacatcggtaatggacaggaggcatcaataaacaatgtccaccctcctctaaaacccaggaaagttctcattcaaaagacgatgtcttgaaggaaacctaggtacaaatctttgtgattttggattagacattttttaagtaggcacaaacaacggaaaaatagataaatggacttcattaaaataaaaaacttgtatgcttcaaaggacactgtcaaggaagtgaaaagataatccacataatgggagaactatttccaaattgtatgtttgacacaggtctagtacctagagtatataaggaattcatataactgagcaataaacgacaaccacatttaacaatggggaaaaaaagctgtgagtagaggtttctctaaaggaaacacacaaatggccaagaagcacatgcaaagatgttcaatgtttttcgtcattaggaaaatgtaaatttaaaccaaaatgagataccacttcacacccagcagtacgacttaagaaaacaataaagacaacacatgtttcaaaagtgatggagaatatggaattctcatatattactattgggaatctaaaatgatgtagctactgaagttagtaaacagtgtgtgagttcctcaaaaagtgaaacataaagtgacatatgatgcagcaattgcactcctaggtttataaccaagaaaatgaaaaacagatgttcactcaaaaacctgtacaaagctgttcacagcagcattattcctaatagttaaaaagtggaaacatcttaaaccaccatgagttgatgaataaacaaaatgtggtataaccatatagtggaatattatctggccataaaaagttgaagtactgacgcaggctagaaaggatgaaacttgagaacaatattctaagaagcagatagaaaataccacactttgttattccatatagaggaagtgcccagaacaagtacatcaatatatagagaaggtagattagtggttgtcagagagcgcaagaaggggggaattggagagtgtctgcccataggtacaggcatgctttttggcattatgaaaatattctggaattaggtagtggcgatggttgcgaaagttttggaatatggtaaaagacactgaaatgtatgcttaaaaatggtgaattttgtgatgtataaattctactgtagaaataataataacaacaaaagtaataaagcaaggtgtctttccacatctccatgtccagtattttcatttaaaaaaaaagaaagtaaaagcatttcagggccaggttcagtggctaacttctgtaatcccagcacttttggaggcctaggtgggaggatcgcttgaggccagaagttcaaaaccagcctgagcaacatagcaagaccttgtctctatgaaaaatataaaattagccagaaatggtgatgtgtgcctagagttccaactacttggaaagctgaggcaggaggatcgcttgagcccagaagttcaagattgccgtgatctataatcaccagtgcactccaccctgggtgacagaataagaccctgtctcaaaaa

SEQ ID NO: 1589 - DNA, 2220 bp, Homo sapiens
ttactcctctcctcactagttttgtgacctagggaaattttgcaatctttctgagtttgttttctcatcaggaacaggataatacctaagtaacaggatagttgacagatttaaatatgatcgcatggcggtggacatgagccgtaattagttgttaagaatatattgacactgaactctcctttatccatgttaaaattgtagataaacaacaattgacaaagaatagacaaaatgttctaacataaatattcttcccttgtttctagaaagaagtcacacatacggtaaaaataattagagaggacctagttcatattgaacaatcttccccaaagcctgaaacaggtcttctttctaacaccagagatatcttgagtgagtccaacccctgcagtcccctctgtctggaatagatggaggaagtttgctccagccttagaagagcatgggctggcaagcgttctcagagaggtctcgacttcaactctaaagggcctgaggaatatgtgcaactgggtcgggttaaggccaagctgaatcacatgaccagggctctcaccagcgccaaagtcagtggaaggatatcagtccccagagctctgtcacaggccatggatgctccatggaggggtggtgagcatatgaataacaatcaagagaaacatcggtaatggacaggaggcatcaataaacaatgtccaccctcctctaaaacccaggaaagttctcattcaaaagacgatgtcttgaaggaaacctaggtacaaatctttgtgattttggattagacattttttaagtaggcacaaacaaccgaaaaatagataaatggacttcattaaaataaaaaacttgtatgcttcaaaggacactgtcaaggaagtgaaaagataatccacataatgggagaactatttccaaattgtatgtttgacacaggtctagtacctagagtgtataaggaattcatataactgagcaataaacgacaaccacatttaacaatggggaaaaaaagctgtgagtagaggtttctctaaaggaaacacacaaatggccaagaagcacatgcaaagatgttcaatgtttttcgtcattaggaaaatgtaaatttaaaccaaaatgagataccacttcacacccagcagtatgacttaagaaaaaaataaagacaacacatgtttcaaaagtgatggagaatatggaattctcatatattactattgggaatctaaaatgatgtagctactgaagttagtaaacagtgtgtgagttcctcaaaaagtgaaacataaagtgacatatgatgcagcaattgcactcctaggtttataaccaagaaaatgaaaaacagatgttcactcaaaaacctgtacaaagctgttcacagcagcattattcctaatagttaaaaagtggaaacatcttaaaccaccatgagttgatgaataaacaaaatgtggtataaccatatagtggaatattatctggccataaaaagttgaagtactgacgcaggctagaaaggatgaaacttgagaacaatattctaagaagcagatagaaaataccacactttgttattccatatagaggaagtgcccagaacaagtacatcaatatatagagaaggtagattagtggttgtcagagagcgcaagaaggggggaattggagagtgtctgcccataggtacaggcatgctttttggcattatgaaaatattctggaattaggtagtggcgatggttgcgaaagttttggaatatggtaaaagacactgaaatgtatgcttaaaaatggtgaattttgtgatgtataaattctactgtagaaataataataacaacaaaagtaataaagcaaggtgtctttccacatctccatgtccagtattttcattaaaaaaaagaaagaaataaaagcatttcagggccaggttcagtggctaacttctgtaatcccagcacttttggaggcctaggtgggaggatcgcttgaggccagaagttcaaaaccagcctgagcaacatagcaagaccttgtctctatgaaaaatataaaattagccagaaatggtgatgtgtgcctagagttccaactacttggaaagctgaggcaggaggatcgcttgagcccagaagttcaagattgccgtgatctataatcaccagtgcactccaccctgggtgacagaataagaccctgtctcaaaaa

SEQ ID NO: 1590 - DNA, 436 bp, Homo sapiens
cacagatccactgtccactcatttccatcctgtctcatgccactcggggctcgtccctcctagaatgcatccctggctcccgtgcgtgcacacttctagttaggtttagcaatggagggcccccgatggatcctggaagtgagaggaaggtgaggtccgtatttcttccctgtccctccctgctctggcactgagtatctggcaatagctgcatctgtctattacttcagtggccactcttccacagccccagttctcagtgggtcccatagcattatttacctttgttcctttagctcccatcaaggaagatccagagacattctcctcaccaaggcgttaagaaatgcacaggtgaggggaacagcggcatgcgtttaaaagtcctgtggcgcccatcctctgcaggctggaggtcatggcgggagctgctgca

SEQ ID NO: 1591 - DNA, 1478 bp, Homo sapiens
caagtcaaaattacaaagttttcctgagcttatataccttctaagctatatgtgtatgtggaagtgtgcattcatctaaatacagaagtgattaagttcttctaatctataactaaggtctgagtcctgaagaccttcctctggagcctcagtaaattcacttaatctaaatgggtctaggtgctgggcacccttatcttgtctcctgctaaatcacagaggtttggggagttccttcagacctccaataaacttgtttgtggaggcctggggagtttcttcagacccccaataaaacttgtttaatactaaatgactcctgttaagaatgtcttcgttattttgtcatgctttaaggcccaggaaaagcccaggcaaagctcttggtgggctttggttacattccagcctttgtaataagggcatgggctttttttttttttttttcctcttaatatttaactgaaccactcagtcggtactgaaacagttgttagggaggcctgtgttagtgagacctggcctgccacgtatggatgctcatgatagtttcttcataatagcccaaacgtggaatgatagaaatgtccaataacaagtgaaagtatgaacaaacacagtatagccacacaaaggaatactactcagcaattacaaggcattaaccgttgatgcaaatactcatatggatggattttaaaattatgttgatgcatgaaagaaggcagacacaaaagaatacgggtacaatttcatttatagaaaatggttaaaaatggaaacagacctgaagtgacagcggctccttgaggccgagggctgaaagactgatgaactgcaaaggggtacaagaaactttggggcgtagggaaattcctctatcttggttgtggcagtagttccattagtgtatacatttgtaaacatgcattgaattacacattttaaagtggtgcagtctgttgtacctaaatgatgcctttataacattgatttcatcatcttaatttctccatactagcaattagcagctagaaaatgaaattcagtaaaacataatcgagattaatagtcagaatcattacatgcttaagaatacatgcaatgaagcgggtacaaggcccgtaaaagcaattggtgagaaaaattaaagaagactaaatagagaaatatatatcatgttcattgattggaagattcaattttgttagcatattacctcaacagaattctgattaatatttctagtaggagattttagagaaatgtaaaagctaatttcaaaatatatttgaaaatccaagaacctagaataggcaagtcggtcttgaagaagcagtaagttggaggacttactctgctagacttcaaacctgatttaaaagctacagtaatttaaaatggtagtactggtgtaagtattcataaatatatcaaagtaaaagaatacagattcaaacaatatgaccacatatgta

SEQ ID NO: 1592 - DNA, 436 bp, Homo sapiens
cacagatccactgtccactcatttccatcctgtctcatgccactcggggctcgtccctcctagaatgcatccctggctcccctgcgtgcacacttctagttaggtttagcaatggagggcccccgatggatcctggaagtgagaggaaggtgaggtccgtatttcttccctgtccctccctgctctggcactgagtatctggcaatagctgcatctgtctattacttcagtggccactcttccacagccccagttctcagtgggtcccatagcattatttacctttgttcctttagctcccatcaaggaagatccagagacattctcctcaccaaggcgttaagaaatgcacaggtgaggggaacagcggcatgcgtttaaaagtcctgtggcgcccatcctctgcaggctggaggtcatggtgggagctgctgca

SEQ ID NO: 1593 - DNA, 436 bp, Homo sapiens; identical to SEQ ID NO: 1590

SEQ ID NO: 1594 - DNA, 436 bp, Homo sapiens; identical to SEQ ID NO: 1590

SEQ ID NO: 1595 - DNA, 2215 bp, Homo sapiens
ttactcctctcctcactagttttgtgacctagggaaattttgcaatctttctgagtttgttttctcatcaggaacaggataatacctaagtaacaggatagttgacagatttaaatatgatcgcatggcggtggacatgagccgtaattagttgttaagaatatattgacactgaactctcctttatccatgttaaaattgtagataaacaacaattgacaaagaatagacaaaatgttctaacataaatattcttcccttgtttctagaaagaagtcacacatacggtaaaaataattagagaggacctagttcatattgaacaatcttccccaaagcctgaaacaggtcttctttctaacaccagagatatcttgagtgagtccaacccctgcagtcccctctgtctggaatagatggaggaagtttgctccagccttagaagagcatgggctggcaagcgttctcagagaggtctcgacttcaactctaaagggcctgaggaatatgtgcaactgggtcgggttaaggccaagctgaatcacatgaccagggctctcaccagcgccaaagtcagtggaaggatatcagtccccagagctctgtcacaggccatggatgctccatggaggggtggtgagcatatgaataacaatcaagagaaacatcggtaatggacaggaggcatcaataaacaatgtccaccctcctctaaaacccaggaaagttctcattcaaaagacgatgtcttgaaggaaacctaggtacaaatctttgtgattttggattagacattttttaagtaggcacaaacaaccgaaaaatagataaatggacttcattaaaataaaaaacttgtatgcttcaaaggacactgtcaaggaagtgaaaagataatccacataatgggagaactatttccaaattgtatgtttgacacaggtctagtacctagagtgtataaggaattcatataactgagcaataaacgacaaccacatttaacaatggggaaaaaaagctgtgagtagaggtttctctaaaggaaacacacaaatggccaagaagcacatgcaaagatgttcaatgtttttcgtcattaggaaaatgtaaatttaaaccaaaatgagataccacttcacacccagcagtatgacttaagaaaaaaataaagacaacacatgtttcaaaagtgatggagaatatggaattctcatatattactattgggaatctaaaatgatatagctactgaagttagtaaacagtgtgtgagttcctcaaaaagtgaaacataaagtgacatatgatgcagcaattgcactcctaggtttataaccaagaaaatgaaaaacagatgttcactcaaaaacctgtacaaagctgttcacagcagcattattcctaatagttaaaaagtggaaacatcttaaaccaccatgagttgatgaataaacaaaatgtggtataaccatatagtggaatattatctggccataaaaagttgaagtactgacgcaggctagaaaggatgaaacttgagaacaatattctaagaagcagatagaaaataccacactttgttattccatatagaggaagtgcccagaacaagtacatcaatatatagagaaggtagattagtggttgtcagagagcgcaagaaggggggaattggagagtgtctgcccataggtacaggcatgctttttggcattatgaaaatattctggaattaggtagtggcgatggttgcgaaagttttggaatatggtaaaagacactgaaatgtatgcttaaaaatggtgaattttgtgatgtataaattctactgtagaaataataataacaacaaaagtaataaagcaaggtgtctttccacatctccatgtccagtattttcattaaaaaaaagaaagaaataaaagcatttcagggccaggttcagtggctaacttctgtaatcccagcacttttggaggcctaggtgggaggatcgcttgaggccagaagttcaaaaccagcctgagcaacatagcaagaccttgtctctatgaaaaatataaaattagccagaaatggtgatgtgtgcctatagttccaactacttggaaagctgaggcaggaggatcgcttgagcccagaagttcaagattgccgtgatctataatcaccagtgcactccaccctgggtgacagaataagaccctgtctc

SEQ ID NO: 1596 - DNA, 17761 bp, Homo sapiens
tcagtcttcccgcgtccgccgattcctcctccttggtcgccgcgtccttggctggcgtgtgagtaccgcggcccccgccggaaggagtcgggcgcgacagagacgcccgaggggccgggagggcgggcggcccgcgtgcgccagaagctcgcgccgttagggactgaggcacaagtgcgccagcgcgggcttaggggccgtgggccaagtgcggcacttggggcgagcgcagagaggcggggcgacggaggccacgtggccggcttggagggcgtccgcgggacgggggcgccgggagcactgtctcacggcgcatcccggtcgtggaagcccctcggccaggctgctggggcctaaggcctgtgtttgctgccgtctccgtgggagaccagacatctgccccagctgtttctctggcctgcagaccttcgtacaccacgtctttgtcaagcaccagttactgcacgcatcagctgagcacggaggggataggcacggacgcaacacttttggaacttagacgctagtgagcacggaaaggaataagcctgtactgtgactgggtcaaaatttctgtctcttgatttggatagggtggtcgggcagtctctgaagggggcggggatgctgttgctaagaagtagtactttcagaggctttaagtggaaggaagaaggcaaagggggcggagtgggttggggacctgatgagacgtcaggattggtttccagaatgaaggaccgcctggcagcagaagaactgtgtagctaaacttggggttgtccctgcccgacagggcggggtgcttcttaagttgacactgcctgcggctcacctcccagggaggcaggccaggccatctcacctgagcagcctccttctacagctccgcccaccccgtcatctggaccccatgagccttaagcagctggctcgcaggcagttggttacttccggagcccgtgtgtgcccagccccgttctgggggtgggggatgcagctgaggggctgggcaggtgtggaaggagcccccgagcgtcctctgaggaagtagacgctcaccttcgccttctcaccacatgcctcaggcccagccaggctcctagacctgcctctgtagaggctttctgggcgcagtgccaatcctgtgagacagcagcatctcccctgggctgctgcagggttcacacgcagtcagtgctggcagagtgagcgcccagccgacagagcccccgctgcctcccgcctcctctggaggactaggccctctgggctttgctcccgggttgctgggtgaggctgcaaggtttagcacaggtgggcacacgtgcttgatgatggacaaagagtacctgggctgtgccgtgcactggcgtcagccttctgggggctgaggacaggaaatgtggcattgaggatttgtgggtcatcatcctgtgccagtgtgttaaggtgacatcagcgtgttggaagctggtggcagtgagttatgctaagtgctggtgtaggagcctgccacaggtctccagctctcccacctcgctgacagccaagggtgccgtgtgaggtgtggcgtgggtattgtctggggttccagaaagcctgtgccgtgctggagtcacccaggaggcacaggggctgcgccgggcaggcaggtcggccagagcccctcaagcagggctggccatggagctggcctgcagtggcatttaagaaaagacgtggttggggcggggcttggcctggggcagggtgggttgggtagctacagtgagtgctctgagatatgcaggacaggctggcgtttcccagtggggctggaatatccaggggtcagacaggaaagtggctgagtgggaatgtggaactgtggagttttttctcttaaaaagaccaaaggcggctgggcgtggtggctcatgctggtgatcccagcactttgggaggccgaggcaggcagatcatgaggtcaggatatcgagaccatcctggccaacatggtgaaaccccgtctctactaaaaatacgaaaattaggccgggcgcatggctcatgtatgtaatcccagcactgtgggaggccaaggcaggcagatcacctgaggtcaggagttcgagaccagcctggcaaacatggtgaaaccccatctctactaaaaatatgaaaaaatagccaggtgtggtggcacacgcctgtaatcccagctacttgggaggctgaggtaggagaattgcttggacccgggaggtggaagttgcagtgagctgagatcgtaccactgcactccagcctggtgacagagtgaggctccgtctcaaaaaaaacccaaaaattagctggccgtggttgcgcatgcctgtagtcccagctacttgggaggctgaggcaggagaatcgcttgaaccggggagttggaggttgcagtgagccaagatcgcgccactgcactccagcctgggtgacagagtgagactccgtctcaaaaaaagaccgaaggcctcactccacgcaggaagacattgatctgtcctgtggctgctctgccgtgcggtggttttgcctaaagacccgcttcctcaggggctccagcctcttttaagggctagtcgtcgcgccctttgggcactgaaggtactgaaagttctatcaggcagtgccagtccacagactcaggccagccaggtgggccggagaggggtgctgctgggaggggtgggcgtgcacaggctgagcggtggctgaccccgtcccctgcccacctccctgacttctccctgtggagggtggacaatctgggagcctgtctgtgtgtgcgactgtgatggggtggcgtggagggcagggcctgggagccagctcctcccagaaagcttccgtttgcccagatgtgtggagacctccaggccgtgcagcaccttggtggccacagctctccaggatgtcctcaccttcctcagggccctgccctcctgacctggagtgttctgggtaggagtctgccggggctgctcccaggacagggacaggggaggctgtgagggccatgccgctgcagtgggtcttgctggctgccacctgtgtcacaggccctgttagctgggtggagccttccagagccaggaccccagggcactctcaaactctgggcagctgcagaggctcaggtgcttggcagacactgtctacccctcagggaagagccttggtggtgagcctggcctgcttccaggagcagagtagggacacttgggccacttccccctggggcctggctctggcgtttccaagactgcttctctggcagccagctgtctccctgtgttctctttagaaagctcctcctgagcttggataaactgcaggagcgaaggggctgaccgtttgtcgggacgcagttgaaagagtcgctgtgtcctgctccgggctctcctgctggagaggagaggcttgcacgtgcctgtcgtctgcgcaagctttgaagctcagacttggtctctgttaggagagatggtgcgctgcgtccggcaggtcctcccatgcttgggaatgcgggaagcggggaaatgaggaggtgggctcggacgtgtggggggctgtgctggctgtcctgggaggctctctgcccgctgttagtggccagctccccaggtgacgggcctggcctccaggtctccagcatggcttactgtggtgtctcctgagggcttcctctctgcagggaagcccacccaagatccctcttactggtcccatggggcagctgcctccgtagcatcctcgtctccaccagacccctgcagggtgcccagttcctccctgcagggtgctccctgctgcagtgtggggtgcacagaggtgggcagggccctggggccggagctcccgttggtgaaggaagacggatcccagccagggctctcgggttgatcagcagtaggaggtggcccctcctgcccagtcccacccaggacatgggctggtggctgggctttcagctgtgcccagctgcccttcgcagagcttgcagggtttatgaggtggctctggtgagattaggggcaggacacctagtgtctccagccgaggagtgaactgggtggaggtcctgtccttgtgtgcacattgtgggagagtcagtctgggaggcctttgtagcttgtgctggggcccttgggtgccagccctgtcttgacggtggctcctgctgagagagaggccctgtattaatgtgagccctgggctgcctcccccttgagggtccttgtcatcttccgggcctccttcagcagaccggacacaggggcagtgcaggtgaggggcttgggggagctccttggcagctccaggggatgcttgtgggcgctggcttatcttgtctcaggctaccttgctcaggtgacgacagggtgggtggatttgggaaaggttggctcagatagtggtccctgcttgtcccccagggcctgcctaggctccaactgacagtaatcccaagagctcccctttcaggggatgacggagtgacgtcacctgtgtggactcagctgccacctgggattgtggtggcggcgggtctgtctggcgctcagcttccatctccaccagtgtcacctccacaccacctcgccaagcagcttctggaaaggcccccggccgccccgggctgacctgctgctgtgtctgacccggttagtctttctggctgcctctaaccttgctgcttttccttcatgctgtcctaggaggccaaagcaaagtaagtactcgcctgtcctcatgccccattccccttcatttgaccggggaacccccagccctcgctgcacctgagggaacccagcaccacctgcgcatggcccagtctgcccagagggcctcagtttcccatctggaaagtggaggaattgggttttctggatggggcagcagcaggtgggcaccctgtgtggccgtgagcagggtcctgtcctgggctggcgggtcagcagctgacatgcggctccctgcagggaacaggtggcagtgccaggtctcggtaggagccttgaagtggcttcccctccctgagcggcggcttctgcccggagcccccaagaacatagtctgaggccactttggccaataaagtctggtagggcatcaacactgggggccagctcagtggcactgctgatgggacctgcacggctccatgggagcagagagactggtgggggtaccaccgcacgatgtcacaatgccctgtctcctgggctcttgctcccaccccacccccaacccacaacccctgcctctgcccatcagcctggccttggtaagtgctgccccagcctggggaaggaatgagcaggggagcctagggagcgtcttcatgggccctgtggcctcccatgggccccggttcctcgttggtgccattagaacttgttgctgggactgcgggattcgggccacatgcccgcaaagaactccatgttccacttagaggcttcagagtgcagtgccaggggtgccttcccaaaagtcctccctgcctgggtggagcgtagacagctcagcaccccacggggggcgttggagccagccttggttttgttgggtaaggatgttagaagaggggcgaagacccatagccactggtgtgaagggtctgctcttgaccgaaggctgcctccctctgggtgcagaccaggcaggtggtcccagtcacggtgccctggggccactgggtctgtctgccctcaggctccactagacacacctgcggaggcagcagactagcagcggtgtctgtgaggggcagctgcacagccccctcttgagggtgctcctaggcgttggttaggcccaggcgtttctgcttttggggagcagagcctggagtcgggcatggctggggaggaagctatcgcaggctgagcgcgggctggggtgctgacctgcatcccaagagcagatttgcccctgccttctgggcctgtcctttctgtaacaccacactggacacctgggagcagagcgtcccccggcaggatcccacatggctgctggagcactggggcagcaggtgactgaggtcgcccagagcttgagggaacacctcatccagggaggaggctgaggctcccaggccacagtagcaagtggggagtggagcctcacaacctgcctcccaccaagatggtccctcttaacattacacagaagcaaaaccttagagggggccctgatgtcctgggactgtgagagccccatgattcccctttagcttggatggacccaaaggtatggactccagctgggaggcgggggcagctgatagagagcctagagccgtctcagtgctccaggcgcttggcccctcctttctacacagtggtcaccagcatcctccctggcgtctccttcatgagtgggcactccaccctctgcccggccacctggccccctcctggggaggacagtcaggcccacaaagaagctccctctttttttttcttttcccctgctctgttgtccaggctggagtgcagtggcgccatctcggttcactgcaagctccgcctcccggcttcacgccattctcctgcctcagcctccctaggagctgggtctacaggcgcctgccaccacgcccggctaatttttatttttatttttagtagagacagggtttcaacgtgttagccaggatggtctcagtctccagaccctgtgatccgcccgcctcggcctcccaaagtgttgggattacaggtgtgagccaccgtgcctggccgaggctccttcttttgtaagaactttgagggtgctctgggtgtggcagtggtgtggccaggacagccacagagaccgttctgtagaatgggaacaccagccaccatggtggggtggccaggcctggcctgtggaaaaatgcagggaaagctagttagccagttaaagcttatttcagataaatgacgaaaaatttttagtgtaagtatgtctcagatacttcatgggccatacattcactaacaaaattatatattgttcatgtattgggaggcacttggcctcccagagtactgagattacaggcatgagccactgcgcccggcctgttttctcttcacaacaaaacgtccccacatgggcttgacttcgaagtcctcgaatgtcatctcatggaagccccactggggagcatcctcagcccctgcccagggagggcagccacggggagggcgggcacggggagggtgggcacggggctgcggccacccgctgtgttgcaactctgccctctgcttgctttttatcgctgtgtccggaagatgaggagcgggaaggcctcctgcaccctggagaccgtgtgggaagacaagcacaagtatgaggaggccgagcggcgcttctacgaacacgaggccacacaggcggccgcctccgcccagcagctgccagccgaggggccagccatgaatgggcccggccaggacgaccctgaggacgctgatgaggcggaagcccctgacggcagcagcaggcgtgatcccaggaagagccaggacagcaggaagcccctgcagaaaaagaggaagcgctcccccaagagcgggctcggccccgcggacctggccctcctgggcctctcggccgaacgcgtgtggctggacaagttacttttcgaccaggcagagagctcctaccgccagaagctggcagatgtggctgcccgggcagcctggcctcctgccttggccccttggggtctctgcacccatggaaaccaggtggcctgccaccacgtgacctgggggatctgggtcaacaagtcctccttcgaccaggctgagcgggccttcgtggagtggtctcaggccctgttgctggcccccgacggcagccgcaggcaggggactcccaacacaggccagcaggtggccgtccccgacctggcccaccagcccagcccaccggtcaatggccagcccccgctgggcagcctgcaggcactggttcgggaggtgtggctggagaagcccggtatgatgcagccgagaggggcttctacgaggccctgtttgacggccatcccccagggaaggtgcgcctgcaagagcgagccggcctggccgagggtgcccggcgggccgcagagaccggcggggccgcaacatcttagggaacaagcgggccgggctgcgacgggccgatggggaggcccctctgccttgccctactgttacttcctgcagaaggatgcagaggccccctggctcagcaagcctgcctacgacagcgccgagtgccgccaccacgctgccgaggccctgcgggtggcctggtgcctcgaagctgcctccctgtctcaccgacccggtcctcggtctggcctgtccgtgtccagcctgagacccaagtaggagaaacgtgctgggtgggcacccagcctgggctgtgggcacagggacagccatcccaggctggggctcctccagcttcctcccctgcccacctggggtgggggctccccgagacccgtgggcccagcagagttgaatgcaggagcaggctgagtaaaggtggtgctgcgcttgtgggttccagggacactgcttgaggttacaaagttccaggctgcctggatgagggcagggaagggctcagcacagggcagaatctctgccttgcccagggtccctctttggctgggaagctccccaagtcccctgtggctgtcacatgccagggctgagaagataaggctacttataggggcgggaagcattgaagctggtttctggccctagcgctcccctgcgatgagatgtgggagccagtgtgtccctgcctgtccatcctgtgcacccccagctttccttgtcacctgaaaccacctctgagggaaggtggtggcgtctcagatgcatgggcatgtggctggtcaggtggcctccatcccagggtgccccgtctgtgtgacctccctctgggtgctgtgggcttgctccagggtgcaggtgcaaccccagcagcggtctctggggccaggcaggtgggtggacgattggacttggaggggaatacagagggcatggaagtggcgaggctggcctgttggcgagggtgtcctggtggtggggcgggctgagtcagggaaggactctgaaggtcccaagcagctgctgaggcccccaaggaagtggttccaaccttggacccctaggggtctggatttgctggttaacaagataacctgagggcaggaccccataggggaatgctacctcctgcccttccacctgccctggtgttcacggtggcctggtccctccttgccgagagagtgtcctgggtcagggacgcagaggacgctcacagactccagccctttgttaccgagaggacacttggcaaggtccagcgatggtccggagtccacacacagactggcggcagggcaggagggggacagttctgttgtgcttggttggacagtaagagggtcttggccagtccagggtggggggcggcaaactccataaagaaccagagggtctgggccccggccacagagtcatctgcccagctcctctgctgctggccagtgggagtggcacgaggtggggctttgtgccagtaaaaccacaggctggatttgcctgcgggccatggtccctgtctagggcagcaattctcaaccttcttgctctcaggaccccaaagagctttcattgtatctattgatttttaccacattagcaattaaaactgagaaatgggccgggcacggtggctcacgcctgtaatcccagcactttgggaggccgaggcgggtggatcacctgagatcaggagttcaagaccagcctggccaacatggtgaaaccttgtctactaaaaatacaaaaaattagccaggcacagtggtgtgcactggtagtcccagttactcgggaggctgaggcaggaaaatcgcttgaacccaggaggcggacgttgcggtgagccgagatcgcgccgctgattccagcctgggcgacaagagtgagactccatctcacacaaaaaaaaaataacaaaaaaactcagaaatgctaagtgtacttatttgttgaagaaacttgttacatattactaacatcttttttttttatgagaaatacttttcccataaccaaaaaattcagtgagcagaatggccttgcttgaggtttttgcaaatctctcgggtgtctggcttagtgggaggcagctgggccctcatacctgcctccgcacttcagctgtttgacataaacccagcttcgtgtgagtgaaagggaagggcctggggaccctcagaggttctcggaccacactttgagaactcctcgtctggaagacaggcctggggatgccatgtggggtgagggcttacgggcttggtgtcgctttgtggagaaccgctggtgtctgaagcgggtgtcagccccactgcaccttggtgcttctgggctgtcctgatgccgaggcccacttcccagccatgctgactttgcctctttcccctcccagcagaaaaatggctacaaacttcctagcacatgagaagatctggttcgacaagttcaaatatgacgacgcagaaaggagattctacgagcagatgaacgggcctgtggcaggtgcctcccgccaggtgagagctgcacgtggggcggctgggcggctctgctgcccgacaggagtggccggggcacacaaagcggattcagccaggccaggaaggcagaggcaccctggcccagtggctctgctgtgggtgctgggagtggggtctcggggcaggcggccttggcacggcccgggccgggtctgctcagggccctcctgccggcgcctgtgcacttggtgtggggccaggcctggcactccttcccccgcagacatgggcgcctttgcctgtcgtcacagcctcaggcatctcccgcttttctggcccgccaagctctcgttctgtgcagtactttcttgctgtctctatgtgagggttcatggggttttttggtttgttttttaattaaattcttttttaataataaaaaaaagactggttctttctgcactgtctgcaggagaacggcgcccgtgatcctccgtgacattgcgagagccagagagaacatccagaaatccctggctggagtgagtacccgcggcccacggacctgcgggctcctgctcggccaagcagcatgtctgatttttcctgatgctgctggttgttttggcttcacagcagagtcagggcagggtgcacggcgctgtgctccttgggacgtgtggctctgtgacctccatgcccggactgccacggacagtgttcttattctcgcgtcccttccgtgcttacctcgtctgccggctggcggtcacactggccgctcctgtggggccggctgggagctgagtggtgccatttgcagggtgtcctgtgggcacctggcatgagagcctgtgcctccctgcttgctccctgtggcaggactgtgtgtctgctgggccttcccacattccctcttagatcttgcctcactggggagagagaagtggtggttctgcaaggcgcaaggagttcagagcctagagttggcaccgtcttgagttggagacccagaaggagccctgtatccctgcttggcctccaggccccgggccaagatcaggagttggaggcagtagctgtggcctgacaagctggctggggaaggggtgtcctccgggaggtggcagccctggtgttcccgaggagttgggactgcgttctccccgggacggggtggtgtcctggccccaagaacggggtcagtgtttctgtggctgctgctatggctttccacagcctcacgctggaaacagtacatctgtatcatgccgggtttccaggccagaaatctgaaatgtgtctcacgaggctgtccccagtgtcagcaaggtcgccatccttccaaaggctcaggaggagtctgttcctttgcctctcccagattctggtggatgcccacgttgcttgtttcaaggtgctcagcaggcagcctcatccccgccccgcctccacttccatctcgcgcctctctcgaacctcctgcctcgctctgtcacttacgtggttcttgtacttgctttgggcccccaggatcccaggtccaggatgttcccacctcaaaatcctgaatttaatcgtgtttgccaattcttctttttgccatgtaaggtagtggatttgcaggctctgggggttgggacgtgggcgccggagattctcattgtctcatttgtaaggtgcattgctcctcaccaacatctgcagaagcctgggtcccccacagtgtccctccaaagtccagaatcccatccaatcaggcatgggggattgcgtggtccatcctgaggcaaaattcctctccatctgtggaccagtgaaactggaaagcaagttatctgctcccaaaatacaattgtgggacaggcattccctttcaaaatgggaaaaagaagaaggaaacagggcgtcactagtcccaggcagtttcacagtccagcccggcgggtcacgtgaggtttgaagggagcgctcctgtgtggcccatggtcccccccgctgtcattttttaacatccctattcctaccaacagcatgttcgtggcagtttaggttgttctagaagatgacgtgttttctctgccctgctcctcacctcctctgagtcctcaccgagggccttagcatctgaattctgccaacagagtgctcaagacaggctagggtttttcttttggagcgggtgggtgagttgtggacagagtcttgctctgtcgcccaggctggagtacagtggcatgatcctggctcactgcaacctcagcctctggggttcaagcgattctcctgtgtcagcctcccgagtagctgagactgcaggtgtctgccaccaagcccagctgacatttttttttcttttttttttttttttttagtagcggcagggtttcgccatgttggccaggctggtcttgaactcctgaccttatgatctgcccacctcggcctctcaaagtgctgggattacaggcgtgagccactgtgcccggcccagtctaggggttttctgtcacgtccttaaaaattttcccgcctaaccactgcccaattccaaagccatctccacattgttaggcattccagcagcaccccacttcctgggccaggatctgtgttggtttccacgtgatgttgctgtaacgttgccacacttccgtggcttaaaacagcacaagttcctcaccttacagttccgggggccagaagtctgagatcatcttatggggcaaaatcaaggctgtggtccttctggtgtctctgcggggagaatccgcttccttgtctcttctggctgctggaagctgctcacggtccttggcccaaggctcccaggcagctgtcttgtcactcagcctccctctcccctccctcgctcctgctgcctagtgtgggcccttgtgatgacagtgggcccacctgggtgatccagcatcctctctgccgcttaacttaatcttatcacatctacagaatccctttgccatgggagaccatatttacaggctctgcggactcgtatgtggctttgtgggggccattgttctgtctgccacagccacagccacagccacctaggggtgtgctggctcccgggccataagctgggcatccctgggtgggtgggcccaggaagggctgccactcctgtctgccaggtggggtgctcctttgtgccttgcgttctgcccactggcttgcacccctggcttgcccaggcacctgaccaagtccaggctaggcagacatgagattaaggtagcacagatttttgcgcccaagtcaggcatattgcactccagtgcccagaaggcagcagtcgggggcttggccctggggctgcaggaactcttcagccctggctgtgtggggtcaaccctaaggtgtctctgggacaggcaggtggtcgcactgttagggcttagggactggtttgctgctataacaaaggtccatagactgggtgacttaaaccacatgtattttctcacagctctggaggctggaagtccatgatcgaggtggcagcaaggctggtttctcctgaggcctctctcagcatgtagaccgtcttctccatgtcttcacacggtcatccatctgagtgtgtgtgtgtcctgatgtcttcttattggacaccagtcagattggattagccccctgcccctcagtgacagttacctctgcaaaggccctgtctccaaataaggtcacatcctaagataccgggggataagactccagcatgtggatttggaaggacattattcagcccatggcaggggcccagtctcatcttggatttggggtgggagtgctcagcagacactggggtttcagaactgcagggtttctggtagcgtggtgctggcacagggttacaggcatgggtctggctctgaagtgtttgcctttggcatcccccaagtccctgaggggctctctgaggcccgctgtgactgcactgggtgacctgagcctgcccgttgaagctgtgctcagggattctgatgcctggcatccctagtcccccctgagtcagcatcaaaggaggggactctccctgtgtcctgagtgctgtgggctctggcctagtggcccgcagagccaggcagtggtgaaacggcccccgctgctcatcatgcagcccggggccagtgctgacttagtgcctcttccagaggggaccttttccctgtccttgggcctgctgtgtggggtgcatgaggcctcaggtgccactcacagactctggcctcctcaggacccagccccactcccgcgggaggtctgctgtgattctccatgccccctgacgccccaaagcctggccctcccgtgctccagcttctgcccccgagtttgtcagtttctgccggtgcctcccgtacccccaccaccattcacgcgcctctgccagcctggcctttccctgtccatttcctcctggccttgctgccaggtgggcctcctgggccagtttggctcggccttgcccatgatctgcggggcttagctcccacaccctccagatacataaacaagcattccccacagcatggtcccaaggacggtggcaggagggccccagggatgggtttgcacgttgggcaaaggcctgagtatgtccgcacctgctgcaaggagcggctttgcctgcccggctactccaggcccctccccacagagagggagccccggggagctgccgagatggggtttgctgagagctccatgcagccaggtgcaccctgtccttcgagccatcctgttggagggtgggcaggctaaatggcccatgcgtgcaggtagatgcttaaggactggctagtgttaagggccaggaggctgggatcctgtctgggccccgaggtatcagtctcagctatggcagagtatgaggtggcttggggccctggatcacctagagactggcttgctgagtgagatggcaggcgtgaggcccagggagacaaagctttgggtggctgctgtccacacaggtgggctccttccttcttcccccactgggccctcagctgctcccgcctcccatttccagtgctgcctggtcccctgaggcgtgtcccaggttgtccctaggactgtgagtccttcagcacctcccacccagcctctgagcctggctgctcagcaggattccgccgggcagcagcagccatggcccagctccccacagcctccgtctctggggcaccaagagcctcctgtcctggactttgcctggctgagaatttcactgtggtctgtggtggccgccacctctgaggtcataagtttgagctgggcatcagcggggggcacctcctgctctcccgagctgtagttttccttccgtgagttcctgcagtcctgagcatggcagggggaccctaggagcaggctgggcactgagccctcccctcctcctgccttgcagagctcaggccccggggcctccagcggcaccagcggagaccacggtgagctcgtcgtccggattgccagtctggaagtggagaaccagagtctgcgtggcggtgaggccccgggccagtgggttggggctgtccctggcccctgccatctaaccgtgctccccttgcccccccagtggtacaggagctgcagcaggccatctccaagctggaggcccggctgaacgtgctggagaagagctcgcctggccaccgggccacggccccacagacccaggtgaatgctctccccacgcctgacactgcaggggaccacgtggccctgctggcttccacgtcgccctgtgggctggccccagcagcagtgatgagctggcagccaggatactggagtcctcaggttcccaggaaggtttacagttagccctgggcaggtggaggcagtttttgtctttcctggggccctgcatgtacacagctgcggtacacaggggctgcccttcctccagtcaaaggagggaggagggccaggaggtggccaggcagctctgggccctggttggggcgtctcagccgtgcctcctgtcccttcccctgtggcagcacgtatctcccatgcgccaagtggagcccccagccaagaagccagccacaccagcagaggatgacgaggatgatgacattgacctgtttggcagtgacaatgaggaggaggacaaggaggcggcacagctgcgggaggagcggctacggcagtacgcggagaagaaggccaagaagcctgcactggtggccaagtcctccatcctgctggatgtcaagcctgtgagtgggcggggtggggcttcagggggccaggcactgccctggtgcccgcctagccggctcagcctgtgaccctccccctgcctctgggttctggggagactttaaagccgagtttagaagtcttgggataaacacaaacttggaggcaggaaggtgtgaatttggattgttttctgtgggccctttaaggaaacagaattgtggacacacagtggttgagggtagggtgcatgcaggtacttcctgggtgttctgagggtggctgaccccagcttttcctcccctttccccacagtgggatgatgagacggacatggcccagctggaggcctgtgtgcgctctatccagctggacgggctggtctggggggcttccaagctggtgcccgtgggctacggtatccggaagctacagattcagtgtgtggtggaggacgacaaggtggggacagacttgctggaggaggagatcaccaagtttgaggagcacgtgagtgagccggccggggagaggaggggagaggagactggggaccctggcccataccctgcactccaccccacggcagtgggagcgagtcccagagtgaaccccacctcagaggaggctcctggctccgagtgggctgtaggggaacagccctgaccgtcaccctccgcctctcctcaggtgcagagtgtcgatatcgcagctttcaacaagatctgaagcctgagtgtgtgtacgtgcgcgcgtgcgtgaggccctgccacgattaaagactgagaccggccctctggctccgtcctggtcatttcctgctcgtacctggcctgtctccctccctgtctcagccccatctctgccctgctgttcccacacagt

SEQ ID NO: 1597 - DNA, 579 bp, Homo sapiens
cccagcagacctccgcctgtccctccatctcctggccactccctcccaaagctctggccctccctcttctttccattgcaaaagcaagtccagttcagggggtttaaaaagccagaaacagaaactgttaggtcactatctggagaggccaccaccccaccactctgcctcctgttggcattgtccccatgggagcaagcgtgcaagcctggaattgtccaggaaagaagtcccagtagcacccggccctgctgccatgccctttgtcatgtgctgtcccggccctcccctcacctcattcattcctggaatccctgccccttgctccagggactgtgcccctcccatgatgttctggggtggccagagcgtggctgcctgggctctgtggagctgtgcctcagcatcctgacagccgtatgtggtcagcatgggtggccacactccctcccctggaccacccgtgtttgcattggggtgaaagaggatggggtgtaattacttgattacttctggtcagactctgtcctcggggccccaagccacaggggaatggattctccctgggtagtggcccct

SEQ ID NO: 1598 - DNA, 561 bp, Homo sapiens
gccatatcctctcccacctcctgctctttcctccagttgtgtgcctcgtaacctcttcctccctccaaggctaaatcaaaccctacctccttatacaggaggaagtaatttctgggttgatgtatgcatccggcagattcatgctgagccaacaggttaggggctggagaaacagtgatgagcttaaccaggccctgccagcctgcccaccccgagtctggtgagggtagcaaaaaacataaagtggaattgataaataatataatctatccatatccatatttttattttttattttttgggacgaagtcttgctctgtcacccaggctggagtgcagtggtgtgatctcagctcactgcagcctctgcccccgacccccggttcaagtgattctcctgcctcagcctcctgagtagctgggattacaggtgcgtgccaccatgcccgactaatttttgtatttttagtagagatggggtttcaccacgttggtcaggctggtctcgaactcctgacctcgtgatctgcccgccttggcctcccaaagtgctgggattac

SEQ ID NO: 1599 - DNA, 386 bp, Homo sapiens
gatcagggctcactgcagccttgacttcctggtttcaagggattcttctgccttagtcccccaagtagctgggactacaggcatgtaccaccatgcccagctaatttttttgaattttagtagagacaatgtctcgctatgttgccaaggctggtcttgaaatcttggctcaagcgaacctcctgcctcagcctcttgagcagctgggattacagatgcacaccaccatgcctggctaattttttatttttttaaattatttttattttttcccaccacttgctgcctgttgataattttttattaactttttttttttttttttgtaaagacaggatttcgtcatgttgcccaggccagtctcgaactcctggcctcaagtgatc

SEQ ID NO: 1600 - DNA, 541 bp, Homo sapiens
gtcgcctcaaggcaaaagtagctgagtgtttctatgtctgttttgttttcctttctatcttctctttttggtgggtaattcttcaccatcttgttgattctttaagtcttagcataacacacattttaaaaatccagttgttttagttgctttctgtcaccatagaaggtcaccatggttctcagccctgtcggacctggagcctggtaccatgaccagggacagggagtcctcatgccgttttaagcagtggtgatctaagttttatttcttaggtgagtcaaggtcggaaaagcttgagacccctgctctaggggctgtacctgtccctttctgccttttctcctgtctggactagggttcgaaggggctggtgggccatgtggagaccaagtagctgacaatccccaggacctgtgggctcagacacagggccctgcacctctcagcccttccggtctcagctcagcacctcccttgcctggcccctctttcctgcatgagctccctgcccctgccaggaggaacctctgtcctgttt

SEQ ID NO: 1601 - DNA, 9815 bp, Homo sapiens
tgcagaggccgcgccgcctcccccgtccgaggtctgcgcgctccgccgcagggtgcagacccggggcgcccgcctgggtttggggcgcaagagcagaggcggagccagggcggagccagcgcgccgggtcccccctgaatcgaaagcgaaacaggggccggggaggaagggcggagccggccccgaggcaccgccccctgccctgcgcggctgctggaccgacgggcgcacccaggtaggggggcggctgagccgcgcagtgcggaccctcgcggggaactgcgccgccgccaccatgtctcaggaaggtgtggaggtaagcgatggctacggctgggccggggtcagccgcgacagaccccgaggagcggccgggaggcgcggagggggcttcgcagttcctggggacccccatcctagaaccccagatccttacccctgcctggcgctcgccccccttgaaaaggaaagtgactcccacgtttccccagagcgaaatgaggcctccccgaggaaaagcgggggctgcagggtcaaaggtcagaggccagagataacctggccgcccccccacaccttaggctgggacgctcgccccagtccgcgccttcccccaacgccctgtggggactttggctttttccaggaaatgccgtaaagggatgaaaggcggggggggggcggcggaggccaaaaccaagggtcaagttcgggccgggagaacggtgcctagagatgggggagggatgatcccgtttccccttcccccaccggaacccccctgtctccatcccagctggagaagagcgtccggcgcctccgggagaagtttcatgggaaggtatcctccaagaaggcgggggctctgatgaggaaattcggcagcgaccacacgggagtggggcgctccatcgtgtacggtgaggctgcaggggtcccgggcctggtgcggggaccgcgcgtgggagcgccgagggggcgtggtctagggagaggcgttgagatcacctcccccggaggtcccagccttggggaggctctgcgtcgcggctctgggtggcctggaactcccacagacccttcaagggcccttcccttatatgcactctcccccgcaggggtaaagcaaaaagatggccaagaactaagtaacgatctggatgcccaggtaacctatcccctcccctcgcaaaggaccgggtcacgggagggagagcaagaggggggacccgacccgttcatggtgactgacccccctctgaaacaggagggaccaggcattgtcggtccataactcatcacccaatctcactttttcacctctccatcatttgtccggccagggagcctgcaaacagtaggcgctcattatgtgctgattgtattcaatgggggagagagccatgaaactaagcaatgaaaggagccaggattattgccatcatagcgggggcgcagaggtcagagaaggcttactggaggaggaggtaccaagtcttaaaggatggggaggagtgagccctgggaggggaaagggaaagaaaggcaggggtcttggggtgggggagggaatggcataagcaaaggctgggaggtggggaagggttgttagtggcagtctctagaaaggctaggatgagcagaggattggggaggagagagaggcaggggaatggaacccttgtgttgaatgaatgaatgaatgaatgaatgaatgaatgaatgaatggctttgaagcacaggtgcatcatggctactttgcttctttgacagctttggtgatgggaacgctgtggatttagcctgcctgaaaggcttagtgtagggctgttaaagagtataataggccaggcgcggtggctcacgcctgcaatcccaacattttgggaggccgaggcgggcggatcacctgaggtcgggagtttgagaccagcctgaccaacatggagaaacccgtctctactaaaaaatacaaaattagctgggcatggtggcgcatgcctgtaatcccagctactcgggaggctgaggcaggagaatcacttgaacccaggaggcggaggttgcagtgagctgagatcacaccattgcactccagcctgggcaacaagagcgaaactctgtctcaaaaaaaaaaaaaaaaaaaaaatgccgggcgcggtggctcacgcctgtaatcccagcactttgggaggccaaggcgggcggatcatgaggtcaggagatcgagaccatcctggctaacatggtgaaaccccatctatactaaaaatacgaaaaaaaaaattagccagttgtgctggcaggcccctgtagtcccagctactcaggaggctgaggcaggagaatggcgtgaacccgggaggcggagcttgcagtgagccgagatcgcaccactgcactccagcctgggcaacagagcgattctccgtctcaaacaaacaaaaacaaacaaaaccagagtataacaaaacatgtatcatagtctacatttatacatataaaagtatgataaaaatgatagcagaggggccaggtgtggtggctcacgcctgtaattccagcactttgggaggttgaggcgggcagatcacttgaggtcaggagttcgagattagcctggccaacacggtgaaaccccttctctattaaaaatacaaaaaattagctgggcgtggcagtgcatgcttgtaatcccagctacttggcaggctaaggcagaagaatcacttgaacctgggaggcagaggttgcagtcagccaagattgtgccattgcactctagcctgggagacaagagcgaaactccgtctcaaaaatataataataataataataataataataataataataatattagcagagagtagcattcattgagtacttcccacatggcaagattccaggaatttatttatttcatcactgcagtgaccccaggagacaggtcctattatttatccccatttcacagacaaagaaactgaggccgaagtcacttgccagcaagcaggggcagctgcgatttgaaccctggccacctggagtcagagcctgggctctaacatgcctgtcagtgggaacccagggggcagggagtggcttgcccaagtccccacagctggaagtgatacagctgggatttgaacccacatctctctcccacttagccgagcacaacgtggcctcaaaggggcgatatgtcacaacatcaacaagcatgtggcatttgcaggcaggaagtgagtatgggggtcaggctagcctcactcaggcaagccctcccctaagcctcagtttccccatctgagcaataaggtaacaggtgtgcccacctctcagggctgctatgaggacaactgaggccacacacctggctctcaataagtgagtggtgctctgtgagcttctggcgagttaggggcaccctactcattgcggccgggggcctcccccagcaaacgggtggaaagaggcctgagccccatccccagtttctgcccctgctatctccacccaggatccaccagaagatatgaagcaggaccgggacattcaggtgagttggtggctagggcttgggatgggggagttgggagggggacatctgcaggcacagaaggatgtccattagggcaggaggggagatattcactggggcaggaagaggactcgtctgtagggagaggagggctgatgcttatgttggtgcagaaggggtgacacccccccacctcatccccacctgccccattccacaggcagtggcgacctccctcctgccactgacagaagccaacctacgcatgtttcaacgtgcccaggacgaccttatccctgctgtggaccggcagtttgcctgctcctcctgcgaccacgtctggtggcgccgcgtgccccagcggaaggaggtgatgacctaaaacttaacctcgactttgactgtcccgaactccactcctgactcctatcctcagtgactgtacctctgacctaaggatttcaatcactgagagtccaatccctgacctccaaactcagagctcagccttgatctctgatcccaacccctgacccaggactggacttctgaccttaaatgtgagaagcccaatacctccttaccccagaacctgacccttgacccacaattgaacagctactacagaaatcaaacctggccaggcgcagtggctcatggctgcaatctcagtgttttgggaggctaagtagggaggatcgcttgaatttaggagtttgagaccagcctgggtgacagggtgagaccctgtctccaaaaaaaaatgtgttttgaagacagggggtctcgccctgtcacccaggctggagtgcagtggcgggatcatagctcactgcagcctccacctcctggcctcaggtgatcctcccacctcaacctcccaagcagctgggactacaggcctgcgccaccacacttggctaatttttgtattttgtgtgtgtgtgtggagatggggttttgccatgttgcccaagctggtctcaaactcctgggctcaagcaatctaccacctcagcctcccaaagtgctgggattacaggcatgagccactgtgcctggcaaaaaaaaatttttttaattagctgggagtggtggtgtgtgcctgtggtcccaactactcaggaggctgaggtgggaggatcgtttgagcctgggaggtcgaggctgcagtaagccatgatcacaacactgcattccagcctgggtgacagagcaagactctgtctctaaaaaaaaaaagaaagaaagaaaagaaaccaaatctgacctcaaaaacacagccccaaatctggcttctgaacctcctgactagtagttcacttctggtcaatgcttaactagttcttgcaaaagaggcaggaagccaagatgtgtagtgtttgccaatttctgtggtgtaaatattcccaccatggtcaatatcaggctacccacgtgaagtcactgattgagttgggttgctcaagctgaggccagccgctgcagcacactgctagccctgaccccaacctcagacacctctgacaatccttggtcccctctctgtaccttcctgcccaccaccaccaggtatcccggtgccggaaatgccggaagcgctacgagccagtgccagctgacaagatgtggggcctggctgagttccactgcccgaagtgtcggcacaacttccggtgagggcgctgacccccagctccccctcagccctgccctaccccagccctgcccctccctgccctggccccaccctggcccagcctcgccctcggaccctcacagccctgcccgcccccaggggctgggcacagatggggtccccgtccccctgctacgggtgcggcttccccgtgtatccaacacggatcctccccccgcgctgggaccgggacccggatcgccgcagcacccacactcactcctgctcagctgccgactgctacaaccggcgaggtgaggctcttctcccccaacagcctggacagtctttgtccccttctgtgcctttaagtccccaaatctccactcagtccactttgtctcccacagcagcagccactgcttccacatggcctccatgaccccccagtctccgtggtcttgcccaggaggctctgaggtttcaccccagtggcccgtgcctgagggtccccatggcctctgcccccatggtctctgggtttggggcccctgttttgtcccctgtaatctcaggtgacccccatgtccccaggtctcctgtatcttcaacacccctgaatgtccagttgtgctggtccccgtatctggtggtctcagctcctccctagagccccgcgtggcctaagtcccctcctccccagactctcatgggacctccagccccatgtctgcagcacctctccctccctagagccccacgtgcctgggacatcctgtgctcaccccaagagccggaagcagaaccacctgcccaaagtgctccaccccagcaaccctcacattagcagtggctccactgtggccacctgcttgagccagggtggcctcctggaagacctggacaacctcatcctggaggacctgaaggaggaggaggaggaagaggaggaggtggaggacgaggagggcgggcccagggagtgacccctgccaggtgcagatacaaaccagacacggtctgtggctactttgtgttattataagatatgagctcaaaccgagatatgaatgaccttggggagccatctgaggccaagatattgacgggggggattcctgggtcccattttcagcgcccagggtcacagatccacagtgggaagttctgtgggacacattggcactgagccacaaagaaggtgtggccagaacaacttgggctcctgctgaccaatgtcctctagggcctaggggacagaggaacacagagtcacagcttcaggggccgaatgagcatggcggccttcctgagagaatatgccccaccacgaaactcagcccagtagacaccatcctggtagcggcttcggtagtggccgccgtggtgccacacaccgttgaggttggagtgggcacaggcatggtaccaccagcctccccgctggtacagggcacagttacctgaggggagagagagagtccatgtcctctcaccagaataaaagcctctacctgcacctcacagtgcaaggcttttgccaggcatcccctggcccctcccattcttattgaatacaagccctgatcttccatctcctcagcaaaaaaataggagccctggccccccaactttcttcagagtaatagccttaattccttccctatctccttaccaaagtacaagtcacatctttcccaccttttctgcaaactaggagtctaccgttcattcctttatcaaagaaaagtatctacttcctttctagaataagagtactagctctcaccctctgccctttacttgaacaggagtcttgattctttttttgcctcatcagagaaggaatctggactccccatccccccaccaggataaaagtcctgacctttgttctcttgacggaataaaagcttgcttatccttatacttaccagaggggcgtcttacctaccctacctcctttcattccctcaccagaacaggagtcccgcctcccctatcctctcaccagaataggagttctccttaccagaataggagtctcggtccctatccacggtgctgaagggcttgtcattgtgccaggaaagagagtctccagcatcaccatggtactggccaagccgcaggcggtagtggtcgctctcgggttccagggagaagccatcatagtgggcacgtgctccacggcccccccagtcctccaggagaaccagcagctcatggtccccacggctggtcagctgatacacgggttcaaggcccagccagtattctccgtctggccgcccaaagcccgcctggcagggcaggaaagtcaggaagccagaacaggctccctccccttccctgcctctgcccacctgtgcccaccttatagtgctgccaggtagtgaagaagttgactgaaccatcttgcctccgctggatcacagtccagcctccaccctccagttgctgctcacaccatactgacactacgtgacggcccactcgcagttcatacactccactctgttcatggcctgcctggcgggcctctgcacaatcctgccacgggcctgtgggcacagggataggggggaggcacagcctgggctgaccaatcccttactggagcaagagtcaagattctcacaggtcctctcaccagaataagagttctgcctctcccacttttctaccaaagagtcctgcctctcccatttcctcaccagaataagaggcctgcctctcccatttcctcaccagaatccgagctccaatagccatttctttacctaagaatctgggtcccttgtctctaatcaaaggaaatgtcaagtctggggttctttttttttttgagatggagtctcgctctgtcactcaggctggagtgcagtggtgcgatctcggctcactgcaacctcatcctcccaggttcacgcctttctcctgcctcagcctcccgagcagctgggactacaggcgcccgccaccacgcccagctaattttttgtatttttagtagaaatggggtttcaccgtgttagccaggatggtcttgatctcctgacctcgtgatccacccgcctcggcctcccaaagtgctgggattacaggcatgagccatcgcgcccggccaactctggggttcttaaaccctggttttttatggtctcctcaccataatataagtcctgaatatgatactctgaaccagttcaaactcttaccaaagtagcagtcccaaacatcgcctcactaaagtaagagtccctcctcttctatttcttgtttctcctattttcacaccttagaagtttggtcttatttttaatcagaataggagtatcatttcttctggtcttctcacaatgagagaaatctgccactaaaatcctgactcctcaattttcctctacccacaattcctcagccctaatgtcgacttacccacaggcttggtggggaccgcagggtgacctgcaggcatgggagaagccatgggctcctgctgtctctgggtctggtctctctggggctctggggctgggtccagcatcctactggtgtcactggtgctacccacaagacggaccggaaccacaggcaccagtgggggtggcggcaggacctggggtgacggagaaagtcaggtgtaattgcactaaccctcaggccaggaggcctggtctcaggggcagaaatggtggataaatctcccagctcccaaatgacctggacatctggcagtgggggtgtcccagccctaggaatgatcctccccaaaagctaaacaacttggctttaaagtgcagacaggctgggcgctatggcccgtgcctgtaatcccagcactttgggaggccgaggcgggcggatcacctgaggtcaggagttcgagaccagcctgaccaacatggtgaaacctccgtctctactaaaaatacaaaaaaaattaactgagtgtgttggctcacgcctgtaatgccagctactcggaaggttgaggtaggaggatcgcttgaacctgggaggtggaggttgcagtgagccaagattgcaccactgcactccagcctgggagacagagcgagactccatctcaaaaataaaattaaaaaaataaagtgcagacagagctgggcttaaataccggctcttggtgctcatggtttaattgatctgtgccccagcctcctctgtagagtagggataataacaacacatccaacagtatctaacttactgactcctctcaccaaccctgtaacgtagggactgtcacagagcaacattctcttatcccaaacccagaccaggacacgttccagaattcagaataacacggctggatttagacacagtgacacagggagggttatgtatatgcatgtgtgtatagaatatacataacactcctaaaggggtttttggtctttacgtgataatgatatgtttaattataggatcctatgactattcacattaagtggttaagtgaaggctataaatagccaccagtcactttttgacccaaataagttaccagaaggggcgagtaggaatccggttttcagggttttgcggatttcagaactgtggataagagatcgtggggttgcaaaacccccatttcacag

SEQ ID NO: 1602 - DNA, 283 bp, Homo sapiens
gccaggagtttgagaccagcctgggcaacatagtgagaccccgtctctacaaaaaaaatagaaaattaaccaggcatagtggcatatgccagtagtcccagctacttagcaggctgaggcaggaggatcgtttgagcccaggagttagaggctgcagtgagccaccatcaaaccactgcactccagcctgggcaacagagcaagatcttgtctcaaaaaataaataaatgaataaatatccatctgggggtgtaactttaacacttttacctataggggtgtg

SEQ ID NO: 1603 - DNA, 278 bp, Homo sapiens
ctcactcctgtaatcccagcactttgggaggctgaggcaggtggatcacgaggtcaagagatcgagaccatcctggctaacacggtgaaaccccatctctactaaaaatacaaaaagttagctgggcgtggtggcgggcacttgtagtcccagctacttgggaggctgaggcaggagaatggcgtgaacctgggaggcagagcttgcggtgagccgagattgtgccactgcagcccagcctgggtgactgagcgagactccatctcaaaaaaataaaa

SEQ ID NO: 1604 - DNA, 1011 bp, Homo sapiens
cgcgcgctgcccggtggtcccgagagctgccatggtgcccagccccgcggcctcacccagccctcaaaccccgtgccaagcacccgcggactctcacgtcctcttcttccagggcggcgggcgcttctcctgcaccttggcctggcgcctcttctcggcctcctccgcctcccgtttctcctccttggccaccttgtaaggccacttgggtatccgcaggtggccgctgcctttatgctgcccttccgcgccggccttttgggttggaaggtgggcgcgggcaccttgctgaggcggacctgggcaccaccacgctgggccccaagctgctctgctgcaggcactgcaggggcaggaggctggccgtccgcggggcgggggcggcggagccccaggaccccggcagccgggcaggtgggaggccggctcttggggaggcctttgtggagccagcggccgctaggccgagcggcttatgctactctgcgccctcctcttcgcccgcctcctgcgcctgcctccccccacccctcgccgcgccgccggaatttcctgcgccgccaggatttcctgcaccgccagccgcctcttcccccagcacaaggtgctctcggggcacatagtctggcacgcgagggccccggcggggctgttagaggctcgtggtcatcctgaccatgtggtccagggcgccccggtcctctgggccccgcatggagcgcggcgtcagcgcggacagctcgcagtccctgagcctctgcaggcagttcttggagccctcgggcttttgcggcctctcggggagcggcggcagctcaagctggtactttttccccaacagctcccggcaggggcgctccaggagcctctgcatgaggcggacgtataagtggccactcctctggcgacatcccacggcgggggccctcgcgtggacacccgcccctgctagctcagggctccgatgcgatccgttcgaccctgcatggcggctttcaacccgaacgcgtc

SEQ ID NO: 1605 - DNA, 1290 bp, Homo sapiens
atgatagcgtgccctgactgggccaggatagcctctttagtaaaacagccacgaaagtcatgaaacagatgctcagctcctttcttcattttcactttaattcggtgatgcctctgtgtctgtctgacgacatctctcctggggtctgtgattctgctgatggtcttcagtgcctactgagaagggttcctggacatcatcaggtatgaaaacctcaaagctctcggtcctcaacgtgagaaccctgggccagcggcatcagcctcaccaggaaacctgttcttctgctcattcttgggccccaccccaggcctattcaaagaaagactccaggggcagggcctggcagcctgtgtttccaccagatctgtgttaaagctcaaatgaaccagcccacgtgatgctgaccaggaagcacaaggctgagagccagtgtccaaggcaacggtgcccatggggccagaggcagctcctgcctgtgcagctgtatttagggctgcgttcccctccctgtcctgccagttgacgtcagtgtggggttactcagctaaggccaccacggtatatccacaaagccgtggtagcaggcgacattaaggctggtccagccattgtggtcagtctcctgcgccttctcaacgctcacccctcgccgcaccagcgtccgcagcagccccatgcctcctggacgccctcctccgggacgctctccaagccctcgacgccgtgctcctcctcgtcctggaaagggtacagagtcgtcccaggctatgctgcaggtgtggggccctggaactctttgtagtcagcgcggtcctcctcgacctgtgcgcctaggagtggggacggcggtggcggggtcatgcagcgctcccagccaccctgcggccgggtcccagccagcagcaccatgccagcggccggaggcgtgggctgggggccggggcaccgtcccggaaaaccgggcgcgccccaaggtccctgcttctcgcttccgcgtccccagagaagccgtagctcccgcccccagcccggcagaaacctcctttctttacattattaagtttgttttcattttaattttcttaggacattgataaaatcactttcggatttttgagattaaaaattaaataattttcatctttaccctttttaaatttttcacactttattttaatgcttttattcttttgtaaattttaattattgtaatttatatcttcaattattatggaagaattttagaaaagtcttttcacataataaagactaattaatgaactatta

SEQ ID NO: 1606 - DNA, 8894 bp, Homo sapiens
cttcctggggacaaaaggtgactctgtaacatctgctctgtgaagaccctacggggctggggacagggtgtccaggtggggcggtgtccatctctgactcaaggattgttccagcaatcgagctgctgaggaaggaggagccaggggcttttgtcataagggacagctcttcataccgaggctccttcggcctggccctgaaggtgcaggaggttcccgcgtctgctcagagtcgaccaggtatgcgtctgtctctgtgctcactcaaggcctcactgaggcagcggggtgtggtaggttccagtcctggctctggcactagctttcagggtgacatggcgccagtcttataacagctcctaggagaagcgtccaccccagtgttctccccgatgccctccagccccaaggcaccctgaaaaacgcctttcacagcaagcctgcgtgcttctgccttcccgagccccacccccacttccctgcttttttctgatggtgggagagaaggaggagggtcctagccccctctaggctgctcttcttggagtcaaactggattcatttccagggaacctaatgtgtgattacacacgcagctagcttatctcacaggtgatagcttaccaggtttgtgtactagctcagcgcacatgtgtgtgatagcttatatgctttcctgtggtctcccatgcttatttgatagcaaacatctatggagcatcaccacacaccaggcactgtgtgaggcagcagggatacagtggaatcagacacagacaccacctcactagggagacagatgaaaacagatgattacagtacaaggtacctgggtcataggcctcactcaaaccccaggattgcaccttcttatttaacggatgagataacggaggctcccagagttacttaatgactccagagcaattaagtgataaagggaggatgaaacacccagccttgtgttcttgacagtatgcctcactgtcacaataagaaagtgacctctggggagggtgttacttataaaggacgccttgcaagaggcaatgagcccagactgaggaggacactgtggactggtggaaaggagtcagaaggtcattgttcacctccccacccccggggccagcgtggctccagcagagatgacctggtgggcagggggagacagaaaccagaccaaagagtcgacatttatctaaataattaagaagtttccttgccaggcacagtggctcacgccagtaatcccagcactttgggaggccgaggcaggaggatcacttgagcccaggaatctgagaccagcttgagcaatatggcaaaaccctgtcgctacaaaaattacccaggtgtggtggagcacacctgtagtcccaggtacttgggagcctgaggcagcagaatcacttgaacccaggaggtctttgaggctgcagtgagccatgatcacaccactgcactccttcctagaccaaagaatgagaccctgtctaaaaaaaataaaataaaataatccctaggccgaagcaggagaactgcttgagctcaggagttcgagaccagcctgagcaaaatagtgagaccttgtctctacaaaagaattagcccgacatggtggggcacgcctgtagtcccagctactcaggaagctgaggtgggaggattccttaagcccaggaggttgaggctgcagtaagccgagatcatgccgctgcactccagtctaagagacagagcaagactctgtctaaaaaaaaaaaaaaatccctgataactcttgaccagcagaaaggtttccccaccccacccccaaaaaaagaagaagagaaaggtttcctgaagagggtgtggctggagccattgagcagatgtgttggcacctcctctgtgggagggagaggcagggggatggacaaggtggaattttttttttttccggtgagacagagtctcactgtgtcacccaggctggagtgcagtagcacaatctcggctcactgcaacctctgcctcccaggttcaagcaattctcctgcctcagcctcccgggtagctgggactacaggcatgtgaaccacgcccggctttgtgtgtgtgactgtgtgtgtgtgtgtgtgtgtgtgtgtgtgtgtctttagtagagatagggttttaccatgtgggtcaggctgatctcgaactcctgacctcaagtgatctgcccacctcggcctcccaaagtgctgggattacaggcgtgagccaccgcgcccggccacaaggtggaattctatccgaatgcactctttcttctctgtccaggtgaggacagcaatgacctcatccgacacttcctcatcgagtcgtctgccaaaggagtgcatctcaaaggagcagatgaggagccctactttggtgagactccccagcctccaggctcccccgggatggggggccagcgaagtctccgttgtgagctgaggggtgggttggggaagctctactcatgcagggctgcttgcttcctttcagggagcctctctgccttcgtgtgccagcattccatcatggccctggccctgccctgcaaactcaccatcccacagagaggtgggtctgggccccaaagaggcaatgccaaggtgggggacctgtttgttctcattagaaatggggttcactcctaccttgttggtggattattttagtgtcacggttaaaactgtgtgcactggagtcgctcaacatctccacctcctagctgtgaaaatttgagaatgttgacctctctgagcctcagtttcctcatcatacctacttataggattgctgtgcagaccgaaagagatagcccgggcaaggctcttagcgcaatgcctggcatagaatggatgttggataaatagcagcctgctttgagagggtgaaagagcctaaatcaaatagtttggagaggttttctctttccaggtccagcatttgttgagcactcactcacccattcatgcttcactacaagcttgtgaagtagactttgctgttatcatccccatttcacagataagaaaataagggctgggcgtggtgactcacgcctgtaatcccagcacttcgggaggccaaggcgggcagatcacttgaggtcaggagttcgaaaccagcctggccaacatggtgaaaccccgtctctactaaaaatacaaaaatttagctgggcgtggtggtgggcgcctgtaatcccagctactcaggaggctgaggcaggagaatcacttgagccggggaggcagaggttgcagtgagctaagatcgcaccactgcactctagcctgggtgacagagcgacagagcaagacttcatctaagaaagaaagaaagagagaaagagagaaagaaggaaggaaaggaaggaaaagaaaacgagggttctagatgttacgtaatttgcccaaaggcccacagagtcagaccttgaacccagatcagcatgccctatccagagcatacagccaggtaggggggcagctcagatgaaatagatcatctcaggggtgtgcaggagaagctcgagaagggctgtttctggaagggcatcaaggcaagggagccccagaggagcgatggtgagagcctcctcgctttctgcaaagacaggtcaggggttgagacagggtccaaaagaagtgaggaggtcaggggcctgtgaggacaagatcatggcagccatctaagaggtgggggggcgaggaggggatgaagagatcaaaagggttgcaaactaagcatttagggagcccaaagtggcctgtttgcctaattacggtaatcacacctggtttgagtcacttcctggagatgggggtggaggtgggagatcttcaaagggattcatgaggcctgttcctgtgagaggggtccattcactccacccccgcccctttggggggcctgtttctttgccttggctcagaactgggaggtgcagatggggcctcggactctacagacagcccagcctcctgccagaagaaatctgcgggtgagtggtacaggaagggaggcgccaagcttggctgtgccccaagagggcacctcccaaccctgcacacacgcacgcatgcacgcacacacgcacaggcacacacgtgtttcccatctcagctttgtttctgcatctttaacaaggtgccacacccgctccccatcacccctgtaaaacagaagatgagaggccagcagggaagtggggcagggtggggggtggggggagtggcagaacttacagtccctcctgcacacacatgggcatgtgcacacgtgctagggtctctctaggtctgagaaacctgccctagaggtggttctgggtctgggatcctctatggggtgtcaggtctaagtcctggagccttcaccaggggaaaggtccctgacccacactcccagaggccagcacacatcagcacttgtctcagtgactgttcctgctctatgccctgagcacgaacaatttccttccccattcttgtcttctgtccctaccgttgccaatgaaccaagaccttgaagatggaggtgtggggaggagagcagccgttaagtgtggacagaaggatgttttcctgggcacctctacacacagggcaacatcccctcccctgccccatgctggagggccaggggccagggcgatgcaaagccacagaagatcccaaagccctctggggttggcctcaaactgtgatcacccacacacccactttctgttgggtggcggctctaagaggagctccactggattcctgaacaggagactcaccccctcccctggccctgggcagagggagaacctgggccctgggtcagtggccccagcgcagtgtctgcctcccacaggctgccacaccctgtacctgagctcagtgagcgtggagaccctgactggagccctggccgtgcagaaagccatctccaccacctttgagagggacatcctccccacgcccaccgtggtccacttcaaagtcacagagcagggcatcactctgactgatgtccagaggaagtaagggccttcccttgccctggggctccggggctggcggagtagagctggaggggatagctgagacagctgcagatcagggatgaaggtcaagttcagggttctggatgacccagcggggccagtgatgtgctgagtgactccaggcagcttccctgcctcctccaggcctcactccactgccaaagcccctgttcatcatgactgatgaaaatggagttaacgggggccgggcacggtggctcatgcctgtaatcccagcactttgggaggccgaggcgggcggatcacctgaggtcaggagttcgagaccagcctggtcaacatgatgaaaccccgtctctactaaaaatacaaaattagccgggcatggtggcacgcacctgtaatcccagctacttgggaggctgaggcaggagaattgcttgaacccaggaggcggaggttgtagtgagctgagagcacgccattgcactccaacctgggtgacagagtgaaactccatctcaaaaaaggaaggaaggaaggaaggaaatggagttaactagtattcatgggtgccgattatgcctgcacccattgatggaacatcttccctcggccagactggctgaccactgggacccagagaggaatgagatcgttccttccccaggctcggatctcacagtctaacaggagcctgatccagggctgagcacttcacagggagaaacaagagatgaccaagatgtaattcgtgtcctcaaaaagttagtggccaaaaaaaattaaatggcgtggtaggggtgtgatagaaaaccccagagtgtaagacagaggcagacaagccccatgagaggagagaggcaggagcggggcgccagggccccccagtgggaaaggccatagcggtcttcaaggtctaacccagagacttcttggaggacagggcacctgagcttggggggaacgagagatgctggaggcaggatgacactgggacaggctgtcatcgcttcccttctctccccgcctcctcctagggtgtttttccggcgccattacccactcaccaccctccgcttctgtggtatggaccctgagcaacggaagtaagttcaaggctgggccaaactaagaaggctgtccagggccccgctgcccaccaaggcgtcctgccgactctgggcctgggatcccagagggagcctgtgaacctcaaggggtcagggtgacagaatgagggtagggtggggcatggtggggtggggacgcagctggccagtcctgctgctcctccagggtcctgtggcatggagcgaagcctcattactcggtatcatgttcttttcctacaggtggcagaagtactgcaaaccctcctggtaaggccttcctgtctcagggccccaaacccaacatggggagggaactgcagaaggaaagaggcaccattctgactttaatagtccaaagtgttgatgagggcacaggccctggtcctcagggagctcccatctgatgggaaagactttgactgccctcagagcctctgggctgttgggggtgacatgagcctgggagccctcaatcttctgcaagaggcacaggctctaacttcagggagcctcaagctattggaatgtcccagtctgatgatcaagatgcatccttgccctcagggagcttccactctaatggggaatgcacaggtcctgtcctcaaggagccctcactcaaaacaaaggaaacccagagcttgaactcagaaatctcccagtctgacgggagaggcatctccttccccagggagccccaccataaggaggtgctggagtcaattggctaagggaggggcagggaggaatgagatgcaggctgagggccccccaccaccccattcccaccagcctgatgcctccctgggtcccacccctcactcagactgccctcccccaccaggatctttgggtttgtggccaagagccagacagagcctcaggagaacgtatgccacctctttgcggagtatgacatggtccagccagcctcgcaggtcatcggcctggtgactgctctgctgcaggacgcagaaaggatgtaggggagagactgcctgtgcacctaaccaacacctccaggggctcgctaaggagcccccctccaccccctgaatgggtgtggcttgtggccatattgacagaccaatctatgggactagggggattggcatcaagttgacacccttgaacctgctatggccttcagcagtcaccatcatccagaccccccgggcctcagtttcctcaatcatagaagaagaccaatagacaagatcagctgttcttagatgctggtgggcatttgaacatgctcctccatgattctgaagcatgcacacctctgaagacccctgcatgaaaataacctccaaggaccctctgaccccatcgacctgggccctgcccacacaacagtctgagcaagagacctgcagcccctgtttcgtggcagacagcaggtgcctggcggtgacccacggggctcctggcttgcagctggtgatggtcaagaactgactacaaaacaggaatggatagactctatttccttccatatctgttcctctgttccttttcccactttctgggtggctttttgggtccacccagccaggatgctgcaggccaagctgggtgtggtatttagggcagctcagcagggggaacttgtccccatggtcagaggagacccagctgtcctgcacccccttgcagatgagtatcaccccatcttttctttccacttggtttttatttttatttttttttgagacagagtctcactgtcacccaggctgaactgcagtggtgtgatctaggctcactgcaacctccacctcccaggttcaagcaattatcctgcctcaggctcccaagtagctgggattacaggcatgtgcaactcacccagctaattttgtatttttagtagagacagggtttcaccatgttggccaggctggtcttgaactcctgaccgcaggtaatccacctgcttcggcctcccaaagtgctgggattacaggcgcaagccacccagcccagcttctttccattccttgataggcgagtattccaaagctggtatcgtagctgccctaatgttgcatattaggcggcgggggcagagataagggccatctctctgtgattctgcctcagctcctgtcttgctgagccctcccccaacccacgctccaacacacacacacacacacacacacacacacacacacacacacacacacacacacacacacgcccctctactgctatgtggcttcaaccagcctcacagccacacgggggaagcagagagtcaagaatgcaaagaggccgcttccctaagaggcttggaggagctgggctctatcccacacccacccccaccccacccccacccagcctccagaagctggaaccatttctcccgcaggcctgagttcctaaggaaaccaccctaccggggtggaagggagggtcagggaagaaacccactcttgctctacgaggagcaagtgcctgccccctcccagcagccagccctgccaaagttgcattatctttggccaaggctgggcctgacggttatgatttcagccctgggcctgcaggagaggctgagaccagcccacccagccagtggtcgagcactgccccgccgccaaagtctgcagaatgtgagatgaggttctcaaggtcacaggccccagtcccagcctgggggctggcagaggcccccatatactctgctacagctcctatcatgaaaaataaaatgtttgtctttgcaaaacagt

SEQ ID NO: 1607 - DNA, 452 bp, Homo sapiens
gcgcacatttacttagcctagtgatattcccatcctgctttggtcccataatatcaccaactatacccccagatcttatcaaattctgcaaaatattcctaaaacaaaattcattttaattccatagactactagaacattaaagaccctcagaagctgtttagtccacttggtcccctctgagcttcagttatcccatatcagagtcaagatccaggctcccgcctcccaggggcatgtttttctgcccagatctgctattttcctctccttcacgttttctgccattttcttttccaagctgaatattcccgtaaggaattcttaggattatgaagacgaaggagaatgtaatatcaaacatgatgcatttgagaattccttgtttatctcttatttcagtcctcaccaggggactcaacagtagatttaagaaaccatttctccttaaa

SEQ ID NO: 1608 - DNA, 322 bp, Homo sapiens
ggagaccaggtgtgccacactccctcccgcacccctggccacggcgctacaggctcagcaggcttccacttcgtaaaccattgcttaaaccactctgtgtcccccacatgcccaacacgcttgttcttctttcttcatcgcccctttcctgccactctgccagggaaacaaaaggattgtgatttcccggggcccaaagtgagtgtgtacggtgcccctgacggattccaaggtctcactcagcccccactgagagacaaggagaggcgggcaaaacatgaacccctcaagaggagtccggaagagtccccgaacccagatg

SEQ ID NO: 1609 - DNA, 724 bp, Homo sapiens
ctgagacggcagcaggaagggagctttgccaggtttctcgcctgccctgccagaaggaggcccttgatcctttaccaccgtctcctcccctctggacgagcattcaagcctggggctgcctgaaaggggcagtcctaccggacacatgtaaagttgtggggagacagaatcccctctacgctttcttcaggtgatgggtacattctgagtacctcttgcccttttcccaggtgacggccctgctcgggaggccctccagtctctgagccagcggcttcgggtgcaggagcaggagatggaactggtaaaggcagccctggcagaagcccttcgcctgctgcggctgcaggtgcccccttcctccctgcagggctctggcacaccagctcctccgggggacaggtatgcatgtcatcacaccccatttttcctcctccttggggcctctggggcttcaggttaattcaacatctctccagcagtcttgcagcccccccaggactgccacccacgtgcaccccttccttggtgagccgaggcacccagacggagacagaggtggagctcaagtcatcccctggaccccctggcctgagcaatggacccccagcccctcagggggccagcgaagagcctagcgggacccaatctgaaggagggggcagcagcagcagtggtgctggctcccctggccccccggggatcctcaggcccttgcagcccc

SEQ ID NO: 1610 - DNA, 731 bp, Homo sapiens
  SITE (700): n equals a,t,g, or c
agccgtgggggaaaagaccccctctccagccctgggggccctggatctcggaggagcaattacaatttgggtatgtaaagagggacagagaggaaaacttggatggcagggttaggatttgggctgtagccccaggagctattttgggtaggtgtggtgggtagggttctgctctgtctttcctggaagggggtagttgacaccaccccttttctctgtagaaggcatctcagtgaagatgttccttcgagggcgccccattaccatgtacatcccgtctggcatccgcagccttgaggagctgccgagtggcccaccgccagagaccctcagccttgactgggtgtatcctgccccttccagtcccatgagaaccacctttctcaccttgggacccctcttacctttacagtttcctcctgggtctgtggggacaaggagccttctagatcctctcctaccatcattctgctctaggccctgccagccagaagctctgtctttctcccctcttcctcctcctgcccttgatctaaccctttccttgaccgtgatctccaccccagttatgggtacaggggtcgtgactcccgctctaatctgtttgtgttgcgctctggggaggtggtctactttatcgcctgtgtggtggtgctgtaccggcactggaggaggcccagggggtccctggaggtggcgngccagagacattacgcgggggcacacagact

SEQ ID NO: 1611 - DNA, 32035 bp, Homo sapiens
gacagttaccatctggctttgggagcttcctgttgtacatgaagatgtttgggaggttttatcgtttagcttttttgagtgctcacaatgcagatggttctggggtgaatgggccttgcaagtggctggaccggcaatggcaagcctcagctgagcctgattcatagtgacagttcttctgtctgcaatccataggaatttgggggacaaaaggagggcaccactcactgataatttatgcacacttagcatcttcaacttagaagcactttgttcttccaaataatgctttttcaaatgtgggtggtcagcttttcttattatttccctttaccaactagactgtagcctttgtttcaattccatcattctccacacttcccaccatttcagccttgcccatgtgtatacgagtgtgtgtatgtgtatatgaacaacaatgtaaaggaaagtgtgtatctgaagtctgaatgtccctgttggactttgatggatttctttcatgctctttacagaaagaagcagatgccattgatgacactctgagttccaaacttaaagttaaagagctttcggtgattgatggtcggagagctcagaattgcaacatccttctatcgaggtattgttgatgttgaataaacatttctagtaggaccaacatttccattctgtggctcaaaaccacatgttagtgattttgttttaattgtactctgctgaggtacagttctttggatccccttctgttaaaatgagaacagctcttggtgcttactttccctagtggaacatatcagagctggatgccttctttctcaaagtttaatttccacagacctctaaatgtaaaggcagaacaccctgagtcaatcttttcttcccagaaagcctgtaacatcgacttgacttttatttacacttcttggccttagagatattttggtcatttagtagcattgtcacagaatcaggaccaacagatgaaggctctttgttttattttgctttctaatgtcaccttttttcatttcaaggttatatgatttcatgctctttttgagcatttttatagctaaaaggatatgtaaatctcaaacctccgtgaaaagctaatttatccagttcagccctgttcagaaatctttctcataattagtgaaccatcacagccttggaacttgaaaagaagaaaggaaatttgggagcctggaatctgattgcaacttcgggcaatgttgtcaggtttttctgggcatttcaaatagcttttctgtatctagtttcttcttttctgtaaaaggaactttcacattaggcaaagatacctaatgcttatggagtgagtgaagatgtaaagaatcccgagtttggggctttaaagataagttacattctggaaggaatgttgtatatgcattgaggctggtataaggtgacttctttttcagggactatgaagagagggaaagtagtagtccttattatttagatgttcttagaatgaatttcttttaacacaaagagctagtgcttggttttcatggaagttgattcttagccagatatgtattacttcagggagcaaatgtttcttttaatgaagagaaatttaaccttagtgagatctttgaattgtaatgcaactagtaaggtaacctgaaccatcctgttaacattttacttctgcctctggctgaaagctgtgtaaatggccataccctgtgtttattctgacttttgttccatgaactatgctcaggttaaataaaatatctatctgcctcaggaagccaccacttaaaataacttgaaggtctacttatttttcttctacagtagtcccccccttatccacagtttcactttctgcgttttcagttactcacggtccagtacaacaagatatttggaggtaaactgcattcacataacttttattacaatatattgttttaattgttctattttatttttagttattgttgatctctcactgtgcctgatttataaattaaactttaccctaggtatgtatgtatagacaaaaaaaacatagtctatgtaaggatcaatactatccacagtttcaggcatccactgggggtcatggaacatattcccctccaataagggaagactgctgtacagtgtaaacaatttgttttgttacctttttataagtagtattcctagtagcaaaattaaattaacttggggaaagttgtggagttttttttacatcctagaatttctctctatattttatgcttgtgccatccagatgaatgctttaaaacacttggtgaagggagctgtcacagaatttctatagtgttgaaatgcctttagagtaaaaactgtgacctcgttccttattgacagattattcagtagtactaagtaccaaccagggtaattacactagatatagataaggttacatctctttctggcaaatttcccattctgttattgagggaattagttcatatttgtggtatgtaaattcccttgttgccctaggccctgacacttttgaggtgacttagaacttgaatgtatctaaactctcttaagacagttttaagaactggcctcgtatctgtcagattatcaattaaaatccagtttagtgtataagtattattacagtgagcacaatttaaaagtgtgtgtgacaaagtaattttgagtcccgtttgacctgctggccattgggctgcattgataaggatctgaagccctctctcccatggatgattcagtgccccgtccttttgtgctcactggtcagttgttttactctctcatcaggaaagcacagaatgacatgttaaatgtggtacaagtgaaaaaattaggcagatttaattataatttgtattttatttagttttttaaccaatcagcagtttacttttcattcttccttttttgttggcaatttattactatgcacaaaaggagctggggacataaaaggagaaagaagtaggaaaacgtgttcaatactttttctcttagtcaccactttggagcatttttttgcccagcaccgtgctgagtgccataggacgtaccaaaagttaagataacgttgctgcctttgaaagcacatggctaattggagaagaaaaatgacacctgtgagaagatttgtgcgcagttcagggcttacactggtctgactgaaggacatggagcccggccatgtaggaggggcaccagcagggcttattgtagaaagtaggcctcaaaggcaaagactgttatatgacaagaggaggggccgggaaggtggtgtcaaggaggcgtgcagcagcaaagatgtgggagggacataagcacagttagtagagagccctgcaatcccggcagaaaattatcaattggattgaatgaaaccaggcaggagagcccgaaattcaggcattgtgcatttataagggcatgagtcagcccagaatcacatcataacctcctcatctataaaatgaagatcatgagggtagcagccctgcagcggcttgtgagaattcctcctaggatgtgtgcagccctgggaagggtgcctgcatgggagctgcccagtcagtgtcctatttatgtatccatgggatcagaactggtgccttttgttcagtaggaggacactgtgtgtttgtttaataaggttttttagtttggtcttttggtttcgcaggacaggttagaaggggttaacagctggaccagggcagccatcagataagggcctctgttgtccaggtgagacctgatgactaaggacagcctggagagagatgaagaagcccttgaaggctgattttatgcttggggacaatgaataggaatgtttctatgtcagcatttcctaccttctcacacttactatctttctttcctgattatttcattcccagagactggtgaacttctctatttcttatcttgctgtctaggatttatctcctggcaatgccatcattacaccaaagttcaccacagtgaaagcctgtggcgtattccatgggctgtattttaatgaacacttgtgttcacagtatttaagattataccttaaaggtcttcttcatattttacaaatgtcagtggaccttttggtcaggggcacctgccacagctttctctggagccaagcaggcagttggaaagaggccaaggcagggaggaggtgccagcactccccatgcctgagtgagtaggatatttgcagcatgagtgaccaaatcattcgaagctctcagaaagagatggcctaaaaggtgtgcatttgaatggggagctccagggcaccagggaccatacctttcatgggaagagagtagaatgggcacgtcttagagacgttcctcaggtcctcagggaataagcaacttttctactggtatgtgtgcatgggtgacatgtagcaatttaaaatttactctgttttattccccaaaacagacctcgctgccaaaggcctgggggtggcagcgggggagacagaaacttggaagcaggtttatattgcaaaatgaacccacctgaaacacagttttatgaagtgttctgccgttctttttttccagatgctcacttagcacagcagcctgggtgtagtaaaccacaaaaagctactctaaagtagggggatttggcctaaatccactgaagcagagctaaggctgatctagccatccatccttaacttattttaattacgcctggatgttccaattctcttggcaaatttttgaaatacttgagtagagcaacctggagttttgaatactgttttaagatggctggtttgtttcctgccttgtaaagaaagttggagtagatatctcaaaagttgccaccctctggcacttcagaacactgccaagctttaaaagcaattaattacagagattagagactgattctgtggatgacagatgatactaagaactctgcaacctatagaaccatccctgagggcggggtacctttctcccctttcccttaaggtagggtttctttgatccaacaggacgcgtgcatagcattatgttgacaggtagattttcttaagtgctagccattaaagtctccagtctctttgtgggccacattaagagaaaccaaaattgttttgaattagagctagtgtttagtccagacagcctctgggggttgaggagcataaatatatacaatttcaaaagcaagaagttctgtgctccatatggggagctaatgaaatgcaaatctgatacttcaagtattgttctcgctctgattttcaactccttttcttttaaatgcaaaacagaaggactcagcagaactacaccataaaatggtttcttcaactcggtgtgaaaaggacacagaactaattttttttttttcttacaagcagagctctcctcatgattatagatgttttcacagccagttggttttcattagtggcagtttcagccctccctattgttactgttccttggccttgcatggccacacaatggtgtttggacttaaattgactcaagggcctctagtgtcctggagtctaaggctacccagttgaggccctgatgctgcgagtcggtttttccctgttgtatactttacccatgccaacttagctaaattgttccatttaagtagggggaattttctaacgcgatattctgggaacatgttcatgaggcaatgattgtcccaagaatgacgaaaaccatctgaagaagtctgccaggacaagggctgctgtaacggcgtaggggttataatggcaacacagctcacataaggtgatagaacgggccttatttgtcagcttaaacaattttgcattttgtctagatgctttatttgggtttgagaacatgaaatagaagagaatggtatgagtacagtaggattcccaaattttttccttctcttccctacttaatggcacatgaaataacattcagtttaaatagcaaggtggatggttttaacataatcgggtcccaaatctagagaaaaagacaagccagaggcatccttggtggggtgcctcatccagcttcacctggggcttctcttctttgctgcctttgagtgcgcgctttcagttgttcagccctcaccttcatctgcaagcccatgggtgagtgtgtgctttacacacctttgtgtcttgaggatttcagcatatcatctggttctcccaatgactgtaatcactgttaaaataaggacctcatcttctatttccttcttagtactcccaggcctcatgggtgtcatacacagagaggaaacactggtgaaatagtgggtatgacagtgctttggaaagtgatcataattaccatactaagcactgtttaatgggttcttagctgcatatgaccattaaggatacaaaggtactgctactttgtttttctagtataaaaaagtctgccttgcagaacgtacatatagtttactgtgttctttctatggccaggaactttgctaagcactttacgtgcattcatttgcttaatcctcatgtgcacacatacaaacacaatcccttttttttgggggggggggggtgcctggagggatgcagttatgtagttattactatccttgttttacagatgaggaaagtgaggctttataaaaaattttttgctctagtcacactgaccaggaagtatcggagacaggactggggcccagcctgtcttacaccaaagcccctacttcaaaagttgcatgtgacatgtgtacagcttgctctatatttgtgtgtttacatctttatctccagtcctaaatatgatgctttttcaagagcatagactaaaagaacaaatcaagtcatgttaatacgccacattagttataggttgtaaggaagtaagatttttaaaataagtctagaccaggcatggtgactcatgcctgtaatcccagcactttgggagggtaaggtgggaggattacttgaggccaggaattcaagaccaacctgggcagcatagtgagaccccatttccatcaaagaaaaggaaaagtctgggtctaatgcttacaaattgaacaaaggagtgagtctcttgttgcagctaataatgtgatcaagatttttttcccctgggtaagactattgttatatctaataaaaatacattttaacattatattttatattttacagtcaatactttgttgttctgacaatcaagacacatattcctgattaaattagtaaatcatttatgttgatggtagacagaaaaagagaaaacagatttgtatttttgcttaaatccttccctatgagacattaactagataaggaatatttgtataaagagtttgagattagcaatcaagagtcgtgggtttgtggttactgtcgttttttatgtctgacctcggacaaatcacttggccattctgggccccagtttctccatctattaaaaaaaagccttaactatgaagtacttgcagattttactttgcatattatctgttgctcaactttttaacaataacatgtagtttctaaacttctcaaaatccattctttacttgatagcaaactttaaacactcctgacgtataaacaggtcagaaacttaattctgtcctcccgcctgcaattcatggatcctaaatgtgaaagaaaacaattgtgtatgggtattttccctaattctaatcttccaatcccttgcttaaggaaactaaatcatagaacatagcagctttgtcctctgtgtcagcagagcattacaaagccctgaaagaatgttaaagcagttttaaagtcctatttttaggtgcaatattgtcaggaaataagctttcactgagagattttgagaaaaaagtacttgaaaatcagcagctggggtagcaaagtgaattatgttaaattttaatactcaaaccaatatggttaataacaaaatattctttctccaggttgaaattatccaatgacgaaatcaaacgggcaattctaacaatggacgaacaggaagatctgcccaaggacatgttggaacaggtgagctaccagatgtatctgagagcagaagtgaaaagcgaccatcaacagggagagggatgttgagaacatccggttgttgctagtggatcatttcctcatctatgaattgaggaggctgaaccaagttcccatgtgactctgttaggaaacttaatgaacttattctctcattgcctcccaaactgatgggtgagaaagaagatcaagtttgtcaaatgcctgggacccacagcatccctcaagctgcaattaagtcattatacctcagtaaatcatataaatctagctctagaagaaaatctgtgtttcacaggaatatcgagaatctcactagcactgtgagattgcaaaccatactacaaaaactgattcattactaaactctaaatgtaatttgtgtcttggtcaccagacccacaaccatgaaaatgacctttaaacccctaacactgtcatctgtatctaaatacacatacgtgtcacaagacaggttgtaaatgtcttggggctaagtcttaacctccgtacattgtacagccccctcttgtgtcataaatagcagtaaatttaaatgccaggggtagcaagaatgggatttacacccagtcagattacatctttgcccatggtatcttgttataatttttattatccatgaccaagcagccagtatttctatagcatttctttgtagcctctccaacgggatcatgggctgtttggcatctttgtctggttgtccccaaataacaatgttgttgatctcgcacatattctagggattttcacctgtctctgccccctgccccttggtctgggccttaacttttctgtgctctgtggtgatagtctctgaatgctataagatcgttccatccttctgtctcattgttttggggatgggctcacattttgagtggttttggtcaataagtccacgtttgttagagccaggtctacctaaggtcagctgtgggcacaagcaactatgattctagactgaactccaggttgcatctgtaggtgtgccctgttccaagagcagagaataagggtattttgtgttgttaacagtaatcctgagtggtgaagttgctctgggtagagtgcctgtctgtttgcacgtgtgttttccatggttctcactgatgtcctcgaagtctcagacaccatgcagggaggaatgatgtttgcagagtcactccctaatggaccagccccgcccctgcaacctctgcggctggaatagtcctgggggaaatccctcacatttgccatggagaaactcttcatgctgtcctttaaaggttttatttaattatcaaaatagttaatgattatgttctcaagtctcttggggttctctgtgtatgaacggtttaaaagtatctcctgaacccaaaatttattttgagagcattttctagctccttcacatacccttccctcccttgctgtagaccagtcacacagagtctttgctctgggacagtggaggtctaggcagtgctctgcccctcccaggtgaccctgccttcgagttgctgcacccaatgtggtaacccaaagtgaaggactatgtgtaaagccactttagtcctcctgccttcagctcctattgacaaggttgtatgttttaaaattccacaagatctgtttactgtggaattgcatccagcaaaattcctccttgagggaaaggatttcaaaatcttgccaaaagggcctgcagtgcaaatagagtgtgcttcaaataaatgcaagaaataaaaccagtctactgaagcagaatctggacaagtaggatattttttgacctggcctgtcctgataattctgtgtgtgtcttgctctctggtcatctcccacgctctttcttttcctccccattttactatttgttctttacttccgtttcctctatacaacactcttcccagacaagtgttgatgccagcatttccttactccgatttaggatgtgcctggtggctgctttcatcccctcctctcttgctgcttgcagctgctgagctctgatctcagatgagagagagagctatacgctcttcttcctcggaacacatatctttatccttattcccagatatttgcttgactcctgatcctctcttaaaactacccacgcacagtcctttacacaactctcctttgagaggggactgagtttttagtgtggctcctactgtgcacttttaggtaacaaaagagatgtagtgactgtgttattctgaacaggggacaagtgggctcagcacaagtttgcagggagagaggggactgagcaaattagtgaaaggatccttgaggctagaactcagtttccttgcccaatgggtaaaaatccaagctgagggaggctggggtgatgctttcctctctctttttcttcccttcttcttgccttcctcccttacttccctgcactgagaaagaacaagatacatcctgaacagtgtcaccgtttgaactcaggaacagaaatgcctagaagctatcaggcccccagacctatgaactccctggcatctacttctgtcttcccccacttccgtcccattaggatggaggggatgtctcttcccttcgctctggccccattcctttcttctagtcaggaccccagctggattgactgcccccttctctatatctgcaacctcgccctctctactcttagctcattcaagtgtcagcctttagcacataaacacacccctacatacagcatctgcacacatataccacacatacacacctacacacagtgtgcatacacccctgcatgcacaccctcatgcacacgcccctacacacacacacacacacgtcttatgcacatgcccctctcaagactccacatccccatctagctactgtcttctctctgatgcagccagagtcttgaaagccatccacgctcactttctacccactctgctgcactgtcctcctcccctccctagagctcttctcaggggcacttgcaacttccctgttgccggagccaggggacactgcggggccctcatttttcttagtttcttgggggtgttggcacccatggctgcatgctgaaatgctgtcttcccatggccctgtgagccacgcaggcctctctggctgcatctccttggcctccttttgaaggtttttccttttcttgtcctggcgccttgaatgctggttctcttcagccctgctttttttctcttgatggcacctcttctaatctcactgacacctgtgccttcagtaacctacctgttaaaaccaatgccatgcttcagcttccaaacacatcttcctagggcttcagacccatttgtccagctgcctactagaaatcattacttgcttccatgcaaacattttgaacattaaactcaccttctcccgcccatcccggcccaccctacctccagccttctcttccttcaattcatgttccctgttatgttgttgcctaagccagaagcccaggcgtcatctttgactcttcctctctcatataccacaatccatcaagtcaagccagttccattttagtctcataaatagctctagaatctgtccactagctccaccctatccaggccaccatcatctctcacctagattacttactataccactatctaatcatttttaatctcttctaattctttttccatcctgcaagcacggcaattttttaaaaaaacgtaaactcactctcctacgtgagatttttaaggtatgtcccagtgccctcaaagtaaagacagaacttcttataaggccttgctactccctgcctttgcctaccctgccctgccctctcccactgatgttaccactgcccttccacctgcataagtgctgtgctgcccgttccagaccccggcacatagtatacactctgcctggaatgtattccagcctcacacaacacctgcctgtaattccaattccctctctctgctgatgacacccagactaactgccttttctgaggtccctcagttaaatccaacaaacatttgaaaacctactaaatggatcgtctaattccagcatcaaattctggggagagcctcaaagtcaagaaggtcaatgttttaaaaaaaaaaaaaagttaagggcatttgatctagaaaacagcatgagtccacaggtcttgcatacacatccaaaacgtgtgtaccttgaaaggaaatcagacacgtacagaagcactgtttcagttttaaatattttactatttcttccacatcccatgctcatttcttccttcaaaataaaatacgaaattaaaaacatcaaatcccactgtgttcctctcacccagctctgcatggaaggggaaaaaaaaagattgaattagataaaccagaaaaataagaaaatggaatggaaactacaaatggaattattcattccagcatgatgtaacagaaaaaggcacagagctgggagtcaagagacctaggttctatttctaatcactacccacacttgctttgtaatcctgggtgagtggcttactctccctggacctcagttgtatcatattctgatgagagcattgactccctaaggtccttctagtggtctgtgaaaaagaggttccagtagagaactcccacaattctgatttgagaggcagtagagaacagaaaggtgccaggaatgaatcttatacccatttaactacttccaagtaaaaatgaaaagatttaatcatttctattgtatcttaacctgtgagcagagcttatacactcaacaagagttaacattttatcttgggacagattaactgaaagggtgaaaaattactacatggatttaagtgataaacctcagttttaatattcgtgtgtacttttcagctcttgaaatttgttcctgaaaaaagtgacattgacctattggaggaacataaacacgaactggatcggatggccaaggctgataggttcctttttgagatgagccggtgagtttgaaaatgctgggaatgtgaagatgtcacttccctttctaagcttcatgaattttcaattcatgttgaattgtttgggccaattaacctggcttaacttgaaagctttttcattctaaaaatcttctcaagtctgagtgatgtggaatttgttctgtttatgtcacttcttgtctatggatgagccacggtgagggttttttcacaattatctctatttctgggcccctttggccttatcaagtaataacttttcttgattccagtcagtatcattctcctcaccagtctgatttcttgggatagtgtctcatacttccaagtagcttagcatggcaaggtggttgtaaaacaaaaaaaaaaaaaagaaaaaaaaatatatggacagactctgacaatgtcagcctcaagcccccataactgaacaaccagggtctagatgtcagatcatgacacatgcagacatcactaatcaatcatggcactcttcccacggagccttggcaagctctctgaacccttctccagaaagccctgaggcagccacagcttcgtaattgggtttggcatatgagctaagtcgatctgctatctcaggcctagaaaattgattcctcattagagaaggaccagtggtcctgaaactttcagtgaacctcagggcacagttttctcctttaggggtgtagagagggtgctcactatgaagacagagggaggtttgcagatgggagtgaggagaggacaatgtgggaagcggatgttggagaccagtttttactttggaaagtaaaatggaaagttaagaaatttggaatttgggagaagtgtacggaactgtcctttatttgcagtagggtattctttacattttcattcccttttatctcttctatgctcaaaagagttcctgggactctgagggaggagagatgcgcttcagtcaacagcagcagcagcaggctcccactttcttttagcagttgccttgatgggcgctaaggactctgctgcagttggccaagtagcccctgtaggtcagaccaaaatgggctctccaggcaaagctggcttaatgtcctgtgttcctgtccatgagaacaactaatgtatgtgtgtcgggggagtgggtgggtattgggggaggtgcttctaggtacctccacctccatatctgttattaagtgaacctagatatattaaatgaatatcaattagtacatgtttgctcttacagaattaatcactatcagcaaaggttgcaatcgctgtacttcaaaaagaagtttgcagagcgtgtggcagaagtgaacctaaagtggaaggtaaagtcaagctgtctagattggaaatgatgttcatcattacaacccatttaaaagtgcaatccaagtgcatatagtaaacaagatccccttggtgattttatttttttttttgagacggagtcttgcacagttgcccaggctggagtgcagtagcgcgatcttggctcagtgcaagctccgcctcccaggttcatgccattctcctgcctcagcttcctgagtagctgggactacaggtgcctgccaccacgcctggctaattttttgtacttttagtagagacggggtttcaccacgttagccaggatggtctcgatctcctgacctcgtgatctgcccaccttggcctcccaaagtgctgggattacaggcgtgagcacctgcgcctggcctggtgattttttattttattttttggctcaaggtctttcttttaaaattctgaggggtgattacttaaggtcagtgcttgatgcactgccctagtctcggagctcacagcacgcctcctgggctcctctacagggttgggcttttgactacgagggtgttggtgaggagttaatctcactgctactagcattaaacctgtaattagcttcctcacaacagagccttagtagcttttttaaagggaagatttgaggctgttgtatggtttgatttttaaaatttgtaaatgtttgaaatgtgggcaaggcaactgaagagcacagccacggaacgcaggctggaatcaggcatctgcctaagctctgatccctgttatgacacctgcaagctatgacatgtaacacatttaactagttttctgtcagtggaattgatcaatactcctgttaacctgactcacaccagacaagtaagtgtttgtaaagaaatcttggagatgggattgctattctagatattcctcagtgcttatgactgatgagtcagccaagaaaggcctgagaaaggataggattttgcagctgtctatgggtgttggtaacaacttgagttggctctccctgtccttgttctttgcttctggtgtaagcgttttgaaagtgctcttggtaacccaataactcagtcttacatcttcaatatctgttattaagtgtgtgaatttagaatgggtatcactgaaacatcttgatttcaaacaacgaaacacttggtaatcatgtttttatgtgttttgttttgaagcaattcgttctggctcagaagaggtgtttaggagtggtgccctcaagcagttgctggaggtggttttggcatttggaaattatatgaataaaggtcaaagagggaatgcatatggattcaagatatctagcctaaacaaaattgctgacacaaaatccagcatcgacaagtaagtatgagatcttccaacacttgggggagccaggtgtgtaggtccaggctcagatttatgcctctctggtcctcctcagccttcatgacactgcattcttcagttggaacttctctttctcactactttcttcccttctctgacattgactcttctctaaacctctctcatgaccgcaggcatctcccacattcctgttggaccaattatccttcatccatttttggtccactgggacatcatctgttctaagttttgctgttgtttttgttttgtcctgcctttttaaaaaattattttttgtaaactttttattataatatactaagaagaggtcagtcatcacaaatgctgggcttgataatttttcacaaattaaacacacctgcataaccagcgcccagatcaaggacagaatgttaccagcactcgacatctccccatgacccctctacagaaaactgtgttccacagaaaagaaaaaaaccgatagttggtgttagaatatgaagcttttggggtttttaggttgtgtttttatttatacagtggaggtagcaactatattaaaaacttatgtataaatgcattttggctattgatacttagttgctcattgcaggtctcattaaaatgcttcctagaaagtgttcaatgctgcattttaggtgaacagattctcattaaagacaccaagatgtgaaaacgttcttgtgtcattaacagggtagggtcattaggcatattaacttgagtttccttgagagctctgtttctctgaggttcacactgacttcaaaggaacttgcacaattgtttctaaggtaagcttcttcatacccaaattctttttagaaatatgggctgttcaccctaattatttctaactaataggggcttttaccctatattttctatagggttcgtgaagcatagtattctggcaaccttaaatccatccaagaagaaataagcaatgtgttaatttgttgtttttgcatcgtgtagagatagattaatgaagagcagctgttgttatagccctgccaccttatttttaatgtaaacacttgatccttttcagagcactttcacatttgattgtcccactagcctgtgaagtacacaagccaaatactgttgtcacctgttgtcaggtaagaaactgactcagggtcaggtggctcattcagcttgcctatggttacaacaagcaaggtattcggccttacaggtatttgacacctgtgttgttggtccatccacagctctattagcagcagaaggatcttatttggaggttgaagtagggaatggaagatcttatttgtgtctaaagagcctttttaaggaagggcattctcttcaactgtacacacacaaaagcaatcacccatccccaatacttaccaataacctggcacttacgtgattatctgcttatttactgaggttactacagaatttacataaagtacaagccttttcaaaagaacaatctgcaactatttctgatctttctgtttcctcttttttttctgcctttaatatttggtccccaaatgcagcgcccacaccttatacacctgcatgcctagcaaagtgctttgcctgtaagcagtcacccatgaacgttgttcagttgaatctaatcagatagtgtaggtggtgggacagtcagcaggaagggtgcattcactcagcattgaaggctcagttactggtaatgagcagggaagaatcaaatgtgtggctgttgctgttccttcttttaagaatttgcatttagtcaaatgaggtattatttggatcgcaaacaaatgaagctcaggcatggttttaaacctttctatagcaagaaagatgtgtatggttaatgcaattaattgaaatgtctgtcaatagcaaagcatttcttttaaaaagtgaaaaaaataggctcactcttccttgtgatggcggctggcattttgctcactccttgtaccccttaggtaagaagtctctcaatagcaaagcatttcttttaaaaaatgaaaaaaatagcctcactctttcttgtgatggtggctggcattttgctcactccttgtaccccttaggtaagaatcacatgggcagatgacaggtaggttctgtgaagagcaaaattgaaatggaggctgggtgcagtggctcacacctgtaatcccagcactttgggaggccgaggccggaagatcatgaggtcaggagatggagaccatcctggctaacgtggtgaaacctcgtctctactacaaatagaaaaagttatccaggcgtggtgtcatgcgcttgtagtcccagctactcaggaggctggagcaggagaatcgcttgaacccagaaggcagaggttgcagtgagcccagatcgcaccactgtactccagcctgggtgacagagcgagactccatctcaaaagagaaaaaaaaaaatgaaatggaaggatgcagctgaacatatgaaaaataagtggccaaaattgttggccactgttttgctttggtgggcaattgttttctaactattgagagactgtgagaaaaataaggatttaaggattgcattgtttctatgaaatgcaagggtaaagaaaattgtttgaaaactctgattcattttggttagaggtgagttggaatactggggtttagcattgtgaattagcaaactgcctaaattatggaaatgttttttaaaggaatgtatttttaccctcctaattctaacttcaacagataagtagttcttgatcctggttgcttgataaaatcaacagggagttttaaagaatgcccatgcctgactccacctcattccaattaaatgaatctctggggttagcccaggcatctggagtccaggtgattgtaatgcgtagagtcagtgacaatgggatcagaccaacacagtgttgcctaatagatactgttatcctacttgctggccttttccatccaggtcagtcagagttcagccctgtcaccaccagagagggagctggcacaaccaactgttttaactactaagagttatgcagttaggagctgaagtgttgctaaattaggaagtggattcagggctgctaggatatcacatggtggcagttatggcccacttccaggttcagcccagagaaagggggctttctaactttctgaccaccctttgggtgaaaccttattaaaaactatcagtaggccagacacggtggctcacacctataatcccagcactttgggaggccgaggcgggtggatcacctgaggtcaggagttggggaccatcctgaccaacatggtgaaaccctgtctctactgaaaacatgaaaattagccgggcatggtggctggcgcctgtaatcccagctactcgggaggctgaggcaggataatcacttgaacccaggaggcggaggttgcagtgagctgagattgcaccactgcactccagcctgggcaacagaccccatctcaaaaaaaaaaaaaaaagtatcaataattgtcatcagtgagttgctgctctgtactttagacttaagaatagctgcccttttcggtggaataaacatccctcactctccaccccaccccactccactccacccaagcctactagttataaacctgcagggcacaccccattttagggtggatccactgggaaggtaaacttgagcttgtctccactggcagtggttcagattcacttagatcacccatcacattacccagattttgaaagatgctcattatgggccacaaatgtaattcttatcctctttttagaaatggtgtgctttttgacatatatctatgcaatccccatggaggctctcccattattcctgtctcttgagaatccctgccttacatgatcctccaaattttgaagttaatgcaggtaatatagcattattgtgggttctaccatttgagcatataaatcatatgcagatattaactattcatatatttatgtagtttaaatgaaaataatttgaatgtttaatactcttcccttcttcaattgtagaaacattacccttttgcactatctcatcactattgtggaaaataagtaccccagtgttctcaatctaaatgaagaattgcgagatattcctcaagctgcgaaagtaaagtaagtacttacagtgagtgttagtttcttaaatcacttggattgtgtgttagccattgaggtagtttgcactgcatgaagtcagtccttctatttgttttcccctgatcattgtatgaaataaagtttgaatctcatccaagtcactcaaatgtattacaaggttttgaatatatgtttgttctagcttctttggaatactgcatgcaatttttaactttcatacttttaaagggcaggtgttttaaatacaggtaggagcaccttagttaaataaagatgcatggctaagcaaatagaagacctaagtgtcagaacattgcaataattttcacatatgcacacatactcccagaaaccaaggcggctctttaatgggaagcattctttatgcaaatgaagaaactaaaaataaaatggaaagttgccaaacttttaccacaaacttcacaccacgtttcagagactgagaagcaggcaattttccttgctgtttttccctccctcttttggctctttttttaaaacataaactgcatctttttgcagtgaatttgaaaagtataatgagcaggctcattttttccctctgttcatggaatctggtggaaatatactaaataaggcatgaaattaaatgaagtattggtgagtttctttatatgttgtaaattatctgggagaattaagtttcaatctctaatgtttaaaagccatgaaatagaaagtgttgtgtatgggagaagcccaagaacctttctctattaaaaaaaagatgaaaataaaaactagttaatacaactttaagaaaaatcatttttgattgcaacttaagccattaccttgtaatagtcatattattggggccttagtgaaaagcagaacactgattatacagagtacaatgtgaacatgattgcagatgaacttgttttctttctgttttcaaagggagccaagtatggcaagagatttatttctacatgaagtaatttgctgaagtgagatttttttgagtttgaaacataaaatatttttgtacagatggaagatatttctattctatttttaacctgtaaaatatacctgctggctacagaaaacaaacataattttatacctacatttcatgagtttaaaatactgttgtctttctttgagatctgagcatggaagggaattttaaacatttaaattaaaataggatggacttccaagcgtgaaatatttaaacccatcttatatttaatatgtgtaagtcacatgttgattgctaaaacattgctatttacaacagcatgactgagctggacaaagaaataagtaccttgagaagtggcttgaaagcagtagagacagtgagtatttttttgttgttgttctaattcctggtctcttcactatctctagtgctggtggttttcagcagatgggttgtgttggcatgtggtatgcccgggataaacatttattgattaaaaaataagaaccaccaccacaagaagcaaaggcaggttatgttcagcctggcaacttgattgcaggcagcaggggtcgtggataagtcactgcagcaggaactggaaactggacctagtgtgccaccaatttatctgtaaggcaggattcatcaggatgagtgggctgggctagatgatcttcagggacgctctcagtttccaagtgctgctaatatatggtgttcactttcggtagagcagtagaacttctctgtagaacttctcagttgtttttgacttggtcctttggggagtatttactaagcagacagtgtagtacatgctctagctgagggtcacgatgactcagaatccttgtcctccaggtgttgcaataatcggagcagccacttccctcagcctggccgcatccagataagcagagtgattacggaggtgccttaaggaagcagcgggttgagggtgctttggaggcatgaggaacaattggcccctattggaggaagcttctcttttggaaaagaagttgtttgagctatggcttaagagggtagggtaaacttaggtgcatagagggaggttatcccaggcatacaagacaacctgggcccaggcctctgaggaaggaaaaccagtcaggctggcagactggacctggtaggatgaaacgtgcctgttggcacagtgccctgcgggtactctgcagatgcagctgccagcgagagagggggcagggatgagaacaggctggcagagtagcgtccctggtgtctgtgctcaaagcagccatagcttgggcctgctctgggtgaaggagacggatttgcaggcagcttggaaaggtgcctctcataagtatccttcagatcatttatcagtaatgctgtgaggactctcccttcttttcgtttttgaatcacaaaactgccatagaaagtagttgaattaattaaagacatacctctaataaaaattaaagtcacaatgtctaatttttttttcaataaattaaggagcatgtgaggtttttttcctttttttttttttttaatgtagggagtagggggcagtattaaaaaaaaaattctactgattgaactttttctcccagccccagagggtccatggtcattatgatggccctaaagcctggctctgacccctgcttctgagccaggtcagagcaaggcctggggtggaggcttctggggaaattttgtgttgttgctttattaaaggatagttttgctgaaatcactctatcccttgggtcatatacactgcatcacactttttataggagaggggctatagaagcctcccctacccttggaggtgacgtagtattgtaagaaaatagtgggggcagagcttcgcctggccaaatatatatgtgttctaattgtgctttacacaaattaattatattgtttgaaggtatcaaagatgaatatttatgaaattatacattaatgaaacactttcaaatgcctttcccgtccccacactgaacacagatacactcactttccaagctaaagtactggaatcatggcaatttcttccaatcagtgccagctccataattgatgagttttcacttccgttatttcatttgagtgtagtgatgatgtggatgttgccctcttacaaaaaaaaaaaaaaaaatcaataaactgaggcccagagcaacatgccatggttaagaaccaaatcagtggtagagctgagtcagaactgataaactgtgatgactacgctcctgcttgtgaagatctctgccaatgcaagaaaataagggagaatccagtttaagtcaattggtatacaacatagttattaccaagactctggagtcaggcaggcctgagttcaaattctggctctgtcactggtcagcactacttcagggcaagtaatatagccctccaaaccttaatttatatgtttgtataatgggaatagtgatccctcactcatagggatgttgtgaactttaaataagaatgtgcatctggcaatgattaaattaaccattaacattagatttgaatcatctgcgttcattgctgtgataatggaaatatggataattaacaagagactaattcccctacaggcctgttcacaaaaaccaatatggtatggacaagagaaaaatggtacattatggtgccaaatgctacagccaaaattctactacccatatcccacagtttaagaagtaaatagacttggctgagagggaaagaaaaaaatcaaggcaccacaattctaagcatggaatattgacaagcagagtctcttgttttcactcacaaacccttaaaattcagtttgcccccattatttgtttaacttctattaattttatccaaatgcaaatctgcttgctttctaaagcctgaaagagaaatcacatagatcaagtacttagattgttggtaaattgctatttgcaaatatgcgtgtgcacatgggcatggctttggcatggtgggaggaagggcaggggcactagagtataacaaaatgttttagaacaagttttgatgtgtttgccattctgatttattaaatttaaggcatgtgaaatatgagacgaggtgtgtctcatgtctgtatttgaagcctgcattgacattattcatttcctgtgtttaaggagctggaatatcagaagtctcagcccccacagcccggagataagtttgtgtctgttgtcagccagttcatcacagtagccagcttcagcttctctgatgttgaagaccttctagcagaagctaaagacctggtaagtttcccccttgtgcactgagtgttgtttgaccgggctgggcttcagtgtgatactttcagttattattctgtacgggaaatagcaggagtgagatccaaacttcgtggtgcaggaaataaagtagtagataattactttccagattccattgttttgcatgacataggtgtattttcatttccaagactgtgattaatctgaacacaccctttttgtctgactggcctatgttgcctttaggttagcaagaccttgaaggctctgaatggtataagaccagcaaatactttgacagttttctcttggttgaaactggcttgaagtacttatctctgggaaccagaaaagagtagatgatgaaaaccaggggcagcatcaaatgtgcaatcaggtgttactaaagccatgtgcctaaattacctctgtgttgtaatatgctcatctgagatacagccttggaggacaggatactacctgtataaatctccagcagaactcgctaaaagagatgcattttaattcacagtctcattacaagaggtttttttttttttcagtaagacatttatttttatgatttctgctatttcacattttgtgttcccttggaagagaaatttttgttggttaataaccaccacctcttagctccctcagcttcacctcactcctctctatctcaggttgtttcctcttccaaaatgcattcacattcatatacaagacaggtacacagtctctcattttctatcctcttctcattctttataaatgatattaacactcttccccaccccattggttcttttactctacccatctctcagttgccacaacactctgagtcttttgtttcgaaacttctgtaaatggatgttatttttctctggtcacctgtttggttgtagatatggatgattgtttatgtaaatgtacacacataccagttaaagttcaaaagtaggctgttcacatgcattagctaatctcagcattaaaccttctttctaaccttataaaataaatggcaatatatgttcaaatggctgctgtcagaggtccaacctctgatatcccacagtggaaatcagtcaactcatgtcagcaaccaccattcagacctccactgtgaaagcccccatccatgttttatgtatgcctcaccactttagagtttgtgcttcataaaggaagagactccccctgttctgatatcccacctgagcaatatagcacctacttcatcaaggggctcaaacatttttgtgtgtgaactggctgttgtcagcttgttcatcacagtagccagcatcgcgcttctctgatgttgaagatcttctagcagaacataaagacctggtaaattttccccttgcacactgactggggtgtgtgtgtgtagggggtggaactttaatctgggcctggttttctttagatttctaagattttgatatacatgacgtcatgatcactagaattccttgataaaaagatcactcaggatggcttgaagtatgtgaacttgaatgttttagaaatccagttgtagacttgctattgctattttgttcataccagaacttttataagttagcatataaaaccatggagcaagctagaacactatatatggcgtctgaagaatgttatgtttttgcccaaagaactcttttctaatagaatatttccaaataagtaaaacattgaaaacaactcctcagtgaagacagaaatggtaaaaaggacacttttgttacaagtttaaagatatgaaatagtaactgtaaaatatatataaatataagccaatacttgttttatttaaaaataaatgttgaaaatatttaaggtagatggtattactgagatatcagaagaatctaacaatataacaaaggcaagtaaagcaataaaaaaaccaattataagctgtttgggggcactgcataaacacagcatggtctaaatatgaagaaaacttaaaatctggaaaatgttaagtagttgattgggcgtagggaaaaatgtatttgactttgaagctaggaacactatccttagtagcttaggagtaataacattagatccttacagaaggaagtataattttaacaaacaatttgacattgaatattatttgggtagttataataatgctaagactattgaaaacatactatcttgagttatggagataacccctggaagaactaaaaagagactggatatactattgttactgtatacatatatttttatttaactttaaaaatttcttggtattttgcattttggccatttaaaaagattgacactggggcatggtggcatgtacctatagtcccagctactcaggaggctgtggcaggatcacttgtgcctaggtgtttgagtccagcctgggcaatgtaacattgcaataccccatatctttttaaaaaaaaattttttttaaagattggcattgaaaggggttctaaagcaaagaatttggaataaaattgtattctcagtcatacactttgggttgcattaaagattccatactcagttgctgttttctcactgagaccctgaaaatatcttaacaatagcagcattatttgtgattgggaaaagcagctaagaggcactggctcccatttgctttctatattgaccatatggcaccagtaaatgatattaaactacttcaaagacaagttaaaagtacaagtttccctccccctgctgagtttgctattagttttatgtctagggtgctataccctacaatattttgtttttactactgtttagttaataaaaagtcataggaggtcatcatacatgttaagctcaaatgaggtagacaggaataaatggtttcaaaagctgaggagtattacaatttttactttagaaatgattaatagacatgttcagcagctgaagataaatataggctcactaaaatccatcagttatatttgactcagccgggtgcagcggcacatgcctatagtcccagctactcgtgaggcttaagaggaaggattgcccaggagtttttggctgtattttgctgtgatcatacctctgaatagccactaaactccaacctgggtaacatgtaagaccccatctattaaaaaaaaaaaaaactaataacatatgcattccagcctgggcaacatgtaagaccccatctcttaaaacaaaacaacaaaaaaaaactgccgggtgtggtggctgaaacctgtaatcccagcactttgggaggccaaggtgggcagatcacctgaggtcagaagttgagaccagcccggccaacatggcaaaatcctgactctactaaaaatacaaaaattagccaggcatggtggtttgtgcctgtaatcccagctacttgggaggttgaggctggagaatcgcttgaacccgagagacagaggttgcagtgagctgggatcatgccactgcactccagcctgggtgatggcgaaactccatctccaaaagaaagaaagaaataaaaataaatgagcaaacaaaacttacgtttgactcaatctgggctttggtctttctcaagttatttatatttgattgtggaattctcatgaaacattgacttcttaaaaccatctttttcctagtttactaaagcagtgaagcactttggggaagaggctggcaaaatacaaccagatgagttctttggcatttttgatcaatttcttcaagctgtgtcagaagccaaacaagaaaacgaaaatatgagaaagaaaaaggaggaagaagaacgtcgagctcgcatggaagctcaggtgagaggatgattaattgaccaattccacctcctagaagttctatgactgcagcccagtcaaaggtatttagagagcactctgacctggcaggaaggaaggcttcaatgtactctctagaatgctgtgggactttacattggtgttgtttctcttgggctatttaacagtgtatattcaaagccttaaaaaaaaaatctatccacatcctttgctctggaattccatttcttagcaattattttaaagaaataatcataaatttacacaaaaaagggcagcattctttataatagcaccaagctaaagacaacctaaatgtttaccaaaaggggatgagttctaaatgatataacagccatataatggaatatttatgcagtccttgaaagacatgtattcaaagaataatgatacagaaaaagatttctacatgaaatctttttctgttttgttttttaaggtgtgttaatacatatagaaaataatagtggtgtgataaacctttaaaaagttcacagtagtagaattaaagatgtttcccccaccttccttttatctgaattatccaaattgtctacaatgtgtatgtattagttggcttttaataacagtaactattgtgtatcaggtttcaggcttccacagtagacacaagctaagcctttgatataaggaaaatggcctgatgaccatttgctttagttatttggggtctatgtaatagtgataccttttttttaattttcattagcagaaacacaaattgcctcaattgctcttattttaactagaatatcatgcagtttacctagaatctaggtggtgagggtctaaccacaagggagtggttgttttttgttgtccattgctcctgcaatggagaccccatgttccaattccccctttcttgtgatatccaaagggggttataggatgagcatagcttggtgtctggagcattaccatatttcaaggaattgacctctactgcaaacaaaatgcaacattttgacatgtctcaaagaggttatttctttctatttgcagctcaaagaacaacgtgaaagggaacgtaaaatgagaaaagctaaagagaatagtgaagaaagcggagagtttgatgaccttgtttcagctttacgctcaggagaagtgtttgacaaagacctttctaaattgaaacggaatcgcaaacgtattaccaaccagatgactgacagcagcagagagagaccaatcacaaaacttaatttctaattttccatgaatacttttttttagaaagctcattagcagccctctaaagtgactagaacgtttcattacactgccttgcaatccaaacagtggcaattttttccttcatctgtgagtgaatgtgtgaacgtgtgtatgtaaatgtatgtgtgtatatattaaaaaatgtatatagatgtctgagtgttgtctggagacctatacgtatggttaaaaagatttatgttaatgtatgtgctccaaaacctttcgtgtatgcattcacattgagtgtggctcattttctttccccgaacgccatgactgttcagaagcacaatactatctcctgaaagagataagagacattccctagattcaaaggcaaaacagaagaaacaaacaaacaaacaaaaaaagcttgcaaaatattttatggtttccaagcttgatatcctttaaaattattttcattgatggaactggagttgttggaaaaacatagatttaaaatgatttttgatagctgacattgtgatgttgatgtatcacatcagtaataggaccagctttgaatttctgacattggtgtggggatacagtctgtaaatgtttattgagaacatcttgcacacaatttgaattatgtagaatgtcaatcaagtttttgtatatttaaaagttggacatcaattttttcccctgatttcatcaagttatctctgccaagtgctcttgataatttcttcagatttttggaaaaaaacactatataaatgcaatccatgctttttttaaagaacaacattgccagagtatgcttgttctaacaatatagatatataaaccttaaaaataataaaatatctcacccaagacttaaaggaagaattctctgaagggataaagattactaaaaaaaaaaaaaaaaaaaaaaaaattaatggggtgcctttttgttatagtttctattttctgttttgtaggacaagctgcattttctgtaaatataggtctggactaaaggatacataaagaatgcacaaaatgtcaacatcagcagagatgcccagatctatttatctctaagtatatttgaagtgattgctgtttatatgttgtcattttaaaattgtgtgtcagtaaagctacctgtaaaatttcagtccaaaaaaataaagctctcagggagacatgaataaaatcaatgaacattagaaaataaaatatagatgcttaccattaacctaccaactcttaatatccttaaattatgtgatatataaagaggactgttacttttttactttttttttttttttttttttttttggctttgctttatttatttgtagttgggggctaacgttttctcttttctttctattgatcctgttgtggttgggtttcctgtggagagagtagtttgtcctgttgcactagaacattatttactcactaaattgagtttttcagtcaattaacaaatatttattaagttcctactatgtaccaggcatagtagggctacaatggtaagcaagacagagtccctgcccccaaagagcttatattctaatggggatattaagggatgaatagaataccaatgtgtgcactgtacaggaatcatactatttaaaaataatttgtataaactataatgcttagcacagatggcgagttatctgtgctatgtgaaagctgtgaaatagtgctctaagagttgtcaagagctgtggttttacatcttttcctcattgcaaatttagtgactttctacacactatatggaaataaatgactagcaaataaaacagtcataaatacaaagcagaggttgcactcccccaatcccgagttaacccaggtctgcaataacaccatgttaaaggtgcagatagagacttggctcaaaaaggcttggagatgaggaagattggaatataatgatggttttgtctgttccttaactaaagtgcctctatgtatattcttttctatttgtagcaggataaatttggtctggctcagttttggaactgtattttgaaaatggctttgtcttacagtttaaggaatagacaggtggagggaaagtcacataaaggagcaagtttgtgtagctgtccctcttgccccttttaatcatcctcctttgatatggccatcctggtgggcctcctttgccatttccatttttggtttctttccctgaaaactgtgtgcaggtaattccatgtgccattgttgaaaagaaaaaaaaaaaacaaaaaaaaaacctactttttagattggtgctggtgtaagtagccacttttctctcttgggtgtgtattttaaactttttttgtttttttaaattaatgccaaaaagaaaatgcataatttgtaaacttaattatatgtcttatatcttattagcttagtagttggaaccacttagtctttaggtgcaagactgttgttagatagtactgagaaaaaaaaagtatgtgttatgagactgtacatgtttttttaaaaatagcaatatgcaataaagagatgaattcattgggtgtacatatatgctttctatgaattattaaaacagtgtcatcaaactgctttgcagtttccaccattgaatttcaattttgcaaattgttcactgaatcggaaatatatacctgtttttaaacttgtacttactggacctagaagaatatagttttctattatggcagcattcagtatgttcaggttatcatatgccac

SEQ ID NO: 1612 - DNA, 31834 bp, Homo sapiens
gaaagttaccatctggctttgggagcttcctgttgtacatgaagatgtttgggaggttttatcgtttagcttttttgagtgctcacaatgcagatggttctggggtgaatgggccttgcaagtggctggaccggcaatggcaagcctcagctgagcctgattcatagtgacagttcttctgtctgcaatccataggaatttgggggacaaaaggagggcaccactcactgataatttatgcacacttagcatcttcaacttagaagcactttgttcttccaaataatgctttttcaaatgtgggtggtcagcttttcttattatttccctttaccaactagactgtagcctttgtttcaattccatcattctccacacttcccaccatttcagccttgcccatgtgtatacgagtgtgtgtatgtgtatatgaacaacaatgtaaaggaaagtgtgtatctgaagtctgaatgtccctgttggactttgatggattctgttcatgctctgtacagaaagaagcagatgccattgatgacactctgagttccaaacttaaagttaaagagctttcggtgattgatggtcggagagctcagaattgcaacatccttctatcgaggtattgttgatgttgaataaacatttctagtaggaccaacatttccattctgtggctcaaaaccacatgttagtgattttgttttaattgtactctgctgaggtacagttctttggatccccttctgttaaaatgagaacagctcttggtgcttactttccctagtggaacatatcagagctggatgccttctttctcaaagtttaatttccacagacctctaaatgtaaaggcagaacaccctgagtcaatcttttcttcccagaaagcctgtaacatcgacttgacttttatttacacttcttggccttagagatattttggtcatttagtagcattgtcacagaatcaggaccaacagatgaaggctctttgttttattttgctttctaatgtcaccttttttcatttcaaggttatatgatttcatgttctttttgagcatttttatagctaaaaggatatgtaaatctcaaacctccgtgaaaagctaatttatccagttcagccctgttcagaaatctttctcataattagtgaaccatcacagccttggaacttgaaaagaagaaaggaaatttgggagcctggaatctgattgcaacttcgggcaatgttgtcaggtttttctgggcatttcaaatagcttttctgtatctagtttcttcttttctgtaaaaggaactttcacattaggcaaagatacctaatgcttatggagtgagtgaagatgtaaagaatcccgagtttggggctttaaagataagttacattctggaaggaatgttgtatatgcattgaggctggtataaggtgacttctttttcagggactatgaagagagggaaagtagtagtccttattatttagatgttcttagaatgaatttcttttaacacaaagagctagtgcttggttttcatggaagttgattcttagccagatatgtattacttcagggagcaaatgtttcttttaatgaagagaaatttaaccttagtgagatctttgaattgtaatgcaactagtaaggtaacctgaaccatcctgttaacattttacttctgcctctggctgaaagctgtgtaaatggccgtaccctgtgtttattctgacttttgttccatgaactatgctcaggttaaataaaatatctatctgcctcaggaagccaccacttaaaataacttgaaggtctacttatttttcttctacagtagtcccccccttatccacagtttcactttctgcgttttcagttactcacggtccagtacaacaagatatttggaggtaaactgcattcacataacttttattacaatatattgttttaattgttctattttatttttagttattgttgatctctcactgtgcctgatttataaattaaactttaccctaggtatgtatgtatagacaaaaaaaacatagtctatgtaaggatcaatactatccacagtttcaggcatccactgggggtcatggaacatattcccctccaataagggaagactgctgtacagtgtaaacaatttgttttgttacctttttataagtagtattcctagtagcaaaattaaattaacttggggaaagttgtggagttttttttacatcctagaatttctctctatatttgatgcttgtgccatccagatgaatgctttaaaacacttggtgaagggagctgtcacagaatttctatagtgttgaaatgcctttagagtaaaaactgtgacctcgttccttattgacagattattcagtagtactaagtaccaaccagggtaattacactagatatagataaggttacatctctttctggcaaatttcccattctgttattgagggaattagttcatatttgtggtatgtaaattcccttgttgccctaggccctgacacttttgaggtgacttagaacttgaatgtatctaaactctcttaagacagttttaagaactggcctcgtatctgtcagattatcaattaaaatccagtttagtgtataagtattattacagtgagcacaatttaaaagtgtgtgtgacaaagtaattttgagtcccgtttgacctgctggccattgggctgcattgataaggatctgaagccctctctcccatggatgattcagtgccccgtccttttgtgctcactggtcagttgttttactctctcatcaggaaagcacagaatgacatgttaaatgtggtacaagtgaaaaaattaggcagatttaattataatttgtattttatttagttttttaaccaatcagcagtttacttttcattcttccttttttgttggcaatttattactatgcacaaaaggagctggggacataaaaggagaaagaagtaggaaaacgtgttcaatactttttctcttagtcaccactttggagcatttttttgcccagcaccgtgctgagtgccataggacataccaaaagttaagataacgttgctgcctttgtaagcacatggctaattggagaagaaaaatgacacctgtgagaagatttgtgcgcagttcagggcttacactggtctgactgaaggacatggagcccggccatgtaggaggggcaccagcagggcttattgtagaaagtaggcctcaaaggcaaagactgttatatgacaagaggaggggccgggaaggtggtgtcaaggaggcgtgcagcagcaaagatgtgggagggacataagcacagttagtagagagccctgcaatcccggcagaaaattatcaattggattgaatgaaaccaggcaggagagcccgaaattcaggcattgtgcatttataagggcatgagtcagcccagaatcacatcataacctcctcatctataaaatgaagatcatgagggtagcagccctgcagcggcttgtgagaattcctcctaggatgtgtgcagccctgggaagggtgcctgcatgggagctgcccagtcagtgtcctatttatgtatccatgggatcagaactggtgccttttgttcagtaggaggacactgtgtgtttgtttaataaggttttttagtttggtcttttggtttcgcaggacaggttagaaggggttaacagctggaccagggcagccatcagataagggcctctgttgtccaggtgagacctgatgactaaggacagcctggagagagatgaagaagcccttgaaggctgattttatgcttggggacaatgaataggaatgtttctatgtcagcatttcctaccttctcacacttactatctttctttcctgattatttcattcccagagactggtgaacttctctatttcttatcttgctgtctaggatttatctcctggcaatgccatcattacaccaaagttcaccacagtgaaagcctgtggcgtattccatgggctgtattttaatgaacacttgtgttcacagtatttaagattataccttaaaggtcttcttcatattttacaaatgtcagtggaccttttggtcaggggcacctgccacagctttctctggagccaagcaggcagttggaaagaggccaaggcagggaggaggtgccagcactccccatgcctgagtgagtaggatatttgcagcatgagtgaccaaatcattcgaagctctcagaaagagatggcctaaaaggtgtgcatttgaatggggagctccagggcaccagggaccatacctttcatgggaagagagtagaaagggcacgtcttagagacgttcctcaggtcctcagggaataagcaacttttctactggtatgtgtgcatgggtgacatgtagcaatttaaaatttactctgttttattccccaaaacagacctcgctgccaaaggcctgggggtggcagcgggggagacagaaacttggaagcaggtttatattgcaaaatgaacccacctgaaacacagttttatgaagtgttctgccgttctttttttccagatgctcacttagcacagcagcctgggtgtagtaaaccacaaaaagctactctaaagtagggggatttggcctaaatccactgaagcagagctaaggctgatctagccatccatccttaacttattttaattacgcctggatgttccaattctcttggcaaatttttgaaatacttgagtagagcaacctggagttttgaatactgttttaagatggctggtttgtttcctgccttgtaaagaaagttggagtagatatctcaaaagttgccaccctctggcacttcagaacactgccaagctttaaaagcaattaattacagagattagagactgattctgtggatgacagatgatactaagaactctgcaacctatagaaccatccctgagggcggggtacctttctcccctttcccttaaggtagggtttctttgatccaacaggacgcgtgcatagcattatgttgacaggtagattttcttaagtgctagccattaaagtctccagtctctttgtgggccacattaagagaaaccaaaattgttttgaattagagctagtgtttagtccagacagcctctgggggttgaggagcataaatatatacaatttcaaaagcaagaagttctgtgctccatatggggagctaatgaaatgcaaatctgatacttcaagtattgttctcgctctgattttcaactccttttcttttaaatgcaaaacagaaggactcagcataactacaccataaaatggtttcttcaactcggtgtgaaaaggacacagaactaattttttttttttcttacaagcagagctctcctcatgattatagatgttttcacagccagttggttttcattagtggcagtttcagccctccctattgttactgttccttggccttgcatggccacacaatggtgtttggacttaaattgactcaagggcctctagtgtcctggagtctaaggctacccagttgaggccctgatgctgcgagtcggtttttccctgtggtatactttacccatgccaacttagctaaattgttccatttaagtagggggaattttctaacgcgatattctgggaacatgttcatgaggcaatgattgtcccaagaatgacgaaaaccatctgaagaagtctgccaggacaagggctgctgtaacggcgtaggggttataatggcaacacagctcacataaggtgatagaacgggccttatttgtcagcttaaacaattttgcattttgtctagatgctttatttgggtttgagaacatgaaatagaagagaatggtatgagtacagtaggattcccaaattttttccttctcttccctacttaatggcacatgaaataacattcagtttaaatagcaaggtggatggttttaacataatcgggtcccaaatctagagaaaaagacaagccagaggcatccttggtggggtgcctcatccagcttcacctggggcttctcttctttgctgcctttgagtgcgcgctttcagttgttcagccctcaccttcatctgcaagcccatgggtgagtgtgtgctttacacacctttgtgtcttgaggatttcagcatatcatctggttctcccaatgactgtaatcactgttaaaataaggacctcatcttctatttccttcttagtactcccaggcctcatgggtgtcatacacagagaggaaacactggtgaaatagtgggtatgacagtgctttggaaagtgatcataattaccatactaagcactgtttaatgggttcttagctgcatatgaccattaaggatacaaaggtactgctactttgtttttctagtataaaaaagtctgccttgcagaacgtacatatagtttactgtgttctttctatggccaggaactttgctaagcactttacgtgcattcatttgcttaatcctcatgtgcacacatacaaacacaatcccttttttttgggggggggggggggcctggagggatgcacttatgtagttattactatccttgttttacagatgaggaaagtgaggctttataaaaaattttttgctctagtcacactgaccctgaagtaacggagacaggactggggcccatcctgtcttacaccaaagccctacttcaaaaaattgcatgtaacatgtgtacagccttgctcaaaattgggtggtaacatatttatttccagtctaaaatataatgctttttcaagagcatagactaaaagaacaaatcaagtcatgttaatacgccacattagttataggttgtaaggaagtaagattttttaaaataagtttagcccaggcatggtgattcatgcctgtaatcccagcactttggaagggtaaggtggaaggattacttgaggccaggaattcaagaccaacctgggcagcatagtgagaccccatttccatcaaagaaaaggaaaagtctgggtctaatgcttacaaattaaacaaaggagtgagtctcttgttgcagctaataatgtgatcaagatttttttcccctgggtaagactattgttatatctaataaaaatacattttaacattatattttatattttacagtcaatactttgttgttctgacaatcaagacacatattcctgattaaattagtaaatcatttatgttgatggtagacagaaaaagagaaaacagatttgtatttttgcttaaatccttccctatgagacattaactagataaggaatatttgtataaagagtttgagattagcaatcaagagtcgtgggtttgtggttactgtcgttttttatgtatgacctcggacaaatcacttggccattctgggccccagtttctccatctattaaaaaaaagccttaactatgaagtacttgcagattttactttgcatattatctgttgctcaactttttaacaataacatgtagtttctaaacttctcaaaatccattctttacttgatagcaaactttaaacactcctgacgtataaacaggtcagaaacttaattctgtcctcccgcctgcagttcatggatcctaaatgtgaaagaaaacaattgtgtatgggtattttccctaattctaatcttccaatcccttgcttaaggaaactaaatcatagaacatagcagctttgtcctctgtgtcagcagagcattacaaagccctgaaagaatgttaaagcagttttaaagtcctatttttaggtgcaatattgtcaggaaataagctttcactgagagattttgagaaaaaagtacttgaaaatcagcagctggggtagcaaagtgaattatgttaaattttaatactcaaaccaatatggttaataacaaaatattctttctccaggttgaaattatccaatgacgaaatcaaacgggcaattctaacaatggacgaacaggaagatctgcccaaggacatgttggaacaggtgagctaccagatgtatctgagagcagaagtgaaaagcgaccatcaacagggagagggatgttgagaacatccggttgttgctagtggatcatttcctcatctatgaattgaggaggctgaaccaagttcccatgtgactctgttaggaaacttaatgaccttattctctcattgcctcccaaactgatgggtgagaaagaagatcaagtttgtcaaatgcctgggacccacagcatccctcaagctgcaattaagtcattatacctcagtaaatcatataaatctagctctagaagaaaatctgtgtttcacaggaatatcgagaatctcactagcactgtgagattgcaaaccatactacaaaaactgattcattactaaactctaaatgtaatttgtgtcttggtcaccagacccacaaccatgaaaatgacctttaaacccctaacactgtcatctgtatctaaatacacatacgtgtcacaagacaggttgtaaatgtcttggggctaagtcttaacctccgtacattgtacagccccctcttgtgtcataaatagcagtaaatttaaatgccaggggtagcaagaatgggatttacacccagtcagattacatctttgcccatggtatcttgttataatttttattatccatgaccaagcagccagtatttctatagcatttctttgtagcctctccaacgggatcatgggctgtttggcatctttgtctggttgtccccaaataacaatgttgttgatctcgcacatattctagggattttcacctgtctctgccccctgccccttggtctgggccttaacttttctgtgctctgtggtgatagtctctgaatgctataagatcgttccatccttctgtctcattgttttggggatgggctcacattttgagtggttttggtcaataagtccacgtttgttagagccaggtctacctaaggtcagctgtgggcacaagcaactatgattctagactgaactccaggttgcatctgtaggtgtgccctgttccaagagcagagaataagggtattttgtgttgttaacagtaatcctgagtggtgaagttgctctgggtagagtgcctgtctgtttgcacgtgtgttttccatggttctcactgatgtcctcgaaggtctcagacaccatgcagggaggaatgatgtttgcagagtcactccctaatggaccagccccgcccctgcaacctctgcggctggaatagtcctgggggaaatccctcacatttgccatggagaaactcttcatgctgtcctttaaaggttttatttaattatcaaaatagttaatgattatgttctcaagtctcttggggttctctgtgtatgaacggtttaaaagtatctcctgaacccaaaatttattttgagagcattttctagctccttcacgtacccttccctcccttgctgtagaccagtcacacagagtctttgctctgggacagtggaggtctaggcagtgctccgcccctcccaggtgaccctgccttcgagttgctgcacccaatgtggtaacccaaagtgaaggactatgtgtaaagccactttagtcctcctgccttcagctcctattgacaaggttgtatgttttaaaattccacaagatctgtttactgtggaattgcatccagcaaaattcctccttgagggaaaggatttcaaaatcttgccaaaagggcctgcagtgcaaatagagtgtgcttcaaataaatgcaagaaataaaaccagtctactgaagcagaatctggacaagtaggatattttttgacctggcctgtcctgataattctgtgtgtgtcttgctctctggtcatctcccacgctctttcttttcctccccattttactatttgttctttacttccgtttcctctatacaacactcttcccagacaagtgttgatgccagcatttccttactccgatttaggatgtgcctggtggctgctttcatcccctcctctcttgctgcttgcagctgctgagctctgatctcagatgagagagagagctatacgctcttcttcctcggaacacatatctttatccttattcccagatatttgcttgactcctgatcctctcttaaaactacccacgcacagtcctttacacaactctcctttgagaggggactgagtttttagtgtggctcctactgtgcacttttaggtaacaaaagagatgtagtgactgtgttattctgaacaggggacaagtgggctcagcacaagtttgcagggagagaggggactgagcaaattagtgaaaggatccttgaggctagaactcagtttccttgcccaatgggtaaaaatccaagctgagggaggctggggtgatgctttcctctctctttttcttcccttcttcttgccttcctcccttacttccctgcactgagaaagaacaagatacatcctgaacagtgtcaccgtttgaactcaggaacagaaatgcctagaagctatcaggcccccagacctatgaactccctggcatctacttctgtcttcccccacttccgtcccattaggatggaggggatgtctcttcccttcgctctggccccattcctttcttctagtcaggaccccagctggattgactgcccccttctctatatctgcaacctcgccctctctactcttagctcattcaagtgtcagcctttagcacataaacacacccctacatacagcatctgcacacatataccacacatacacacctacacacagtgtgcatacacccctgcatgcacaccctcatgcacacgccccttacacacacacacacacacacgtcttatgcacatgcccctctcaagactccacatccccatctagctactgtcttctctctgatgcagccagagtcttgaaagccatccacgctcactttctacccactctgctgcactgtcctcctcccctccctagagctcttctcaggggcacttgcaacttccctgttgccggagccaggggacactgcggggccctcatttttcttagtttcttgggggtgttggcacccatggctgcatgctgaaatgctgtcttcccatggccctgtgagccacgcaggcctctctggctgcatctccttggcctccttttgaaggtttttccttttcttgtcctggcgccttgaatgctggttctcttcagccctgctttttttctcttgatggcacctcttctaatctcactgacacctgtgccttcagtaacctacctgttaaaaccaatgccatgcttcagcttccaaacacatcttcctagggcttcagacccatttgtccagctgcctactagaaatcattacttgcttccatgcaaacattttgaacattaaactcaccttctcctccccatcccggcccaccctacctccagccttctcttccttcaattcatgttccctgttatgttgttgcctaagccagaagcccaggcgtcatctttgactcttcctctctcatataccacaatccatcaagtcaagccagttccatgttagtctcataaatagctctagaatctgtccactagctccaccctatccaggccaccatcatctctcacctagattacttactataccactatctaatcatttttaatctcttctaattctttttccatcctgcaagcacggcaattttttaaaaaaacgtaaactcactctcctacgtgagatttttaaggtatgtcccagtgccctcaaagtaaagacagaacttcttataaggccttgctactccctgcctttgcctaccctgccctgccctctcccactgatgttaccactgcccttccacctgcataagtgctgtgctgcccgttccagaccccggcacatagtatacactctgcctggaatgtattccagcctcacacaacacctgcctgtaattccaattccctctctctgctgatgacacccagactaactgccttttctgaggtccctcagttaaatccaacaaacatttgaaaacctactaaatggatcgtctaattccagcatcaaattctggggagagcctcaaagtcaagaaggtcaatgttttaaaaaaaaaaaaaagttaagggcatttgatctagaaaacagcatgagtccacaggtcttgcatacacatccaaaacgtgtgtaccttgaaaggaaatcagacacgtacagaagcactgtttcagttttaaatattttactatttcttccacatcccatgctcatttcttccttcaaaataaaatacgaaattaaaaacatcaaatcccactgtgttcctctcacccagctctgcatggaaggggaaaaaaaaagattgaattagataaaccagaaaaataagaaaatggaatggaaactacaaatggaattattcattccagcatgatgtaacagaaaaaggcacagagctgggagtcaagagacctaggttctatttctaatcactacccacacttgctttgtaatcctgggtgagtggcttactctccctggacctcagttgtatcatattctgatgagagcattgactccctaaggtccttctagtggtctgtgaaaaagaggttccagtagagaactcccacaattctgatttgagaggcagtagagaacagaaaggtgccaggaatgaatcttatacccatttaactacttccaagtaaaaatgaaaagatttaatcatttctattgtatcttaacctgtgagcagagcttatacactcaacaagagttaacattttatcttgggacagattaactgaaagggtgaaaaattactacatggatttaagtgataaacctcagttttaatattcgtgtgtacttttcagctcttgaaatttgttcctgaaaaaagtgacattgacctattggaggaacataaacacgaactggatcggatggccaaggctgataggttcctttttgagatgagccggtgagtttgaaaatgctgggaatgtgaagatgtcacttccctttctaagcttcatgaattttcaattcatgttgaattgtttgggccaattaacctggcttaacttgaaagctttttcattctaaaaatcttctcaagtctgagtgatgtggaatttgttctgtttatgtcacttcttgtctatggatgagccacggtgagggttttttcacaattatctctatttctgggcccctttggccttatcaagtaataacttttcttgattccagtcagtatcattctcctcaccagtctgatttcttgggatagtgtctcatacttccaagtagcttagcatggcaaggtggttgtaaaacaaaaaaaaaaaaaagaaaaaaaaatatatggacagactctgacaatgtcagcctcaagcccccataactgaacaaccagggtctagatgtcagatcatgacacatgcagacatcactaatcaatcatggcactcttcccacggagccttggcaagctctctgaacccttctccagaaagccctgaggcagccacagcttcgtaattgggtttggcatatgagctaagtcgatctgctatctcaggcctagaaaattgattcctcattagagaaggaccagtggtcctgaaactttcagtgaacctcagggcacagttttctcctttaggggtgtagagagggtgctcactatgaagacagagggaggtttgcagatgggagtgaggagaggacaatgtgggaagcggatgttggagaccagtttttactttggaaagtaaaatggaaagttaagaaatttggaatttgggagaagtgtacggaactgtcctttatttgcagtagggtattctttacattttcattcccttttatctcttctatgctcaaaagagttcctgggactctgagggaggagagatgcgcttcagtcaacagcagcagcagcaggctcccactttcttttagcagttgccttgatgggcgctaaggactctgctgcagttggccaagtagcccctgtaggtcagaccaaaatgggctctccaggcaaagctggcttaatgtcctgtgttcctgtccatgagaacaactaatgtatgtgtgtcgggggagtgggtgggtattgggggaggtgcttctaggtacctccacctccatatctgttattaagtgaacctagatatattaaatgaatatcaattagtacatgtttgctcttacagaattaatcactatcagcaaaggttgcaatcgctgtacttcaaaaagaagtttgcagagcgtgtggcagaagtgaaacctaaagtggaaggtaaagtcaagctgtctagattggaaatgttgttcatcattacaacccatttaaaagtgcaatccaagtgcatatagtaaacaagatccccttggtgattttttttttttttttgagacggagtcttgcacagttgcccaggctggagtgcagtatcgcgatcttggctcagtgcaagctccgcctcccaggttcatgccattctcctgcctcagcttcctgagtagctgggactacaggtgcctgccaccacgcctggctaattttttgtacttttagtagagacggggtttcaccacgttagccaggatggtctcaatctcctgacctcgtgatctgcccaccttggcctcccaaagtgctgggattacaggcgtgagcactgcgcctggcctggtgattttttattttattttttggctcaaggtctttcttttaaaattctgaggggtgattacttaaggtcagtgcttgatgcactgccctagtctcggagctcacagcacgcctcctgggctcctctacagggttgggcttttgactacgagggtgttggtgaggagttaatctcactgctactagcattaaacctgtaattagcttcctcacaacagagccttagtagcttttttaaagggaagatttgaggctgttgtatggtttgatttttaaaatttgtaaatgtttgaaatgtgggcaaggcaactgaagagcacagccacggaacgcaggctggaatcaggcatctgcctaagctctgatccctgttatgacacctgcaagctatgacatgtaacacatttaactagttttctgtcagtggaattgatcaatactcctgttaacctgactcacaccagacaagtaagtgtttgtaaagaaatcttggagatgggattgctattctagatattcctcagtgcttatgactgatgagtcagccaagaaaggcctgagaaaggataggattttgcagctgtctatgggtgttggtaacaacttgagttggctctccctgtccttgttctttgcttctggtgtaagcgttttgaaagtgctcttggtaacccaataactcagtcttacatcttcaatatctgttattaagtgtgtgaatttagaatgggtatcactgaaacatcttgatttcaaacaacgaaacacttggtaatcatgtttttatgtgttttgttttgaagcaattcgttctggctcagaagaggtgtttaggagtggtgccctcaagcagttgctggaggtggttttggcatttggaaattatatgaataaaggtcaaagagggaatgcatatggattcaagatatctagcctaaacaaaattgctgacacaaaatccagcatcgacaagtaagtatgagatcttccaacacttgggggagccaggtgtgtaggtccaggctcagatttatgcctctctggtcctcctcagccttcatgacactgcattcttcagttggaacttctctttctcactactttcttcccttctctgacattgactcttctctaaacctctctcatgaccgcaggcatctcccacattcctgttggaccaattatccttcatccatttttggtccactgggacatcatctgttctaagttttgctgttgtttttgttttgtcctgcctttttaaaaaattattttttgtaaactttttattataatatactaagaagaggtcagtcatcacaaatgctgggcttgataatttttcacaaattaaacacacctgcataaccagcgcccagatcaaggacagaatgttaccagcactcgacatctccccatgacccctctacagaaaactgtgttccacagaaaagaaaaaaaccgatagttggtgttagaatatgaagcttttggggtttttaggttgtgtttttatttatacagtggaggtagcaactatattaaaaacttatgtataaatgcattttggctattgatacttagttgctcattgcaggtctcattaaaatgcttcctagaaagtgttcaatgctgcattttaggtgaacagattctcattaaagacaccaagatgtgaaaacgttcttgtgtcattaacagggtagggtcattaggcatattaacttgagtttccttgagagctctgtttctctgaggttcacactgacttcaaaggaacttgcacaattgtttctaaggtaagcttcttcatacccaaattctttttagaaatatgggctgttcaccctaattatttctaactaataggggcttttaccctatattttctatagggttcgtgaagcatagtattctggcaaccttaaatccatccaagaagaaataagcaatgtgttaatttgttgtttttgcatcgtgtagagatagattaatgaagagcagctgttgttatagccctgccaccttatttttaatgtaaacacttgatccttttcagagcactttcacatttgattgtcccactagcctgtgaagtacacaagccaaatactgttgtcacctgttgtcaggtaagaaactgactcagggtcaggtggctcattcagcttgcctatggttacaacaagcaaggtattcggccttacaggtatttgacacctgtgttgttggtccatccacagctctattagcagcagaaggatcttatttggaggttgaagtagggaatggaagatcttatttgtgtctaaagagcctttttaaggaagggcattctcttcaactgtacacacacaaaagcaatcacccatccccaatacttaccaataacctggcacttacgtgattatctgcttatttactgaggttactacagaatttacataaagtacaagccttttcaaaagaacaatctgcaactatttctgatctttctgtttcctcttttttttctgcctttaatatttggtccccaaatgcagcgcccacaccttatacacctgcatgcctagcaaagtgctttgcctgtaagcagtcacccatgaacgttgttcagttgaatctaatcagatagtgtaggtggtgggacagtcagcaggaagggtgcattcactcagcattgaaggctcagttactggtaatgagcagggaagaatcaaatgtgtggctgttgctgttccttcttttaagaatttgcatttagtcaaatgaggtattatttggatcgcaaacaaatgaagctcaggcatggttttaaacctttctatagcaagaaagatgtgtatggttaatgcaattaattgaaatgtctgtcaatagcaaagcatttcttttaaaaagtgaaaaaaataggctcactcttccttgtgatggcggctggcattttgctcactccttgtaccccttaggtaagaagtctctcaatagcaaagcatttcttttaaaaaatgaaaaaaatagcctcactctttcttgtgatggtggctggcattttgctcactccttgtaccccttaggtaagaatcacatgggcagatgacaggtaggttctgtgaagagcaaaattgaaatggaggctgggtgcagtggctcacacctgtaatcccagcactttgggaggccgaggccggaagatcatgaggtcaggagatggagaccatcctggctaacgtggtgaaacctcgtctctactacaaatagaaaaagttatccaggcgtggtgtcatgcgcttgtagtcccagctactcaggaggctggagcaggagaatcgcttgaacccagaaggcagaggttgcagtgagcccagatcgcaccactgtactccagcctgggtgacagagcgagactccatctcaaaagagaaaaaaaaaaatgaaatggaaggatgcagctgaacatatgaaaaataagtggccaaaattgttggccactgttttgctttggtgggcaattgttttctaactattgagagactgtgagaaaaataaggatttaaggattgcattgtttctatgaaatgcaagggtaaagaaaattgtttgaaaactctgattcattttggttagaggtgagttggaatactggggtttagcattgtgaattagcaaactgcctaaattatggaaatgttttttaaaggaatgtatttttaccctcctaattctaacttcaacagataagtagttcttgatcctggttgcttgataaaatcaacagggagttttaaagaatgcccatgcctgactccacctcattccaattaaatgaatctctggggttagcccaggcatctggagtccaggtgattgtaatgcgtagcagtcagtgacaatgggatcagaccaacacagtgttgcctaatagatactgttatcctacttgctggccttttccatccaggtcagtcagagttcagccctgtcaccaccagagagggagctggcacaaccaactgttttaactactaagagttatgcagttaggagctgaagtgttgctaaattaggaagtggattcagggctgctaggatatcacatggtggcagttatggcccacttccaggttcagcccagagaaagggggctttctaactttctgaccaccctttgggtgaaaccttattaaaaactatcagtaggccagacacggtggctcacacctataatcccagcactttgggaggccgaggcgggtggatcacctgaggtcaggagttggggaccatcctgaccaacatggtgaaaccctgtctctactgaaaacatgaaaattagccgggcatggtggctggcgcctgtaatcccagctactcgggaggctgaggcaggataatcacttgaacccaggaggcggaggttgcagtgagctgagattgcaccactgcactccagcctgggcaacagaccccatctcaaaaaaaaaaaaaaaagtatcaataattgtcatcagtgagttgctgctctgtactttagacttaagaatagctgcccttttcggtggaataaacatccctcactctccaccccaccccactccactccacccaagcctactagttataaacctgcagggcacaccccattttagggtggatccactgggaaggtaaacttgagcttgtctccactggcagtggttcagattcacttagatcacccatcacattacccagattttgaaagatgctcattatgggccacaaatgtaattcttatcctctttttagaaattgtgtgctttttgacatatatctatgcaatccccatggaggctctcccattattcctgtctcttgagaatccctgccttacatgatcctccaaattttgaagttaatgcaggtaatatagcattattgtgggttctaccatttgagcatataaatcatatgcagatattaactattcatatatttatgtagtttaaatgaaaataatttgaatgtttaatactcttcccttcttcaattgtagaaacattacccttttgcactatctcatcactattgtggaaaataagtaccccagtgttctcaatctaaatgaagaattgcgagatattcctcaagctgcgaaagtaaagtaagtacttacagtgagtgttagtttcttaaatcacttggattgtgtgttagccattgaggtagtttgcactgcatgaagtcagtccttctatttgttttcccctgatcattgtatgaaataaagtttgaatctcatccaagtcactcaaatgtattacaaggttttgaatatatgtttgttctagcttctttggaatactgcatgcaatttttaactttcatacttttaaagggcaggtgttttaaatacaggtaggagcaccttagttaaataaagatgcatggctaagcaaatagaagacctaagtgtcagaacattgcaataattttcacatatgcacacatactcccagaaaccaaggcggctctttaatgggaagcattctttatgcaaatgaagaaactaaaaataaaatggaaagttgccaaacttttaccacaaacttcacaccacgtttcagagactgagaagcaggcaattttccttgctgtttttccctccctcttttggctctttttttaaaacataaactgcatctttttgcagtgaatttgaaaagtataatgagcaggctcattttttccctctgttcatggaatctggtggaaatatactaaataaggcatgaaattaaatgaagtattggtgagtttctttatatgttgtaaattatctgggagaattaagtttcaatctctaatgtttaaaagccatgaaatagaaagtgttgtgtatgggagaagcccaagaacctttctctattaaaaaaaagatgaaaataaaaactagttaatacaactttaagaaaaatcatttttgattgcaacttaagccattaccttgtaatagtcatattattggggccttagtgaaaagcagaacactgattatacagagtacaatgtgaacatgattgcagatgaacttgttttctttctgttttcaaagggagccaagtatggcaagagatttatttctacatgaagtaatttgctgaagtgagatttttttgagtttgaaacataaaatatttttgtacagatggaagatatttctattctatttttaacctgtaaaatatacctgctggctacagaaaacaaacataattttatacctacatttcatgagtttaaaatactgttgtctttctttgagatctgagcatggaagggaattttaaacatttaaattaaaataggatggacttccaagcgtgaaatatttaaacccatcttatatttaatatgtgtaagtcacatgttgattgctaaaacattgctatttacaacagcatgactgagctggacaaagaaataagtaccttgagaagtggcttgaaagcagtagagacagtgagtatttttttgttgttgttctaattcctggtctcttcactatctctagtgctggtggttttcagcagatgggttgtgttggcatgtggtatgcccgggataaacatttattgattaaaaaataagaaccaccaccacaagaagcaaaggcaggttatgttcagcctggcaacttgattgcaggcagcaggggtcgtggataagtcactgcagcaggaactggaaactggacctagtgtgccaccaatttatctgtaaggcaggattcatcaggatgagtgggctgggctagatgatcttcagggacgctctcagtttccaagtgctgctaatatatggtgttcactttcggtagagcagtagaacttctctgtagaacttctcagttgtttttgacttggtcctttggggagtatttactaagcagacagtgtagtacatgctctagctgagggtcacgatgactcagaatccttgtcctccaggtgttgcaataatcggagcagccacttccctcagcctggccgcatccagataagcagagtgattacggaggtgccttaaggaagcagcgggttgagggtgctttggaggcatgaggaacaattggcccctattggaggaagcttctcttttggaaaagaagttgtttgagctatggcttaagagggtagggtaaacttaggtgcatagagggaggttatcccaggcatacaagacaacctgggcccaggcctctgaggaaggaaaaccagtcaggctggcagactggacctggtaggatgaaacgtgcctgttggcacagtgccctgcgggtactctgcagatgcagctgccagcgagagagggggcagggatgagaacaggctggcagagtagcgtccctggtgtctgtgctcaaagcagccatagcttgggcctgctctgggtgaaggagacggatttgcaggcagcttggaaaggtgcctctcataagtatccttcagatcatttatcagtaatgctgtgaggactctcccttcttttcgtttttgaatcacaaaactgccatagaaagtagttgaattaattaaagacatacctctaataaaaattaaagtcacaatgtctaatttttttttcaataaattaaggagcatgtgaggtttttttcctttttttttttttttaatgtagggagtagggggcagtattaaaaaaaaaattctactgattgaactttttctcccagccccagagggtccatggtcattatgatggccctaaagcctggctctgacccctgcttctgagccaggtcagagcaaggcctggggtggaggcttctggggaaattttgtgttgttgctttattaaaggatagttttgctgaaatcactctatcccttgggtcatatacactgcatcacactttttataggagaggggctatagaagcctcccctacccttggaggtgacgtagtattgtaagaaaatagtgggggcagagcttcgcctggccaaatatatatgtgttctaattgtgctttacacaaattaattatattgtttgaaggtatcaaagatgaatatttatgaaattatacattaatgaaacactttcaaatgcctttcccgtccccacactgaacacagatacactcactttccaagctaaagtactggaatcatggcaatttcttccaatcagtgccagctccataattgatgagttttcacttccgttatttcatttgagtgtagtgatgatgtggatgttgccctcttacaaaaaaaaaaaaaaaaatcaataaactgaggcccagagcaacatgccatggttaagaaccaaatcagtggtagagctgagtcagaactgataaactgtgatgactacgctcctgcttgtgaagatctctgccaatgcaagaaaataagggagaatccagtttaagtcaattggtatacaacatagttattaccaagactctggagtcaggcaggcctgagttcaaattctggctctgtcactggtcagcactacttcagggcaagtaatatagccctccaaaccttaatttatatgtttgtataatgggaatagtgatccctcactcatagggatgttgtgaactttaaataagaatgtgcatctggcaatgattaaattaaccattaacattagatttgaatcatctgcgttcattgctgtgataatggaaatatggataattaacaagagactaattcccctacaggcctgttcacaaaaaccaatatggtatggacaagagaaaaatggtacattatggtgccaaatgctacagccaaaattctactacccatatcccacagtttaagaagtaaatagacttggctgagagggaaagaaaaaaatcaaggcaccacaattctaagcatggaatattgacaagcagagtctcttgttttcactcacaaacccttaaaattcagtttgcccccattatttgtttaacttctattaattttatccaaatgcaaatctgcttgctttctaaagcctgaaagagaaatcacatagatcaagtacttagattgttggtaaattgctatttgcaaatatgcgtgtgcacatgggcatggctttggcatggtgggaggaagggcaggggcactagagtataacaaaatgttttagaacaagttttgatgtgtttgccattctgatttattaaatttaaggcatgtgaaatatgagacgaggtgtgtctcatgtctgtatttgaagcctgcattgacattattcatttcctgtgtttaaggagctggaatatcagaagtctcagcccccacagcccggagataagtttgtgtctgttgtcagccagttcatcacagtagccagcttcagcttctctgatgttgaagaccttctagcagaagctaaagacctggtaagtttcccccttgtgcactgagtgttgtttgaccgggctgggcttcagtgtgatactttcagttattattctgtacgggaaatagcaggagtgagatccaaacttcgtggtgcaggaaataaagtagtagataattactttccagattccattgttttgcatgacataggtgtattttcatttccaagactgtgattaatctgaacacaccctttttgtctgactggcctatgttgcctttaggttagcaagaccttgaaggctctgaatggtataagaccagcaaatactttgacagttttctcttggttgaaactggcttgaagtacttatctctgggaaccagaaaagagtagatgatgaaaaccaggggcagcatcaaatgtgcaatcaggtgttactaaagccatgtgcctaaattacctctatgttgtaatatgctcatctgagatacagccttggaggacaggatactacctgtataaatctccagcagaactcgctaaaagagatgcattttaattcacagtctcattacaagaggtttttttttttttcagtaagacatttatttttatgatttctgctatttcacattttgtgttcccttggaagagaaatttttgttggttaataaccaccacctcttagctccctcagcttcacctcactcctctctatctcaggttgtttcctcttccaaaatgcattcacattcatatacaagacaggtacacagtctctcattttctatcctcttctcattctttataaatgatattaacactcttccccaccccattggttcttttactctacccatctctcagttgccacaacactctgagtcttttgtttcgaaacttctgtaaatggatgttatttttctctggtcacctgtttggttgtagatatggatgattgtttatgtaaatgtacacacataccagttaaagttcaaaagtaggctgttcacatgcattagctaatctcagcattaaaccttctttctaaccttataaaataaatggcaatatatgttcaaatggctgctgtcagaggtccaacctctgatatcccacagtggaaatcagtcaactcatgtcagcaaccaccattcagacctccactgtgaaagcccccatccatgttttatgtatgcctcaccactttagagtttgtgcttcataaaggaagagactccccctgttctgatatcccacctgagcaatatagcacctacttcatcaaggggctcaaacatttttgtgtgtgaactggctgttgtcagcttgttcatcacagtagccagcatcgcgcttctctgatgttgaagatcttctagcagaacataaagacctggtaaattttccccttgcacactgactggggtgtgtgtgtgtagggggtggaactttaatctgggcctggttttctttagatttctaagattttgatatacatgacgtcatgatcactagaattccttgataaaaagatcactcaggatggcttgaagtatgtgaacttgaatgttttagaaatccagttgtagactggctattgctattttgttcataccagaacttttataagttagcatataaaaccatggagcaagctagaacactatatatggcgtctgaagaatgttatgtttttgcccaaagaactcttttctaatagaatatttccaaataagtaaacattgaaaacaactcctcagtgaagacagaaatggtaaaaaggacacttttgttacaagtttaaagatatgaaatagtaactgtaaaatatatataaatataagccaatacttgttttatttaaaaataaatgttgaaaatatttaaggtagatggtattactgagatatcagaagaatctaacaatataacaaaggcaagtaaagcaataaaaaaaccaattataagctgtttgggggcactgcataaacacagcatggtctaaatatgaagaaaacttaaaatctggaaaatgttaagtagttgattgggcgtagggaaaaatgtatttgactttgaagctaggaacactatccttagtagcttaggagtaataacattagatccttacagaaggaagtataattttaacaaacaatttgacattgaatattatttgggtagttataataatgctaagactattgaaaacatactatcttgagttatggagataacccctggaagaactaaaaagagactggatatactattgttactgtatacatatatttttatttaactttaaaaatttcttggtattttgcattttggccatttaaaaagattgacactggggcatggtggcatgtacctatagtcccagctactcaggaggctgtggcaggatcacttgtgcctaggtgtttgagtccagcctgggcaatgtaacattgcaataccccatatctttttaaaaaaaaattttttttaaagattggcattgaaaggggttctaaagcaaagaatttggaataaaattgtattctcagtcatacactttgggttgcattaaagattccatactcagttgctgttttctcactgagaccctgaaaatatcttaacaatagcagcattatttgtgattgggaaaagcagctaagaggcactggctcccatttgctttctatattgaccatatggcaccagtaaatgatattaaactacttcaaagacaagttaaaagtacaagtttccctccccctgctgagtttgctattagttttatgtctagggtgctataccctacaatattttgtttttactactgtttagttaataaaaagtcataggaggtcatcatacatgttaagctcaaatgaggtagacaggaataaatggtttcaaaagctgaggagtattacaatttttactttagaaatgattaatagacatgttcagcagctgaagataaatataggctcactaaaatccatcagttatatttgactcagccgggtgcagcggcacatgcctatagtcccagctactcgtgaggcttaagaggaaggattgcccaggagtttttggctgtattttgctgtgatcatacctctgaatagccactaaactccaacctgggtaacatgtaagaccccatctattaaaaaaaaaaaaaactaataacatatgcattccagcctgggcaacatgtaagaccccatctcttaaaacaaaacaacaaaaaaaaactgccgggtgtggtggctgaaacctgtaatcccagcactttgggaggccaaggtgggcagatcacctgaggtcagaagttgagaccagcccggccaacatggcaaaatcctgactctactaaaaatacaaaaattagccaggcatggtggtttgtgcctgtaatcccagctacttgggaggttgaggctggagaatcgcttgaacccgagagacagaggttgcagtgagctgggatcatgccactgcactccagcctgggtgatggcgaaactccatctccaaaagaaagaaagaaataaaaataaatgagcaaacaaaacttacgtttgactcaatctgggctttggtctttctcaagttatttatatttgattgtggaattctcatgaaacattgacttcttaaaaccatctttttcctagtttactaaagcagtgaagcactttggggaagaggctggcaaaatacaaccagatgagttctttggcatttttgatcaatttcttcaagctgtgtcagaagccaaacaagaaaacgaaaatatgagaaagaaaaaggaggaagaagaacgtcgagctcgcatggaagctcaggtgagaggatgattaattgaccaattccacctcctagaagttctatgactgcagcccagtcaaaggtatttagagagcactctgacctggcaggaaggaaggcttcaatgtactctctagaatgctgtgggactttacattggtgttgtttctcttgggctatttaacagtgtatattcaaagccttaaaaaaaaaatctatccacatcctttgctctggaattccatttcttagcaattattttaaagaaataatcataaatttacacaaaaaagggcagcattctttataatagcaccaagctaaagacaacctaaatgtttaccaaaaggggatgagttctaaatgatataacagccatataatggaatatttatgcagtccttgaaagacatgtattcaaagaataatgatacagaaaaagatttctacatgaaatctttttctgttttgttttttaaggtgtgttaatacatatagaaaataatagtggtgtgataaacctttaaaaagttcacagtagtagaattaaagatgtttcccccaccttccttttatctgaattatccaaattgtctacaatgtgtatgtattagttggcttttaataacagtaactattgtgtatcaggtttcaggcttccacagtagacacaagctaagcctttgatataaggaaaatggcctgatgaccatttgctttagttatttggggtctatgtaatagtgataccttttttttaattttcattagcagaaacacaaattgcctcaattgctcttattttaactagaatatcatgcagtttacctagaatctaggtggtgagggtctaaccacaagggagtggttgttttttgttgtccattgctcctgcaatggagaccccatgttccaattccccctttcttgtgatatccaaagggggttataggatgagcatagcttggtgtctggagcattaccatatttcaaggaattgacctctactgcaaacaaaatgcaacattttgacatgtctcaaagaggttatttctttctatttgcagctcaaagaacaacgtgaaagggaacgtaaaatgagaaaagctaaagagaatagtgaagaaagcggagagtttgatgaccttgtttcagctttacgctcaggagaagtgtttgacaaagacctttctaaattgaaacggaatcgcaaacgtattaccaaccagatgactgacagcagcagagagagaccaatcacaaaacttaatttctaattttccatgaatacttttttttagaaagctcattagcagccctctaaagtgactagaacgtttcattacactgccttgcaatccaaacagtggcaattttttccttcatctgtgagtgaatgtgtgaacgtgtgtatgtaaatgtatgtgtgtatatattaaaaaatgtatatagatgtctgagtgttgtctggagacctatacgtatggttaaaaagatttatgttaatgtatgtgctccaaaacctttcgtgtatgcattcacattgagtgtggctcattttctttccccgaacgccatgactgttcagaagcacaatactatctcctgaaagagataagagacattccctagattcaaaggcaaaacagaagaaacaaacaaacaaacaaaaaaagcttgcaaaatattttatggtttccaagcttgatatcctttaaaattattttcattgatggaactggagttgttggaaaaacatagatttaaaatgatttttgatagctgacattgtgatgttgatgtatcacatcagtaataggaccagctttgaatttctgacattggtgtggggatacagtctgtaaatgtttattgagaacatcttgcacacaatttgaattatgtagaatgtcaatcaagtttttgtatatttaaaagttggacatcaattttttcccctgatttcatcaagttatctctgccaagtgctcttgataatttcttcagatttttggaaaaaaacactatataaatgcaatccatgctttttttaaagaacaacattgccagagtatgcttgttctaacaatatagatatataaaccttaaaaataataaaatatctcacccaagacttaaaggaagaattctctgaagggataaagattactaaaaaaaaaaaaaaaaaaaaaaaattaatggggtgcctttttgttatagtttctattttctgttttgtaggacaagctgcattttctgtaaatataggtctggactaaaggatacataaagaatgcacaaaatgtcaacatcagcagagatgcccagatctatttatctctaagtatatttgaagtgattgctgtttatatgttgtcattttaaaattgtgtgtcagtaaagctacctgtaaaatttcagtccaaaaaaataaagctctcagggagacatgaataaaatcaatgaacattagaaaataaaatatagatgcttaccattaacctaccaactcttaatatccttaaattatgtgatatataaagaggactgttacttttttacttttttttttttttttttttttttttggctttgctttatttatttgtagttgggggctaacgttttctcttttctttctattgatcctgttgtggttgggtttcctgtggagagagtagtttgtcctgttgcactagaacattatttactcactaaattgagtttttcagtcaattaacaaatatttattaagttcctactatgtaccaggcatagtagggctacaatggtaagcaagacagagtccctgcccccaaagagcttatattctaatggggatattaagggatgaatagaataccaatgtgtgcactgtacaggaatcatactatttaaaaataatttgtataaactataatgcttagcacagatggcgagttatctgtgctatgtgaaagctgtgaaatagtgctctaagagttgtcaagagctgtggttttacatcttttcctcattgcaaatttagtgactttctacacactatatggaaataaatgactagcaaataaaacagtcataaatacaaagcagaggttgcactcccccaatcccgagttaacccaggtctgcaataacaccatgttaaaggtgcagatagagacttggctcaaaaaggcttggagatgaggaagattggaatataatgatggttttgtctgttccttaactaaagtgcctctatgtatattcttttctatttgtagcaggataaatttggtctggctcagttttggaactgtattttgaaaatggctttgtcttacagtttaaggaatagacaggtggagggaaagtcacataaaggagcaagtttgtgtagctgtccctcttgccccttttaatcatcctcctttgatatggccatcctggtgggcctcctttgccatttccatttttggtttctttccctgaaaactgtgtgcaggtaattccatgtgccattgttgaaaagaaaaaaaaaaaacaaaaaaaaacctactttttagattggtgctggtgtaagtagccacttttctctcttgggtgtgtattttaaactttttttgtttttttaaattaatgccaaaaagaaaatgcataatttgtaaacttaattatatgtcttatatcttattagcttagtagttggaaccacttagtctttaggtgcaagactgttgttagatagtactgagaaaaaaaaagtatgtgttatgagactgtacatgtttttttaaaaatagcaatatgcaataaagagatgaattc

SEQ ID NO: 1613 - DNA, 16428 bp, Homo sapiens
gttctggctcagaagaggtgtttaggagtggtgccctcaagcagttgctggaggtggttttggcatttggaaattatatgaataaaggtcaaagagggaatgcatatggattcaagatatctagcctaaacaaaattgctgacacaaaatccagcatcgacaagtaagtatgagatcttccaacacttgggggagccaggtgtgtaggtccaggctcagatttatgcctctctggtcctcctcagccttcatgacactgcattcttcagttggaacttctctttctcactactttcttcccttctctgacattgactcttctctaaacctctctcatgaccgcaggcatctcccacattcctgttggaccaattatccttcatccatttttggtccactgggacatcatctgttctaagttttgctgttgtttctgttttgtcctgcctttttaaaaaattattttttgtaagctttttattataatatactaagaagaggtcagtcatcacaaatgctgggcttgataatttttcacaaattaaacacacctgcataaccagcgcccagatcaaggacagaatgttaccagcactcgacatctccccatgacccctctacagaaaactgtgttccacagaaaagaaaaaaaccgatagttggtgttagaatatgaagcttttggggtttttaggttgtgtttttatttatacagtggaggtagcaactatattaaaaacttatgtataaatgcattttggctattgatacttagttgctcattgcaggtctcattaaaatgcttcctagaaagtgttcaatgctgcattttaggtgaacagattctcattaaagacaccaagatgtgaaaacgttcttgtgtcattaacagggtagggtcattaggcatattaacttgagtttccttgagagctctgtttctctgaggttcacactgacttcaaaggaacttgcacaattgtttctaaggtaagcttcttcatacccaaattctttttagaaatatgggctgttcaccctaattatttctaactaataggggcttttaccctatattttctatagggttcgtgaagcatagtattctggcaaccttaaatccatccaagaagaaataagcaatgtgttaatttgttgtttttgcatcgtgtagagatagattaatgaagagcagctgttgttatagccctgccaccttatttttaatgtaaacacttgatccttttcagagcactttcacatttgattgtcccactagcctgtgaagtacacaagccaaatactgttgtcacctgttgtcaggtaagaaactgactcagggtcaggtggctcattcagcttgcctatggttacaacaagcaaggtattcggccttacaggtatttgacacctgtgttgttggtccatccacagctctattagcagcagaaggatcttatttggaggttgaagtagggaatggaagatcttatttgtgtctaaagagcctttttaaggaagggcattctcttcaactgtacacacacaaaagcaatcacccatccccaatacttaccaataacctggcacttacgtgattatctgcttatttactgaggttactacagaatttacataaagtacaagccttttcaaaagaacaatctgcaactatttctgatctttctgtttcctcttttttttctgcctttaatatttggtccccaaatgcagcgcccacaccttatacacctgcatgcctagcaaagtgctttgcctgtaagcagtcacccatgaacgttgttcagttgaatctaatcagatagtgtaggtggtgggacagtcagcaggaagggtgcattcactcagcattgaaggctcagttactggtaatgagcagggaagaatcaaatgtgtggctgttgctgttccttcttttaagaatttgcatttagtcaaatgaggtattatttggatcgcaaacaaatgaagctcaggcatggttttaaacctttctatagcaagaaagatgtgtatggttaatgcaattaattgaaatgtctgtcaatagcaaagcatttcttttaaaaagtgaaaaaaataggctcactcttccttgtgatggcggctggcattttgctcactccttgtaccccttaggtaagaagtctctcaatagcaaagcatttcttttaaaaaatgaaaaaaatagcctcactctttcttgtgatggtggctggcattttgctcactccttgtaccccttaggtaagaatcacatgggcagatgacaggtaggttctgtgaagagcaaaattgaaatggaggctgggtgcagtggctcacacctgtaatcccagcactttgggaggccgaggccggaagatcatgaggtcaggagatggagaccatcctggctaacgtggtgaaacctcgtctctactacaaatagaaaaagttatccaggcgtggtgtcatgcgcttgtagtcccagctactcaggaggctggagcaggagaatcgcttgaacccagaaggcagaggttgcagtgagcccagatcgcaccactgtactccagcctgggtgacagagcgagactccatctcaaaagagaaaaaaaaaaatgaaatggaaggatgcagctgaacatatgaaaaataagtggccaaaattgttggccactgttttgctttggtgggcaattgttttctaactattgagagactgtgagaaaaataaggatttaaggattgcattgtttctatgaaatgcaagggtaaagaaaattgtttgaaaactctgattcattttggttagaggtgagttggaatactggggtttagcattgtgaattagcaaactgcctaaattatggaaatgttttttaaaggaatgtatttttaccctcctaattctaacttcaacagataagtagttcttgatcctggttgcttgataaaatcaacagggagttttaaagaatgcccatgcctgactccacctcattccaattaaatgaatctctggggttagcccaggcatctggagtccaggtgattgtaatgcgtagcagtcagtgacaatgggatcagaccaacacagtgttgcctaatagatactgttatcctacttgctggccttttccatccaggtcagtcagagttcagccctgtcaccaccagagagggagctggcacaaccaactgttttaactactaagagttatgcagttaggagctgaagtgttgctaaattaggaagtggattcagggctgctaggatatcacatggtggcagttatggcccacttccaggttcagcccagagaaagggggctttctaactttctgaccaccctttgggtgaaaccttattaaaaactatcagtaggccagacacggtggctcacacctataatcccagcactttgggaggccgaggcgggtggatcacctgaggtcaggagttggggaccatcctgaccaacatggtgaaaccctgtctctactgaaaacatgaaaattagccgggcatggtggctggcgcctgtaatcccagctactcgggaggctgaggcaggataatcacttgaacccaggaggcggaggttgcagtgagctgagattgcaccactgcactccagcctgggcaacagaccccatctcaaaaaaaaaaaaaaaagtatcaataattgtcatcagtgagttgctgctctgtactttagacttaagaatagctgcccttttcggtggaataaacatccctcactctccaccccaccccactccactccacccaagcctactagttataaacctgcagggcacaccccattttagggtggatccactgggaaggtaaacttgagcttgtctccactggcagtggttcagattcacttagatcacccatcacattacccagattttgaaagatgctcattatgggccacaaatgtaattcttatcctctttttagaaattgtgtgctttttgacatatatctatgcaatccccatggaggctctcccattattcctgtctcttgagaatccctgccttacatgatcctccaaattttgaagttaatgcaggtaatatagcattattgtgggttctaccatttgagcatataaatcatatgcagatattaactattcatatatttatgtagtttaaatgaaaataatttgaatgtttaatactcttcccttcttcaattgtagaaacattacccttttgcactatctcatcactattgtggaaaataagtaccccagtgttctcaatctaaatgaagaattgcgagatattcctcaagctgcgaaagtaaagtaagtacttacagtgagtgttagtttcttaaatcacttggattgtgtgttagccattgaggtagtttgcactgcatgaagtcagtccttctatttgttttcccctgatcattgtatgaaataaagtttgaatctcatccaagtcactcaaatgtattacaaggttttgaatatatgtttgttctagcttctttggaatactgcatgcaatttttaactttcatacttttaaagggcaggtgttttaaatacaggtaggagcaccttagttaaataaagatgcatggctaagcaaatagaagacctaagtgtcagaacattgcaataattttcacatatgcacacatactcccagaaaccaaggcggctctttaatgggaagcattctttatgcaaatgaagaaactaaaaataaaatggaaagttgccaaacttttaccacaaacttcacaccacgtttcagagactgagaagcaggcaattttccttgctgtttttccctccctcttttggctctttttttaaaacataaactgcatctttttgcagtgaatttgaaaagtataatgagcaggctcattttttccctctgttcatggaatctggtggaaatatactaaataaggcatgaaattaaatgaagtattggtgagtttctttatatgttgtaaattatctgggagaattaagtttcaatctctaatgtttaaaagccatgaaatagaaagtgttgtgtatgggagaagcccaagaacctttctctattaaaaaaaagatgaaaataaaaactagttaatacaactttaagaaaaatcatttttgattgcaacttaagccattaccttgtaatagtcatattattggggccttagtgaaaagcagaacactgattatacagagtacaatgtgaacatgattgcagatgaacttgttttctttctgttttcaaagggagccaagtatggcaagagatttatttctacatgaagtaatttgctgaagtgagatttttttgagtttgaaacataaaatatttttgtacagatggaagatatttctattctatttttaacctgtaaaatatacctgctggctacagaaaacaaacataattttatacctacatttcatgagtttaaaatactgttgtctttctttgagatctgagcatggaagggaattttaaacatttaaattaaaataggatggacttccaagcgtgaaatatttaaacccatcttatatttaatatgtgtaagtcacatgttgattgctaaaacattgctatttacaacagcatgactgagctggacaaagaaataagtaccttgagaagtggcttgaaagcagtagagacagtgagtatttttttgttgttgttctaattcctggtctcttcactatctctagtgctggtggttttcagcagatgggttgtgttggcatgtggtatgcccgggataaacatttattgattaaaaaataagaaccaccaccacaagaagcaaaggcaggttatgttcagcctggcaacttgattgcaggcagcaggggtcgtggataagtcactgcagcaggaactggaaactggacctagtgtgccaccaatttatctgtaaggcaggattcatcaggatgagtgggctgggctagatgatcttcagggacgctctcagtttccaagtgctgctaatatatggtgttcactttcggtagagcagtagaacttctctgtagaacttctcagttgtttttgacttggtcctttggggagtatttactaagcagacagtgtagtacatgctctagctgagggtcacgatgactcagaatccttgtcctccaggtgttgcaataatcggagcagccacttccctcagcctggccgcatccagataagcagagtgattacggaggtgccttaaggaagcagcgggttgagggtgctttggaggcatgaggaacaattggcccctattggaggaagcttctcttttggaaaagaagttgtttgagctatggcttaagagggtagggtaaacttaggtgcatagagggaggttatcccaggcatacaagacaacctgggcccaggcctctgaggaaggaaaaccagtcaggctggcagactggacctggtaggatgaaacgtgcctgttggcacagtgccctgcgggtactctgcagatgcagctgccagcgagagagggggcagggatgagaacaggctggcagagtagcgtccctggtgtctgtgctcaaagcagccatagcttgggcctgctctgggtgaaggagacggatttgcaggcagcttggaaaggtgcctctcataagtatccttcagatcatttatcagtaatgctgtgaggactctcccttcttttcgtttttgaatcacaaaactgccatagaaagtagttgaattaattaaagacatacctctaataaaaattaaagtcacaatgtctaatttttttttcaataaattaaggagcatgtgaggtttttttcctttttttttttttttaatgtagggagtagggggcagtattaaaaaaaaaattctactgattgaactttttctcccagccccagagggtccatggtcattatgatggccctaaagcctggctctgacccctgcttctgagccaggtcagagcaaggcctggggtggaggcttctggggaaattttgtgttgttgctttattaaaggatagttttgctgaaatcactctatcccttgggtcatatacactgcatcacactttttataggagaggggctatagaagcctcccctacccttggaggtgacgtagtattgtaagaaaatagtgggggcagagcttcgcctggccaaatatatatgtgttctaattgtgctttacacaaattaattatattgtttgaaggtatcaaagatgaatatttatgaaattatacattaatgaaacactttcaaatgcctttcccgtccccacactgaacacagatacactcactttccaagctaaagtactggaatcatggcaatttcttccaatcagtgccagctccataattgatgagttttcacttccgttatttcatttgagtgtagtgatgatgtggatgttgccctcttacaaaaaaaaaaaaaaaaatcaataaactgaggcccagagcaacatgccatggttaagaaccaaatcagtggtagagctgagtcagaactgataaactgtgatgactacgctcctgcttgtgaagatctctgccaatgcaagaaaataagggagaatccagtttaagtcaattggtatacaacatagttattaccaagactctggagtcaggcaggcctgagttcaaattctggctctgtcactggtcagcactacttcagggcaagtaatatagccctccaaaccttaatttatatgtttgtataatgggaatagtgatccctcactcatagggatgttgtgaactttaaataagaatgtgcatctggcaatgattaaattaaccattaacattagatttgaatcatctgcgttcattgctgtgataatggaaatatggataattaacaagagactaattcccctacaggcctgttcacaaaaaccaatatggtatggacaagagaaaaatggtacattatggtgccaaatgctacagccaaaattctactacccatatcccacagtttaagaagtaaatagacttggctgagagggaaagaaaaaaatcaaggcaccacaattctaagcatggaatattgacaagcagagtctcttgttttcactcacaaacccttaaaattcagtttgcccccattatttgtttaacttctattaattttatccaaatgcaaatctgcttgctttctaaagcctgaaagagaaatcacatagatcaagtacttagattgttggtaaattgctatttgcaaatatgcgtgtgcacatgggcatggctttggcatggtgggaggaagggcaggggcactagagtataacaaaatgttttagaacaagttttgatgtgtttgccattctgatttattaaatttaaggcatgtgaaatatgagacgaggtgtgtctcatgtctgtatttgaagcctgcattgacattattcatttcctgtgtttaaggagctggaatatcagaagtctcagcccccacagcccggagataagtttgtgtctgttgtcagccagttcatcacagtagccagcttcagcttctctgatgttgaagaccttctagcagaagctaaagacctggtaagtttcccccttgtgcactgagtgttgtttgaccgggctgggcttcagtgtgatactttcagttattattctgtacgggaaatagcaggagtgagatccaaacttcgtggtgcaggaaataaagtagtagataattactttccagattccattgttttgcatgacataggtgtattttcatttccaagactgtgattaatctgaacacaccctttttgtctgactggcctatgttgcctttaggttagcaagaccttgaaggctctgaatggtataagaccagcaaatactttgacagttttctcttggttgaaactggcttgaagtacttatctctgggaaccagaaaagagtagatgatgaaaaccaggggcagcatcaaatgtgcaatcaggtgttactaaagccatgtgcctaaattacctctatgttgtaatatgctcatctgagatacagccttggaggacaggatactacctgtataaatctccagcagaactcgctaaaagagatgcattttaattcacagtctcattacaagaggtttttttttttttcagtaagacatttatttttatgatttctgctatttcacattttgtgttcccttggaagagaaatttttgttggttaataaccaccacctcttagctccctcagcttcacctcactcctctctatctcaggttgtttcctcttccaaaatgcattcacattcatatacaagacaggtacacagtctctcattttctatcctcttctcattctttataaatgatattaacactcttccccaccccattggttcttttactctacccatctctcagttgccacaacactctgagtcttttgtttcgaaacttctgtaaatggatgttatttttctctggtcacctgtttggttgtagatatggatgattgtttatgtaaatgtacacacataccagttaaagttcaaaagtaggctgttcacatgcattagctaatctcagcattaaaccttctttctaaccttataaaataaatggcaatatatgttcaaatggctgctgtcagaggtccaacctctgatatcccacagtggaaatcagtcaactcatgtcagcaaccaccattcagacctccactgtgaaagcccccatccatgttttatgtatgcctcaccactttagagtttgtgcttcataaaggaagagactccccctgttctgatatcccacctgagcaatatagcacctacttcatcaaggggctcaaacatttttgtgtgtgaactggctgttgtcagcttgttcatcacagtagccagcatcgcgcttctctgatgttgaagatcttctagcagaacataaagacctggtaaattttccccttgcacactgactggggtgtgtgtgtgtagggggtggaactttaatctgggcctggttttctttagatttctaagattttgatatacatgacgtcatgatcactagaattccttgataaaaagatcactcaggatggcttgaagtatgtgaacttgaatgttttagaaatccagttgtagactggctattgctattttgttcataccagaacttttataagttagcatataaacccatggagccaagctagacccctatatatggcgtctgaagaatgttatgtttttgcccaaagaactcttttctaatagaatatttccaaataagtaaacattgaaaacaactcctcagtgaagacagaaatggtaaaaaggacacttttgttacaagtttaaagatatgaaatagtaactgtaaaatatatataaatataagccaatacttgttttatttaaaaataaatgttgaaaatatttaaggtagatggtattactgagatatcagaagaatctaacaatataacaaaggcaagtaaagcaataaaaaaaccaattataagctgtttgggggcactgcataaacacagcatggtctaaatatgaagaaaacttaaaatctggaaaatgttaagtagttgattgggcgtagggaaaaatgtatttgactttgaagctaggaacactatccttagtagcttaggagtaataacattagatccttacagaaggaagtataattttaacaaacaatttgacattgaatattatttgggtagttataataatgctaagactattgaaaacatactatcttgagttatggagataacccctggaagaactaaaaagagactggatatactattgttactgtatacatatatttttatttaactttaaaaatttcttggtattttgcattttggccatttaaaaagattgacactggggcatggtggcatgtacctatagtcccagctactcaggaggctgtggcaggatcacttgtgcctaggtgtttgagtccagcctgggcaatgtaacattgcaataccccatatctttttaaaaaaaaattttttttaaagattggcattgaaaggggttctaaagcaaagaatttggaataaaattgtattctcagtcatacactttgggttgcattaaagattccatactcagttgctgttttctcactgagaccctgaaaatatcttaacaatagcagcattatttgtgattgggaaaagcagctaagaggcactggctcccatttgctttctatattgaccatatggcaccagtaaatgatattaaactacttcaaagacaagttaaaagtacaagtttccctccccctgctgagtttgctattagttttatgtctagggtgctataccctacaatattttgtttttactactgtttagttaataaaaagtcataggaggtcatcatacatgttaagctcaaatgaggtagacaggaataaatggtttcaaaagctgaggagtattacaatttttactttagaaatgattaatagacatgttcagcagctgaagataaatataggctcactaaaatccatcagttatatttgactcagccgggtgcagcggcacatgcctatagtcccagctactcgtgaggcttaagaggaaggattgcccaggagtttttggctgtattttgctgtgatcatacctctgaatagccactaaactccaacctgggtaacatgtaagaccccatctattaaaaaaaaaaaaaactaataacatatgcattccagcctgggcaacatgtaagaccccatctcttaaaacaaaacaacaaaaaaaaactgccgggtgtggtggctgaaacctgtaatcccagcactttgggaggccaaggtgggcagatcacctgaggtcagaagttgagaccagcccggccaacatggcaaaatcctgactctactaaaaatacaaaaattagccaggcatggtggtttgtgcctgtaatcccagctacttgggaggttgaggctggagaatcgcttgaacccgagagacagaggttgcagtgagctgggatcatgccactgcactccagcctgggtgatggcgaaactccatctccaaaagaaagaaagaaataaaaataaatgagcaaacaaaacttacgtttgactcaatctgggctttggtctttctcaagttatttatatttgattgtggaattctcatgaaacattgacttcttaaaaccatctttttcctagtttactaaagcagtgaagcactttggggaagaggctggcaaaatacaaccagatgagttctttggcatttttgatcaatttcttcaagctgtgtcagaagccaaacaagaaaacgaaaatatgagaaagaaaaaggaggaagaagaacgtcgagctcgcatggaagctcaggtgagaggatgattaattgaccaattccacctcctagaagttctatgactgcagcccagtcaaaggtatttagagagcactctgacctggcaggaaggaaggcttcaatgtactctctagaatgctgtgggactttacattggtgttgtttctcttgggctatttaacagtgtatattcaaagccttaaaaaaaaaatctatccacatcctttgctctggaattccatttcttagcaattattttaaagaaataatcataaatttacacaaaaaagggcagcattctttataatagcaccaagctaaagacaacctaaatgtttaccaaaaggggatgagttctaaatgatataacagccatataatggaatatttatgcagtccttgaaagacatgtattcaaagaataatgatacagaaaaagatttctacatgaaatctttttctgttttgttttttaaggtgtgttaatacatatagaaaataatagtggtgtgataaacctttaaaaagttcacagtagtagaattaaagatgtttcccccaccttccttttatctgaattatccaaattgtctacaatgtgtatgtattagttggcttttaataacagtaactattgtgtatcaggtttcaggcttccacagtagacacaagctaagcctttgatataaggaaaatggcctgatgaccatttgctttagttatttggggtctatgtaatagtgataccttttttttaattttcattagcagaaacacaaattgcctcaattgctcttattttaactagaatatcatgcagtttacctagaatctaggtggtgagggtctaaccacaagggagtggttgttttttgttgtccattgctcctgcaatggagaccccatgttccaattccccctttcttgtgatatccaaagggggttataggatgagcatagcttggtgtctggagcattaccatatttcaaggaattgacctctactgcaaacaaaatgcaacattttgacatgtctcaaagaggttatttctttctatttgcagctcaaagaacaacgtgaaagggaacgtaaaatgagaaaagctaaagagaatagtgaagaaagcggagagtttgatgaccttgtttcagctttacgctcaggagaagtgtttgacaaagacctttctaaattgaaacggaatcgcaaacgtattaccaaccagatgactgacagcagcagagagagaccaatcacaaaacttaatttctaattttccatgaatacttttttttagaaagctcattagcagccctctaaagtgactagaacgtttcattacactgccttgcaatccaaacagtggcaattttttccttcatctgtgagtgaatgtgtgaacgtgtgtatgtaaatgtatgtgtgtatatattaaaaaatgtatatagatgtctgagtgttgtctggagacctatacgtatggttaaaaagatttatgttaatgtatgtgctccaaaacctttcgtgtatgcattcacattgagtgtggctcattttctttccccgaacgccatgactgttcagaagcacaatactatctcctgaaagagataagagacattccctagattcaaaggcaaaacagaagaaacaaacaaacaaacaaaaaaagcttgcaaaatattttatggtttccaagcttgatatcctttaaaattattttcattgatggaactggagttgttggaaaaacatagatttaaaatgatttttgatagctgacattgtgatgttgatgtatcacatcagtaataggaccagctttgaatttctgacattggtgtggggatacagtctgtaaatgtttattgagaacatcttgcacacaatttgaattatgtagaatgtcaatcaagtttttgtatatttaaaagttggacatcaattttttcccctgatttcatcaagttatctctgccaagtgctcttgataatttcttcagatttttggaaaaaaacactatataaatgcaatccatgctttttttaaagaacaacattgccagagtatgcttgttctaacaatatagatatataaaccttaaaaataataaaatatctcacccaagacttaaaggaagaattctctgaagggataaagattactaaaaaaaaaaaaaaaaaaaaaaaattaatggggtgcctttttgttatagtttctattttctgttttgtaggacaagctgcattttctgtaaatataggtctggactaaaggatacataaagaatgcacaaaatgtcaacatcagcagagatgcccagatctatttatctctaagtatatttgaagtgattgctgtttatatgttgtcattttaaaattgtgtgtcagtaaagctacctgtaaaatttcagtccaaaaaaataaagctctcagggagacatgaataaaatcaatgaacattagaaaataaaatatagatgcttaccattaacctaccaactcttaatatccttaaattatgtgatatataaagaggactgttacttttttacttttttttttttttttttttttttttggctttgctttatttatttgtagttgggggctaacgttttctcttttctttctattgatcctgttgtggttgggtttcctgtggagagagtagtttgtcctgttgcactagaacattatttactcactaaattgagtttttcagtcaattaacaaatatttattaagttcctactatgtaccaggcatagtagggctacaatggtaagcaagacagagtccctgcccccaaagagcttatattctaatggggatattaagggatgaatagaataccaatgtgtgcactgtacaggaatcatactatttaaaaataatttgtataaactataatgcttagcacagatggcgagttatctgtgctatgtgaaagctgtgaaatagtgctctaagagttgtcaagagctgtggttttacatcttttcctcattgcaaatttagtgactttctacacactatatggaaataaatgactagcaaataaaacagtcataaatacaaagcagaggttgcactcccccaatcccgagttaacccaggtctgcaataacaccatgttaaaggtgcagatagagacttggctcaaaaaggcttggagatgaggaagattggaatataatgatggttttgtctgttccttaactaaagtgcctctatgtatattcttttctatttgtagcaggataaatttggtctggctcagttttggaactgtattttgaaaatggctttgtcttacagtttaaggaatagacaggtggagggaaagtcacataaaggagcaagtttgtgtagctgtccctcttgccccttttaatcatcctcctttgatatggccatcctggtgggcctcctttgccatttccatttttggtttctttccctgaaaactgtgtgcaggtaattccatgtgccattgttgaaaagaaaaaaaaaaaacaaaaaaaaacctactttttagattggtgctggtgtaagtagccacttttctctcttgggtgtgtattttaaactttttttgtttttttaaattaatgccaaaaagaaaatgcataatttgtaaacttaattatatgtcttatatcttattagcttagtagttggaaccacttagtctttaggtgcaagactgttgttagatagtactgagaaaaaaaaagtatgtgttatgagactgtacatgtttttttaaaaatagcaatatgcaataaagagatgaattcattgggtgtacatatatgctttctatgaattattaaaacagtgtcatcaaactgctttgcagtttccaccattgaatttcaattttgcaaattgttcactgaatcggaaatatatacctgtttttaaacttgtacttactggacctagaagaatatagttttctattatggcagcattcagtatgttcaggttatcatatgccac

SEQ ID NO: 1614 - DNA, 1232 bp, Homo sapiens
ttgtgtgagcaataaagcttttaatcacctgggtgcaggcgggctgagtccaaaaagagagtcagcaaagggagatagggttggggccgttttataagatttgagtaggtaaaggaaaattacagtcaaaggggggttctctggtgggcaggagtgggggtcacaaggtgcttagtaggggagcttttgggccaggatgagccaggagaaggaatttcacaagacaatgtcatcagttaaggcaggaacaggccgttttcacttcttttgtggtggaatgtcatcagttaaggcaggaaccagccatctggatgtgtacgtgcaggtcacatggtatatgatggcttagcttgggctcagaggcctgacattcctgtcttcttatattaataagaaaaataaaacgaaatagtggtaaagtgttgggacggtgaaaattttgggggatggtatggagagataatgggcgatgtttctcagggctgcttcaagcgggattaggggcggcgggggaacgtagagtgggagagattaagctgaaggaagattttgtggtaaagggtgatattgtggggttgttagaagaaacatttgtcatttagaattattggtgatggcctggatatggttttgtatgaattgaaaaactaaacggaataagagaaggagaaaaacaagtattaaaggtctaagaattggggaggacctaggacatctaattagagagtgcctaaggaggttcagcatagccttgccagcaaagattatttatttactttaagagttaagagtggcagtttggggatagcaccaggagatatcagctgtgatgacttggagaaacactgtaaactggcagtgtaaacaagagcagggcatgtatgagtagttgagaacagtgaataggagtatgactagacagaagatagtagggatgacaagtttttttgggggcacagtccaagttggtctggtgtctggaatgagactggggcctaataaaaaggagcgtccatacaggagctcaagtgggctgtaccttgtagcattctgaggacaggcctgaattctgagaagagaaagaggtaaaagtattgtccagtcttttttaagttggtggctgagcttggtgaggtgtgtttttaaaagactattagtccgttctacttttcttgaagactgaggactgtaagggatataaaggttttactgaatactaagtgcctgaaaaa

SEQ ID NO: 1615 - DNA, 10472 bp, Homo sapiens
ctgaggcggatgtcgggcaccgatgtctgcagcgtgtacagcctgggtgcgtgtgggcgatgcctgtggtggggccactgccctcccctttcccttctgcagcccctgctgccctcgtccatccacagatagtgccagcccctggatgctgaaaggtgaacagacagaggctgccgctgcctccagggcacataggggctgcagacaagccagacaggagagaggatgggtgaggagctgagggcgtgggaatgtggcccctgagactcctgtgggcaccagggaagcccttcctgccctgaccccaggcacctgcctgagacgctgggcgagggagagggtatgggtctggttctaatttgccagccctgagggctcctgtttggggcccagccctctgcccactgcactttgcctgggtgagagtgacttttctccttgtcacaagagaaagaacccagactgtggtgtggcctggtcacctggctgccagggagtgtcatggtgggaccccagggctgccgtctcctaaggacagagatagtccctctgacctcagtgcccctctgtgtgcaaaagctttctctgggggctgcagtgcaacgcatagatgaagttggcatgtcatccacaacataaagaaacatggcagaggccgtgctatctgctgggtgtagataaacacaaatgtgtggctacacacccactttttttttttttttttttgagacagagtcctgtgctgttgcccaggctggagtgcagtggcatgatctcggctcactgcaacctctgcctcccgggttcaagcgattctcgtgtctcagcctcccaagtagctggaactacaggcacgcgccaccacaccctggattagttttgcatttttttatacagacagagtttcgccatgttggccaggctgttctcgaactcctgagctcaggtgatccgccagcctcagcctcccaaagtgctgggattacagctgtgagccactgtgcccagcatctacacacctacttgtatacctatgtgcacatgtacaaacacagacataaacacacaaatacgcatgtaaatacacactgtgtgcatgcacacatgcactcacaagtatacacacacacacacccacccatgcagacatgtgtgcacatgtgcctgcagaggtgtatacacacatacacacatgtgcatgcaccttcctcacaaggtgtacacgcacacgtacatacatatccatgcaccccctcacacacatatgcacacacatatataaacagatacatttccacacacacttttttcctgcttgctcgatgacatgcattacaagaccttttctcccaccagtattagagttaacatttgtagatcccacaaatcaacttcccttcctgaatggacaaacttagacttgacctcagcatatcaaggctcagaccccctggatggtatctcctgtcctttttaggaagcaggtttgggaccctccacaccgtggggtgttgtgggcaggggcattgcagggtgcaggtgtcataagtgggggtgttgcaggatgcaggtgttgtgagatggaggcattgcagggtgctccccagaactgcacacctgttatcgcagttcacagcgcttgacgctgtccacatctccacatctttttacagctatttctcacttgacctccacggaaacccagtaagcagttagtgtcagccactttacgggggtgaaactgagacccggtagctgcctgccctgggatgaagagggtgggggtgcactggagcagtgttgatccctgggctgtcggactcagagctgctgcctgttcaatgcgccctgctccctgatggagctgatggaagccgagagcgtgctccccactgatgatgggaggatgtccccagaagacgggagagtggaatccccacaggggttgggtggggtggaggcctggagatgctagaacatgagaattctctggcccattggctggtgcctctccctcaggtgtcagcagtgctcctatgctggttgcacctgaccctgcaacacctcagcctgcaacacctgcaccctgcaacactccagcccgcaacaccagcaccctgcaacatctcagccctcaatacctgcacccagcaatgctctcaccctgcaacatcgacactagctcaacctggcaggggaccagaggtactggctgggggtgttgattgcttctcttttctcccttgccagactcagtagaggaagctgagaccgagcagccgcaggaaaaaggtgggttttgccagtggctcaggcttcctctggttatgagctgggccttggggtaacgctgggggaggtgacaaagctgagcacggtgggcattgggtgcggctgtcacccctctgtggtgtgggctgggggcttgggggaggttgcctgaggtgggcctgaacctcccgtccactgtggcactggaggccgtggggtcccgcacttcttccaatgaacatgctggcccccgcctggtccccgcccaagatggagcatcctttccactgcttgggtccacttgtagctgtgggttcctttctcatgacctggagaagctgcagcttgccctctgctctgcctcagagatgggaggccacactgccctcagtgggtggcagaattcagagccttaggttgcaggggcctcaactgaggtccctcaagggtctgctccttcctgaggggctgattgagggagacccttccatctcccctctacagctctgtctcttcccctcacacagggtccgcatggggagagcctggggatgtggacaccccaagagccctcggaagttccctgggaatgggatccattccagtacatttgggatgcaggcaggaggtcccagaggaggcctggaagccagtggggaagggaaggctgttgtaggttttcctgggggagggggtggatccaccctctgccgaagtccctggagcaaatgcgagtgactccagctgcccccaaggccagggtaatagctgggaggggctgtttgcctctgccgggcagggagatttcttagctaatctagtgtagtcaagtcacatttgcctctaaatcatatgtaatttttttttaattccaaggctttacagatgaataaggagacagtttgtagtgaaaatattttttacatgtgagcttgaaacagagagtctatttaaatctagattctttccttcccagtaatgtctcctttcgtcccaggttttccaacaggaaatgcgcttgtttgctcacctctgggagggggctttggctgggaatccaccaaagccagcaggcgccagcaggctgcgtgggcagcctggcctttgttaaccctttaggaactgcgggcttcaggttttcagaccatccaaggtgaaggtggtcacaggagcctggaagctttcccatccttcctgcagggatggtccatttccctgcatggagctgggtacatggctacaacatccctgtcctctgctgtgggtagctttaccaattttgcatagcagcttttgagctgatcagtagctctgactggctgttgaggatttcatggattcctgtaccccatcgaggggcccagtatgctgacaaaaattacatttgtagtcgtagtgctgcgtacacttgggtgcagttagaaggctttgattctttctaaagggaaaggcatctctgagggatcactgagctgacacatagtctcctaaaaccatgctgtcaggtgggcaacaaaggaggacaggagggtgatttcataggagagttgggccatgggcctgtgttttccctgtccccacagtgccggagttcctatgtgctccaggccctgggtttgcattgcacataattctcaagggctcatggcaagccggtagggtggtatcgtctggaaagtgctgcgccggggacacagaggctggggatgaggggaccctgcccccagtggacccaggactcactgctggactctaatctgtctaggtgtttttgtgacttgcagaaatacctccaccttgcctgagcctggagccacaggagaccttgcagaaggtgaagaatgttctggaacaatgcaagacctgcccaggctgcccccaggagccagcgtcctggggtctctgtgcggcatccagcgacgtgagcttgcaggaccccgaggagccctccttctgcttggaagccgaggatgactgggaggacccagaggccctgagctcactgctgctgttcctgaacgccccctgggtacaaggccagcttccgtggcctgtacgatgtggcgctgccgtggctgagcagcgtgttccgcagcttcagcgacgaggaggagctgactgggcgcctggcacaggcccggggggcggccaagaaagctggcctcctcatggccctggccaggctctgcttcctcctggggcggctgtgcagcaggaggctcaagctgtcccaggcccgggtgtactttgaggaagcgctgggggccctggagggcagcttcggggacctgttcctagtggtggctgtgtacgccaacctggccagcatttaccggaagcagaagaaccgggagaagtgtgcacaggtggtgcccaaagccatggccctgctcctggggacgcctgaccacatctgcagcaccgaggcggagggggagctcctgcagctggcgctgcggcgggcggtgggtggccagagcctgcaggccgaggcccgggcctgcttcctgctggccaggcaccacgtgcacctcaagcagcccgaggaggccctgcccttcctagagcggctgctgcttttgcacagggactcgggagccccagaggccgcgtggctctcagactgctacctactcctggctgacatctacagccgcaagtgcctgccccacctggtgctgagctgtgtcaaggtggcctcattgcggacacggggctcgctggccggctcgctgaggagtgtgaacctggtgctccagaacgccccccagccccacagcctccctgcccaaacttcccactacctcaggcaagcgctggcctccctgaccccgggcacaggccaggcgctgcgcggccccctctacaccagcttggcccagctgtacagccaccatggctgccacggcccggccatcaccttcatgacgcaggcagtggaagccagtgctattgccggagtccgtgccatcgtggaccacctggtggccctggcctggctgcacgtgcttcatgggcagagcccggtggccctggacatcctgcagtctgtccgggatgcagtggtggccagcgaggaccaggagggcgtgattgccaacatggtggccgtggctctgaagaggacgggccggacgaggcaggcagctgagagctactaccgcgccctgcgggtggctcgggacctgggccagcaaaggaaccaggcagtggggctggccaacttcggggccctgtgcctgcatgcgggtgccagcaggctggcccagcactacctcctggaggccgtgcggctgttctcgaggctgccccttggggagtgtggccgggacttcacccacgtgctcctgcagctgggccatctctgcacccgccagggcccggcccagcagggcaagggctactacgagtgggcccttctggtcgccgtggagatgggccacgtggagagtgagtgccccagttccttctgtgtgccttccggggccactcgggtcagggcacacctggggtttgtgattcagacacaagcggtggtttttccaccatcgaaagtgctgagtcatggcaaacagcagatgttggcaagcgccctggagacaggcagttcccacgcagggccaggccctctctgccctactgggggagccagctcctcccggtttgcccagggaccatcctgccttgagcactgaaagtcctgcatgctgggaatccctgaagtctgggcaacgggcggtgggtcaccctagacataaccctggaagcgaggcaggctccgctgagctgggacttggggcccctccatgagccaggccctgaacgccggtgcttgtgcccatgttatctgcttgacatctcggcagccctgtgcacctgtcatcccacttcacagaggacgcaggggcgggtggttacccaaagccgcagaaaagtttatgcaaaagcagctcgttgtgcagagtgtgccacgtcccacccacaaatggggcttgtggggtccttgggtggcaggggctgagcatgggaaagtgagcttcaggccagagaagccacaaaagggtgagtggtgtgatggcggggcagctcttggccccgggttagggaagcctctttagtctggggccagagggttgagaagatttagtcaagtaatacgtggtgggtgaggggctggtggtgtagcctgtgtgaaggcccaggggtgagcgagtaggggtgagtgagtgggggtgtgatgggggtgagtgagcagggggtgagtgagtgggggtgtgatgggggtgagcagggggtgagtgagcgggggtgtgagcgggtgagcggggatgagtggggtgtaagtgggggtgagtgagcagggcctatgcagggaggtgcagagttgggcgtgggttggttgggtgctggatggtgagaagctctgctggagagctaagcagggcctggggcctcaggctgtggcttggccttttccctaagggcactggggagccatctgcccaaggaggagtgggggggttcagacccaggcttcttccccagggccattctctgactgcaaggagaccctccagaaacccggcaccccagcccccacagcagcctccggtgggtcctggcacaatagcctgtggcacctcctacgaggccctccccggggtgctgggggattcagacttggaaacgcaggccagggaacgaggatcatgcttccctgtctccccaccccgcgttgaacagtcgaggagaccgggggccaggggacgaggatcatgcttccctgtctccccaccccgcgttgaacagtcgaggagaccgggggccaggggacgaggatcatgcttccctgtctccccaccccgcgttgaacagtcgagaagaccgagggtggggctgataccccacatgcttacttgtggtcatttttgagtcacttttggtagtttgtgtctttctaggagtttggctgttgcgtctagatgatctgatttgttggcatacaattgttcgtagtgttctcatggaatccttttatttctgtcaggtcagcaataatgttccctctttcatttctgattttagaaacttgggtttttaatttttaatttatttatttttattagagatggggtctcgtcatgttcccccaggctggtcttgaatgctggcctcaagcgatcctcccacctcggcctcacaaagtgctgggatgacaggcgtgagccatggtgctcggtctctgattttagtcatttgtgtcccatctttcttttcttggtcagtctggtgaaagatttgtcaattttgttaatatttttgaaaaacccacctttgggtctgttgattagctcttttgtttttccattctctgtatttttacttcccatttccactctcatgtttattattttcttccttttactcgctttgggtttagttcattcttctttttctagtttcttaaggtggaaggttgggtttttgatttgagatttttcttctttctttgcatgtagacatttagagttacacatttccctttcagcactgccttagctgcatcttggaatttttgatatgctgtgctttttttttttttttttagacagagttttgctctgttgctcaggctggagtgcagtggtgcaatctcggctcactgcaacctctacccgggttcaagccattctcctgcctcggcctcctgagtagctgggattacagacatgcaccaccacacccggctaatttttgtatttttttgtagagacgggggtttcaccatgtttcccaggctagtctcaaactcctggactcaagcgatcctcccgcctcggcctcccgcagtgctgggatgacaggcatgagccattgctctggcccgtgctgtgcgtttgttttcattcttctcaaattagttttcagtttccctgatggtctcttctttcactcactggttgtttaggagtgtgtcatttccacatatttttgactttcccaaatttccttcactgttgatgtccagtttcacgccagtacaactgaagaacactcctgctttggtctcagtccttttccattcactgaggctcattgtggggcctggcacgtggcctgtcttggggaatgtcccatgggcgcttgagaggactgtgtattctgccgttgttgggtggcgtgtgtgatagatgtccactcggcgtacctggtttctggtgttcatctccggaatgttgctgacactagaaaatcagcagctttccaccgttcccagcgccttggctttgggagaggcccgtgagcctgtgggtttggagcctggctgcacgggaggagcacgtgtgggaatgccaggggccggctttgagccccattcccccaacatgatgccgtgtgtggcagacgtgacatttggttttgctcccccagggttccatctgcgacaggggctacttgtgtccctggcctcgtcagctcgggctgaaggcggccctggtcctggccagaggggctttgtgaagcagaaatagatggcctggtgcaggggccaagctcggctagggcctcagccctgggagttgtaaagaaggccggcctctaccatgggcatctgcaccaagctgtgcccatgtcacggtgtgctcagcggttccccgcctgtggggcccaggctcacagaggtgtgaaagaggcaagcacaccgcaggggcctctgagcccagccagcctcgcttcaatgctgggaggctgacgtcttcctttttgtcttctgcccaggccagctgcgggccgtccagcggctgtgccacttctacagcgccgtcatgcccagcgaggcccagtgtgtcatctaccatgagctccagctctccctggcctgcaaggtggccgacaaggtgctggaggggcagctcctggagaccatcagccagctctacctgtccctgggcaccgagcggtgagggctggctctgtggtggtgggggcggggggagggggcaaagggggcggcggggcgggggcacagggaagctggcccagggccccagcagcccctctccttgggatcatttggttccttggcatcggatgctctgagctggggggcctggggttgtcccagggctgctgatgacccgtgagtcccagcttgagcttcccttgttgggtgacacgtcttcccatccctgcttgcacacctccccaaaggtcatctcaaccccagcagaagcagttacatgcattctgggctgttcttcctacctggtggcttttgtcatctgacctctgcctgccccgagtcttcactcctggccttcacctgtccccttaaatgtgaccacagcagccacctgtggcttctctcccacagaagacagagccagttgtgtcacctgcttccctggggcagggtttcaaggtctcacatcccacatgtggcccacttggctctcctggagcatcctgacctggtggggtaaccatggccctggccaccccacccacagggcccagtgacattgctgcactcacaccccttcgactcaccaagagagcagggaaggagccggattccacagggacccgggagatcggctccagccttggcctcaggttcacagcaggaaaatgggccagtgtgttagagccatgttctcaaagtgtggtccctggaccagcagagcagcatccatgtcacctaggagcttgtggcaagtgggagttctagggcccgccccaggcccgtggagccagaagctctgggggcaggccagcaagctatatggacaggcctctggatgactgtgatgcctgcgcaccttgagaaccatcggcctggatagcatctgaacactgatggctcctggtgcgtctagagaagacacaggccatgtctgggacgcgggggagatggactagcacgctcccccagccacagggcagcatgatgcccagttccctcagaaggatgtccttcgtcttttccttgccgtgtgtgttcaaccccaccctctcagcagcccgggaagggcaggacactgcacacacaagagggccgttcccagtcccattccagattcatctgtcaccagacccacgggaggaggcagactggttccaggaggatgacagcccttgttctgacacctgtgtctgataccagggcctacaaatccgcactggactacaccaaacga

SEQ ID NO: 1616 - DNA, 10378 bp, Homo sapiens
gtgggctcttaggatcccccaggaccccatcaacgatgccatgggtggccctgtgatgcccggcaacccgctgatgggtaagtgtttccatgggcctctcttttttggggaaatgtgtgtgctagggagcagcaccaacattttggaagttgccctacatcctccctgagccagagagatagctatcaggtagtgcaagagtaattgtggtttttgttattgctttcaatggcaaaaaccgcaattacttttgtaccaaccgagtcttctccagcttgtgaggtcataactgacactcaggaagctctgggggctggtgcagcgtcataggatgctcagtgaagctgcaccagggcccccggccactgtctccaaagagctcccaaacgccacttctcagacggtgcaacccaacagtctcagagtctagccttctgtcaccatgggaaacgcctggaaggccctgggccgaggtgggctggcgctggctgaatttgccacgtgcactaacagaggaccgtgaccgcgtcctctttatgaaaagctggcactgccagcagcccttctccttggatgccgggtccagcgctttgtgctctgtggcaagctgccggtgtctggatggcctgtgcacctgtcagagctgccggtgtctgggtggcctgtgcacctgtcagagctgccggtgtctgggtggcctgcgcacctgtcagggggactaaagccccatgcaggagccgggtggggagtaggtggggccgggggttgtggctgcagaaggaaaggaggaaagagccttggccttggaggctgatggccgaggcttatttatcaacatctctgagcctccatttttctcatcttcaacagagggataaaaacatcccctctgaggaccacgtagacattccctccctcattgcggaaaccaagctttactacgaacctcctagtaaccaaaagatgaattccccatggttcagggtggctggcatcggccctgtctgcccgctctggcccccatttggtctccctggcactcaccatgtggctttcttccgcagctgtgggcctggcctcggcattggcagacttccagggctcggggcccgaagagatgaccttccgaggtggcgacctcatcgagatccttggggcgcaggtgcccagcctgccctggtgcgtgggccgacacgcagcctcgggccgggtggggtttgtgcggagcagcctcatcagcatgcagggccccgtgtccgagtgagtggctggagccccgcccctttcctgaacccacccccatctcacctaaggggacgttgccgcgtccacctggctccccaggtaacaagcctgaaagtcactgtggacgatgcctagtctcttcccttgtcctcaggctgctgcccccttggccccagtgcctgactccagggttccctggcgtcctttctccgggctgctgcagggagagcgttccctcgaatgcacacctgcccatgtgcatcatctttccgtggctaccgtgataaggcactgcacgccgggggcttaaagcaacagaaatgtgcttgttcagagttgtggaggccaaaagtctaaaaccaaggccagaagggccacattttctctggagactctaggggagggtccttcttgcctcttccagctcctggtggccgtgggcgttccttgacctgtggccacatcactgcactctgccgccgtctccacgtggctgtcttcctctgtgtgtcttccgtattctcttcttaaaagggtgcccatctcctagcgcccatccaactccaatctgacctcatcttagctgaactaattacatctgcaaagatcctttctccaagaaagcttaccttctgaggttccgggagacatgaattgagggacacgatttaatccagtacacacgtcgctctcctccgttaagccccaggaagcttctgggcccgaccttgcaggcccccatgggctgcacagagtaccttgtgccttccaaaactgctctgggtgacacgtgtgtccttctgcccgggatgccccctctccctgaaccccgtgttctcctggggccttccatcagcccccgtggctcctctgggggggggcactcttctggccatacgcctcttcctatgtgatttacacgccacccatgacctgcctgctcccagccagggaactccaagagaagaattccctggtcacttctgtgttctcactgcccagtgcgagcagcagcagggggtctttggagaggagtcagctgtgcccatcctttgatggaattctgtttccctggccttgtccttgttaagacctcagtcaaggagcccagagaatgtgggtgcatggagaggccaccttctgggtcatgtgatcctggtcctggccccaccaatgagatgcttgtcttcaatggtcctgttcaatgtttagggctgcgacagaccaacacctctcagaccaggtctcagaggccgtttgtcaccatgcctcatcaagccgttcacttgttcccctcatggaaagggtccgtctgctctggtacctctggcacctgtgcatcagaagcagctggaagctggccaggccatgcactgatggcaggagctagaccagcagttcccaaagcatgttctcacacactgctccatcatagacttcatcatgccctaaggagtggggaaaagctttgtccacatcccttgtgggtgatcccagggattcccagcacaaacaaggcatctttttcctgttgaaatgccttttccacacttacttaacctccagaatcctccacaaccctgtttgcttttggctgagctggtgttccatgggacactctttggggatccttggtctagctgatccctaccatctccaagggagaccacaaattctcaacaggtcactgggggccgtgtgaagtcaacatgtactgaacttacaaggggtcagagaagagccagggaatgagctagtttgttcccttcctttaacccagaaggatgacggggctgggtgccattagtcctgttcacagctggagaaattctgacttctctcattcactcaacaaatgtttgctgaatatctttcctattccagacccggggttttcatcttttatttagtgaacaacctggtagctcttctttttttttttctttaactttatttttgacacaatttcagacttagaagaaagttgcaaaaagagtataacattcccacacgccctcacccagattgcacaaatgttaacatgttatgacatttgctttattgctttctctctttcacttctatttttttctaaacactttgagagtaagttgcaaacatgatgttcctttacccctaaataatgcagtatgtggttcctaaaaccaggacatctgcttacataactacagtacaactgtcgaaatcaggaaatgaacgcagatacaatgccattatctacagatcttactcagattttgccaggagccacaatgatggcctttgtagacaatgacaatttcagaccacgtgttctattcagacgtcatgtcttgcctccttaatgtgaaacagcttttcagtctttttttgatgtttttaaagaatacaggcctgttattttgtagaatgtgctgtaagctactctaagtttttttaaaatctgaataagatgcatttcaaagcttcatattatactggtaatttagtcctataagcaaaaattgcctcctttctcctcccctctctccctctctctctgtttcttcctgtagttcttctccctgactttatgagagtgccctgagtgtatgttgggcactctggggagcactgaggttgtacagaatcagtgggagtttacaatgtggagagattggattggttctgtctgcagctgtcacaggggacttcataagggaggggacatttggaatggggctttgaaggctgcctaggagctcactgtcctaggacaccattacttgtttgcatctgtttcagcctttcctgcttctgggtatctgcccctggccagacaaggcaccccttgaggtcaggatctggtttttttttttttttttttttttttttttcagacaaagtcttgctctgtcacccaggctggagtgcagtggtgtgaactcggctcactgcaacctcttcctcctctgttcaagtgattctcctgcctcagcctcccgaacagctggaattacaggctcatgccaccacgcctggctaatttttgtatttttgtagagatgggggtttcaccatgttggccaggctggtcttgaacccttgacctcaagtgatccgcccacctcagcctcccaaagtgctgagattacaggtgtgagccaccatgcctggactttttgttgttgttgtcgttgttgtttttaaatctctgtctctacccctgggcagagagtagtgctccgagactatctgtctgtcaaatcaaggaatggaaatgtgcttagtgtgaaatgctgactttgcaaatatgttgttttgaataaagcactttattttttccaggttggaaagtgcgatttttctcaatgaggaagaaaagtcattcttcagcgagggctgcttttctgaggaggatgccaggcagttgctgaggcggatgtcgggcaccgatgtctgcagcgtgtacagcctgggtgcgtgtgggcgatgcctgtggtggggccactgccctcccctttcccttctgcagcccctgctgccctcgtccatccacagatagtgccagcccctggatgctgaaaggtgaacagacagaggctgccgctgcctccagggcacataggggctgcagacaagccagacaggagagaggatgggtgaggagctgagggcgtgggaatgtggcccctgagactcctgtgggcaccagggaagcccttcctgccctgaccccaggcacctgcctgagacgctgggcgagggagagggtatgggtctggttctaatttgccagccctgagggctcctgtttggggcccagccctctgcccactgcactttgcctgggtgagagtgacttttctccttgtcacaagagaaagaacccagactgtggtgtggcctggtcacctggctgccagggagtgtcatggtgggaccccagggctgccgtctcctaaggacagagatagtccctctgacctcagtgcccctctgtgtgcaaaagctttctctgggggctgcagtgcaacgcatagatgaagttggcatgtcatccacaacataaagaaacatggcagaggctgtgctatctgctgggtgtagataaacacaaatgtgtggctacacacccactttttttttttttttttttgagacagagtcctgtgctgttgcccaggctggagtgcagtggcatgatctcggctcactgcaacctctgcctcccgggttcaagcgattctcgtgtctcagcctcccaagtagctggaactacaggcacgcgccaccacaccctggattagttttgcatttttttatacagacagagtttcgccatgttggccaggctgttctcgaactcctgagctcaggtgatccgccagcctcagcctcccaaagtgctgggattacagctgtgagccactgtgcccagcatctacacacctacttgtatacctatgtgcacatgtacaaacacagacataaacacacaaatacgcatgtaaatacacactgtgtgcatgcacacatgcactcacaagtatacacacacacacacccacccatgcagacatgtgtgcacatgtgcctgcagaggtgtatacacacatacacacatgtgcatgcaccttcctcacaaggtgtacacgcacacgtacatacatatccatgcaccccctcacacacatatgcacacacatatataaacagatacatttccacacacacttttttcctgcttgctcgatgacatgcattacaagaccttttctcccaccagtattagagttaacatttgtagatcccacaaatcaacttcccttcctgaatggacaaacttagacttgacctcagcatatcaaggctcagaccccctggatggtatctcctgtcctttttaggaagcaggtttgggaccctccacaccgtggggtgttgtgggcaggggcattgcagggtgcaggtgtcataagtgggggtgttgcaggatgcaggtgttgtgagatggaggcattgcagggtgctccccagaactgcacacctgttatcgcagttcacagcgcttgacgctgtccacatctccacatctttttacagctatttctcacttgacctccacggaaacccagtaagcagttagtgtcagccactttacgggggtgaaactgagacccggtagctgcctgccctgggatgaagagggtgggggtgcactggagcagtgttgatccctgggctgtcggactcagagctgctgcctattcaatgcgccctgctccctgatggagctgatggaagccgagagcgtgctccccactgatgatgggaggatgtccccagaagacgggagagtggaatccccacaggggttgggtggggtggaggcctggagatgctagaacatgagaattctctggcccattggctggtgcctctccctcaggtgtcagcagtgctcctatgctggttgcacctgaccctgcaacacctcagcctgcaacacctgcaccctgcaacactccagcccgcaacaccagcaccctgcaacatctcagccctcaatacctgcacccagcaatgctctcaccctgcaacatcgacactagctcaacctggcaggggaccagaggtactggctgggggtgttgattgcttctcttttctcccttgccagactcagtagaggaagctgagaccgagcagccgcaggaaaaaggtgggttttgccagtggctcaggcttcctctggttatgagctgggccttggggtaacgctgggggaggtgacaaagctgagcacggtgggcattgggtgcggctgtcacccctctgtggtgtgggctgggggcttgggggaggttgccggaggtgggcctgaacctcccgtccactgtggcactggaggccgtggggtcccgcacttcttccaatgaacatgctggcccccgcctggtccccgcccaagatggagcatcctttccactgcttgggtccacttgtagctgtgggttcctttctcatgacctggagaagctgcagcttgccctctgctctgcctcagagatgggaggccacactgccctcagtgggtggcagaattcagagccttaggttgcaggggcctcaactgaggtccctcaagggtctgctccttcctgaggggctgattgagggagacccttccatctcccctctacagctctgtctcttcccctcacacagggtccgcatggggagagcctggggatgtggacaccccaagagccctcggaagttccctgggaatgggatccattccagtacatttgggatgcaggcaggaggtcccagaggaggcctggaagccagtggggaagggaaggctgttgtaggttttcctgggggagggggtggatccaccctctgccgaagtccctggagcaaaagcgagtgactccagctgcccccaaggccagggtaatagctgggaggggctgtttgcctctgccgggcagggagatttcttagctaatctagtgtagtcaagtcacatttgcctctaaatcatatgtaatttttttttaattccaaggctttacagatgaataaggagacagtttgtagtgaaaatattttttacatgtgagcttgaaacagagagtctatttaaatctagattctttccttcccagtaatgtctcctttcgtcccaggttttccaacaggaaatgcgcttgtttgctcacctctgggagggggctttggctgggaatccaccaaagccagcaggcgccagcaggctgcgtgggcagcctggcctttgttaaccctttaggaactgcgggcttcaggttttcagaccatccaaggtgaaggtggtcacaggagcctggaagctttcccatccttcctgcagggatggtccatttccctgcatggagctgggtacatggctacaacatccctgtcctctgctgtgggtagctttaccaattttgcatagcagcttttgagctgatcagtagctctgactggctgttgaggatttcatggattcctgtaccccatcgaggggcccagtatgctgacaaaaattacatttgtagtcgtagtgctgcgtacacttgggtgcagttagaaggctttgattctttctaaagggaaaggcatctctgagggatcactgagctgacacatagtctcctaaaaccatgctgtcaggtgggcaacaaaggaggacaggagggtgatttcataggagagttgggccatgggcctgtgttttccctgtccccacagtgccggagttcctatgtgctccaggccctgggtttgcattgcacataattctcaagggctcatggcaagccggtagggtggtatcgtctggaaagtgctgcgccggggacacagaggctggcgatgcggggaccctgcccccagtggacccaggactcactgctggactctaatctgtctaggtgtttttgtgacttgcagaaatacctccaccttgcctgagcccggagccacaggagaccttgcagaaggtgaagaatgttctggaacaatgcaagacctgcccaggctgcccccaggagccagcgtcctggggtctctgtgcggcatccagcgacgtgagcttgcaggaccccgaggagccctccttctgcttggaagccgaggacgactgggaggacccagaggccctgagctcactgctgctgttcctgaacgcccctgggtacaaggccagcttccgtggcctgtacgatgtggcgctgccgtggctgagcagcgtgttccgcagcttcagcgacgaggaggagctgactgggcgcctggcacaggcccggggggcggccaagaaagctggcctcctcatggccctggccaggctctgcttcctcctggggcggctgtgcagcaggaggctcaagctgtcccaggcccgggtgtactttgaggaagcgctgggggccctggagggcagcttcggggacctgttcctggtggtggctgtgtacgccaacctggccagcatttaccggaagcagaagaaccgggagaagtgtgcacaggtggtgcccaaagccatggccctgctcctggggacgcccgaccacatctgcagcaccgaggcggagggggagctcctgcagctggcgctgcggcgggcggtgggtggccagagcctgcaggccgaggcccgggcctgcttcctgctggccaggcaccacgtgcacctcaagcagcccgaggaggccctgcccttcctagagcggctgctgcttttgcacagggactcgggagccccagaggccgcgtggctctcagactgctacctactcctggctgacatctacagccgcaagtgcctgccccacctggtgctgagctgtgtcaaggtggcctcattgcggacacggggctcgctggccggctcgctgaggagtgtgaacctggtgctccagaacgccccccagccccacagcctccctgcccagacttcccactacctcaggcaagcgctggcctccctgaccccgggcacaggccaggcgctgtgcggccccctctacaccagcttggcccagctgtacagccaccatggctgccacggcccggccatcaccttcatgacgcaggcagtggaagccagtgctattgccggagtccgtgccatcgtggaccacctggtggccctggcctggctgcacgtgcttcatgggcagagcccggtggccctggacatcctgcagtctgtccgggatgcagtggtggccagcgaggaccaggagggcgtgattgccaacatggtggccgtggctctgaagaggacgggccggacgaggcaggcagccgagagctactaccgcgccctgcgggtggctcgggacctgggccagcaaaggaaccaggcagtggggctggccaacttcggggccctgtgcctgcatgcgggtgccagcaggctggcccagcactacctcctggaggccgtgcggctgttctcgaggctgcccctcggggagtgtggccgggacttcacccacgtgctcctgcagctgggccatctctgcacccgccagggcccggcccagcagggcaagggctactacgagtgggcccttctggtcgccgtggagatgggccacgtggagag

SEQ ID NO: 1617 - DNA, 4446 bp, Homo sapiens
gtgcggaggaagagcagactgcgggaccccggcctacagcagaccctccggggccagctccgcctgctggagaatgatagccgggagatggcccgcgtgcttggggtgagtagccctctggggcctgctcagggatgggagctggagtcagggggagggaggggctgaggtgcagtgtctgagaccggggacacaggaggcaggcctcagagagcgagagccactcaggacagtggtggccttggaggggcggctgtgatacccagtgggtggcgagggcttgtttctcccacttgctttgtggagggcactgtgaccgtccctctgctctcccacagccccagcaacaggggacctcgagctgtccctttctccacctgccctccacccacaaggactgtcaaagtctctttgatggggagttaaggacaagtgtgaagttagtcttattttttctggtgacaaagccagcctcctgtgggcttctgcacataccagccttctggggaggctggcacagggtgtgtcttgacctggcagacctccccatggctgagggctgggggcttgggagctgggctgggcgttaccaccactgactggggttggaccagcctggccttggccggtgcctcttagcctctgtgaactccgcttcctcagccacatactggggatgcttagaattacgtccccgggagctgacttgagggttatgtgattaactcacaccaagcacctgcaggctgctggacacatagtacctgctcaacatgtggggctgtcgtgcatgatgtcgggcacaggtgaactgggtcagcatgctggctccgggtttgaatctcagctgagccactgacaggtctgaccttgaataagaaatggggccttcagcgggacatggtggctcacacctgtaatcctagcactttgggcgaacgacgaagaaggatcacttgagcccaggagtttaagaccagcttcagcaacatagggagacctcgtctctacaaaaaaatttaaaaagttagccaggcgtgatggtgtgcacctgtgggagagtaaaatgggtggattatctgagcccaggaggttgaggctgcaatgaaccatggttatgccactgcactccagcctgggcagcagagtggggcctcatctctggaaaaaaaaaaaaaagaaagaaacggggccttattttttgtctctgaaatggagactctaatagtaccccccgacacacacttcccgagtcggaagagttccagtgttagctgctgttattttttcatgcccctatcaacactgattaatagaaatcagaggagaggggatgctggcggggggatggaaatcagagctgatgctgcaggtggggctggggccactcagggctgagagcacagccgaacagggaccagcttaggttgggagaagcggcggtcactggtgtgtgggggataaggcaggtagagtgctgagggggaggtgtagagggtgaggagccagggcatgggggccacgtgagctctgggaagggcaggggcttctccccacaggctctggggagccacggctggcttgagagcaggggaggagctgacttgggctgtgaaggaatctgccctgggtgtgtcgtcccccgccggggccacatctgcaagatgtctctgtcatgtggacgctgtcctcctgacagatgccccagagctcctggggacctctcgaattcctatttctttctcttaaggaattatcagccaggctgctgtccatccacagtgaccaggaccggatcgtggtgacgtttaagacttttgaagaaatctggaagttttccacctaccatgctctcggtaaagaggtgaccctcccagaattggtcatggggacgcccgtcggaaggtgctggttacacaccgtgcacttagattacaaattggtgctttgtttatttatttattgatgtattgttttaagacgaagtcttgctctgtcgcccaggctggagtgcaatggcgcaatcttagctcactgcaacccctgctccccgggttcaagcgattctcctgcctcagcttcctgagtagctgggattataagtacgagctaccatgcccagctaaattttttgtatttttagtagagatggggtttcaccatgttgaccaagctgatctcaaactcctggcttcaggtgatccgcccgccttgccctcccaaagtgctgggattacaggcatgagccatgaatctgtgctttagaacaggcaggctcacaaaggcctcactagcaagataacaacactggtgtgcgcacctggtgctcagggagaaatgccgggtaggcggagtcgtagacggatgtgggtctttgttgcaggaatgatttaggctgtgcttctagttgccttcacactctgccctctgtaatttcactcaaccagaacttgagggaagctgccgtccagtggcctcagtgctgaccgggaaagctgttatttgaaagctgacccacgtgagctcttcctggcacattccctgttccatttggaggaattccaggctctaacggagcctccctggggatcttgcgacaccacccttgatttgagggctaagtgagttagggagtaagaattgtagccacaattccccaagcaccggtgagcagggctgaggctcatcccactgtggacgtgggcttcttgatccggttcttggaggaagtggctcatctgtggctgcccatccacagtgatggccattgtggggggatgtccatccagagggcagcaggcttcctgtctccctctttcagagtccactctacgctgagtgtggaggcaggattctcacatcacttgcctgtgccttacacgtgcaccgagcctcctagttcagctgcggtgaacgaaggctcactgccccagacgagaggggggagctcgcagcatcccagagacaaggcttcacctgatagaaatggaaacagataccagctcatgatgcggggcggggcttgcacatgggcatttcagacccaccttgctgctggcccataccccctgcggcctgcacggcccccgaccatatggtctccctctcacagaggggaatatggaggcgtggagaggtcagataacttgaccacggttgccgctggtgggtggtggagctgggcttgacctctcacagcccgggtggtcaggccgtgggctgctgtgtgtagccagcactgtgggcaccccagggcaggtgggtgtcttccatggtctccctggacctggtcagtgcagggctcagccgacctgggaccacacaggcttccctgcctccctgcccctcttctggagccctcgggtgactgggcctggactccacaggcttcactcatcactgcctggcaaacctgctcatggaccaggccttctggctgctcttgcccagtgaggaggaggagacggccatccaagtccatgtggatgagaacgccttaaggctgacccacgagagcctcctcatccaagaaggtgagcgttgcatggggtgatggccgagatccagctgtgcggggcactcccgggccatggggtgacagcctggatcccgctgtgctgagcatgtctggggctgtgggctgcggagcctctggaggctgaggggtgcttcaggcagggaggtgtgcttggtgtggcactgtcacttagctctagagaccctggccagcccccagggacacagaggtgcctgggaaacagtggaagagaggttctgtctagtgccagtccccagctcgtgtctctgacatggctgctgccctggccttgtggctggccgccgagtctgaggaggggacatgaggctgtctttcctacccgaccacagcaggagggggcctgccagcagtggctggggtcactggggcagtccatggagaagggccctggggggtcccacgtttggctccgcatcgcacagtcagggaaactgaggcccagggcgagggtctgaggctgagccagcctcacacaccacatggaggcagagctgggacctcgccctgggcccacctctccttctgagcccctttgggtctctgtgcctgcagacactgggggggccgctcctgtgggtgttgccttcgttgtctgtccggcaggggtgtggggggcagggccacagctgcgcccagtccggccaccctcagtgaccacctccatccttttgaagggcccttctttgtcctgtgtcctgaccaccatgtgagagtgatgacgggtccccgggatgcaggaaatggcccccaggccctcaggcaggcttcgggggcaccccagggagaggcggccccggaaacagactcttcaccgccgagccccagcgtgtcctccgaggaggtggcagtggcggccgccccggagcctttgattccatttcatcagt

SEQ ID NO: 1618 - DNA, 406 bp, Homo sapiens
gcggtgggtcaccctagacataaccctggaagcgaggcaggctccgctgagctgggacttggggcccctccatgagccaggccctgaacgccggtgcttgtgcccatgttatctgcttgacatctcggcagccctgtgcacctgtcatcccacttcacagaggacgcaggggcgggtggttacccaaagccgcagaaaagtttatgcaaaagcagctcgttgtgcagagtgtgccacgtcccacccacaaatggggcttgtggggtccttgggtggcaggggctgagcatgggaaagtgagcttcaggccagagaagccacaaaagggtgagtggtgtgatggcggggcagctcttggccccgggttagggaagcctctttagtctggggccagagggttgagaag

SEQ ID NO: 1619 - DNA, 286 bp, Homo sapiens
  SITE (233): n equals a,t,g, or c
gctggttctgtataccaggcaaaatatgatgttctcagattttagtacttttgccagtctggcaaatatgagttagcttctctttgtagtcttaatttccattccccttaatcttaacgatattgaatattttatatattttctgtttcaagtgaaatgactcttcagattttgttttccttttattctttttggcccattctattggattgtttgtcttttacttgtaattntgtggtttctttatatattctagactctaatgctttgtcggttatatgtattc

SEQ ID NO: 1620 - DNA, 459 bp, Homo sapiens
gctggttctgtataccaggcaaaatatgatgttctcagattttagtacttttgccagtctggcaaatatgagttagcttctctttgtagtcttaatttccattccccttaatcttaacgatattgaatattttatatattttctgtttcaagtgaaatgactcttcagattttgttttccttttattctttttggcccattctattggattgtttgtcttttacttgtaattttgtggtttctttatatattctagactctaatgctttgtcggttatatgtattccagatatcttctaaatttagtttcactttttatttactttatgaatattttgagcagaagttctttattttaatatgctcattgatatattttggggggatcttcctttaaaagccttctctgtgctgtaggcataacgatattctccatcattacagcagttgaaaattatt

SEQ ID NO: 1621 - DNA, 459 bp, Homo sapiens; identical to SEQ ID NO: 1620

SEQ ID NO: 1622 - DNA, 1081 bp, Homo sapiens
acgtgctgcagcgccccgagcgggcccggctgagcgagaacacccggctggccacccgctacgccgtgcgcatcttccgggagtacctgagcgagaaggcgcagagcccggacttcgagaccatggacaagggggcgctgtgccgcgtgctgcgctccttctatgccgaggcccgctccaaaagcggccagctctacagcaagtcgtcgctcatcagcatccgcagctccctcaaccgctacctcaatgagcccccgtactgccgcacgctcgacctcaccaaggaccccgagctgcgcagcgccaacctgacgctggccgcggtcatccgcaagctcgaggagcagggcgccgggccggtggtgcagaagcaagccatcacgcgcgccgacctgcgcaagctgtacacctccagcgtcttcagcaccaacacgcccttcgggctgctcaacaaggtctggttcgagacgtgcatgtacttctgtacccgcggccgcgagaaccagcgtgagttggaggaggactcttttgggctggccatggacgaggacggtcgcaagttcgtctacttcaagtccctcgggccctaccacaagtcgcgctcgtcgtcgtggagcaagaagcgcgccgagagcagcgacgaggagaacttgccccgcatgtatgagacgggcaccgagttctgcccctacgccagcttcgtcaagtacctgtcgaaacgcaaccctctctgcaaggcgttcttccagcggccccgggaccactgcagcgagggcgatgtgacctggtacgagaacaaagccatcggcaagaacttgctaggcactcggatgcagatgctctccaaggcggccaagctctccaagacctacaccaaccactgcatcggcgccgtctccatcgccacgctcaacagcatcgcgggcattggcaccaagctgggctcgcccgccccgcagggctgctacgccgaggctctgaacggggcggcacggcaccactcccaccacccccccacccatccctcccaccaccaccgcccccagccgccctcgctggggaacacttacatcctccccaa

SEQ ID NO: 1623 - DNA, 1796 bp, Homo sapiens
atagtttcacctgctattgtttcccccacccaggtaaccaaaccaaactctatgcatgaaatgtttctttggtaccacttcgggactaacttttgtgctaatgcagctctgggtaggggggaagttttaaaaagtaggtaatgtactgaatcggatttcgtttcacccttagaagttaactctcttggtgctttttgggaaactttacacctaaccttaaaagatgtgagagagggcatgctacctaacaaatcactgctgtgcagtaaggcgaaaaacttcaaagttcgccgaacaaaaggattagctcactcttgcagccgctcttcattgaatgcatgagttttataaggcaaagactgcgagaacactgtaaatgtaaaggaagcagttacttaagacatatttgaatcaagtaacccttaaaagactctattacgtattcgccatgaccttagaaggtagaaaaacagttataaattattgaaaagaaaacgtgccaatcccacttcctgtagcttttttttttttttttaaagaaaaggggtggagagtggagagccaggcagttgagtgccagtttatactgtaacatgtagttgaatgtaaactggcagtgtggggtgcaatttccataaactaaagtgggaacgtggtatctgcaattccagtcaggctacaaattggagtatgggcctgtggtgcccagcactgtgggcactgaaacattgctgtctccccctagccccacggagctcactatctagggggcagataatacctacgaagtagataattagagtaagagtgctatcccagcagctgagtcagcatggacaaatcacttcacttctccttggcttcactatcctcatcaaagaggaagaaactatttccaccctaacatgatttaagtctaagcagtgccaaattctgggtcgagactggggcctctagtgttagattcttctttccttattttccccaaggtagtattttcgtgagtattattaaagttatattcatgttttggacactctctagtctaggagtcagaaaccaggggtctttggacactgtgttctattctgcaggcaggagtacccactggaggttttacaactttgacctgcctgccatcaagcagaagtaggaattttgcaggtctgaaggtatagtgcaggccctccaggaacatatgtcaggtacctctgtgctttttccaaagtggaaattccagttctggacacactgaccctttcaaacgtttaccagctaatgggcaagcctcaaggccaactgagaaaggggctgcgagtggtaatataaacaccaaagttctctaaaatacacaagacctgtaggctatgtgtcttctgtacttcaggtgtgtagtctatttctgacaggttgtgttagtgaattttaagaatggagaggagaatttagggtttgctttttctttgaaagcaaaaataaatgttcatattcttctgatacagtaaaaacccttgaaatgccctaatttagaatagcacctgattaattaagagttaaaagtctaagaaagtttattaaggcgtgcatggccttgggataacaatgaaaccatttgtctactggcatctgtctgctggtttcttgacaccagtgtaatatagaattgtgacgtaaagaaccacaaaatataagagggtttcgtttcattggttttgttttgttctaaggaatgcagtctttcagtcattatcttttatttacctgagtaaaataaatcagttccaaaaaactgtata

SEQ ID NO: 1624 - DNA, 20029 bp, Homo sapiens
gcgccgtaactgctgccatcttctccgcgctatggctgcgttcggccgtcaggtaagctcgagctgggcgcgcgggcttctccgggtcgcaggcgggcgggcagcgacgcagaggaaccgcggccgccgagtgtttcacggccaggtcgtggagccctcccggaggtccgtgcacgctgacctggttttggcatcctggacccgtggctctgctcaattattgtgggatatagagttgacattttttttttttgagacaaagtctcgctctgtctccaggctggagtgcaatggcgcgatctcggctcactgcaacctccgcctcccgggttcaagcaattctactgcttcagcctcccaagtagctgggattacaggcgcccgccaccatgcctggctaatttttgtatttttagtagagacggggtttcaccgtgttggccagtctggtctgtaacttctggcctcaggtgatccacccgcctcgaactcccaaagtgctgggattacaggcgtgagccaccgcgcccggcctgagttgactgttgaacaagagtttgaacttcacaaggaagataacatgtacttttcattaagaggaagcggaatcagcatagaggtctttaggcttgagcccagttccacgggccgcgcccgctgaccccagcgactgccaggtgttcctggcggagggagcatctggacaggggaggctggagagcagccagagcttgggcttggcagggtggccccagggcgacaatcgatgacgctggagaaggggttgggaccgatgtgaaggttttagagcaggggttccccaacccccggtaccgtcccttgcctattaggaaccaggctgcacagcaggaggtgagcggcaagtgagccagccagactgtatttacagccgctcccttcgctggcattaccgcctgagctccgcctcctgtcagaccagccgccttagattctcactggagcgcgaaccctattgtgaactgcgcctttgaggggtccaggttgcgctccttatgagaatctgatgcccgatgatctgtcactgtttcccatcaaccccagatggcacctcctggttgtaggaaaacaagctcagggctcccagtgattctacattatggtgagttgtataattatttcatcttatattacaacgtgaaaataacagaaataaagtgcacaacaaatgtaatatgcttgaatcatcctgaaacccctcaccagtctgtggaaaaattgtcttccatgaagccagtccctggtgccaaaaacgttgaagactgctggcttagagtgcctggatgatttgtgcatagtttgttaagcaccagcctgaaccactgaagacttttgaggtcaactggaattgtgtatgcaagttgactaattactgtgacccttgaacaacacaggggttaggggcaccagaccgcccccacaccagttgaaaatcagtgtataacgtttgactcctccaaaactcaactactaatagcctactcatgactggaagccttaccgacaacataaacagttaacacatatcttgtatatatatatattgcattctgtattcttaaagtaagctagagaaaagaaaacgttattcagaaaatcataagggcaaaaccccgtctctacaaaaaatacaaaaattagcagggtgtagtgtgcacctgtagtcccagctactcagaaggctgaggtgggaggattacctcagcctggggaagtcaaggctgcagtgagccatgattgcaccactgcactccagcctgggcaacagagtgagacccccgtctcaaaaaacaaaaagaaaatcctaagagaaaatgtatttactattcattaagaggaagtagatcctcataaggtctttaggctgaagaggaggtgaaggagagtttggtcttggtgtctcaagggtggcagaggcggaagaaaatccacatataagtggatccaagcagttcaaacccttgttgttcaagggccaactctgtatcccacaagattcttctcgtggaatgaatttaagaacatgaatctggaaagtagtctgaggtccagacttttctggcacacatgaccaggtggcctagaaatagtttttccctcttcctccatgtccctgctcccatccttaaagctgcaaaagctaacaatattgtacctgcttgactcccatctctgtggccttgaaataccctgttctttgtgagcttccttctctgtaggcttaagttcagataggattttgcagattgcttataaaaattgtatgtttgtgtggaaccaaggcagtaagtactctggctcagaagtcttatggtgtccattacactggaatagtgaggaattaattgtcttttggtcctgtgtcttacaggtccttgattggcaccgcctgatccccctcacctgggcctgtatggctaggcagactcctcatcttggagaacagagaaggacgacagcttctttgttgcgcaaactgactacagcctccaatggaggggtcattgaggagttatcttgtgttagatccaataactatgtgcaggaaccagagtgcaggaggaatcttgttcagtgcctccttgagaagcaggggactcctgtggtacaagggtccttggagctagagagggtcatgagttccctcctggacatgggtttcagcaatgcccatattaatgaattgctcagtgtacggcgaggtgccagtcttcaacagttgctggacatcatttcagaatttattctcttgggtctgaatccagagcctgtgtgtgtggtcttgaagaaaagtccccagttattgaaactgcctattatgcaaatgaggaagcgctccagttacctgcaaaagcttgggcttggagaaggtacaagaagttgcagattttggctgggtgcggtggctcatgcctgtaatcccagatctttgggaggccgaggcaggcagatcacttgaggtcaggggttcaagatcagcctggccaacatggtgaaaccctgactcaactaaaaatagaaaaattagctgggcttggtggcacgcacctgtaattccagctacttgggaggctgaggcatgaaaatcgcttgaacccaggaggcggaggttgcagtgagctgagatggcgccactgcactccagcctgggtgacagcaaggctgtctcaaaaaaaaaaaaaaagattttatatagtgtgacaggagccagaggtggggaaagagcagcctaaggtgagatggattaggggaggtttctgagtatgtcagtgttcctggagaggactgtataatttggcttggaggtgaggaataggagtggctttctgtgcagaatacattttgagagggaaggaggaggagttaagactagaagaaaaaattgagtgccagggcagagactcttgtctgccttgttcaccgtgggatcttcagcacctagtgcagtggtgggcatatggtatgtgttcagtgggttgatgctgataatgtgatgttgataaatatgtgtacatatagcatttgatgtttaaatcaacatgaaatggtcttagtgctctgtctctgtgatgtgatgtcaaaccaacatctcttgtaaagacttagattctagtcgagtgtttagatttactctggaacatgagagatctggccaggttcctgggatactcgtggagtggccttcccttctatttatcccccactcctgcccccaacaatattcacatctcaaggatgctcaaagttccttgaatctctttaagggccttctggaggagttgggggtctccaaggacccttacccactttgaccagaggagttccactattatttctttgcattattgactcttcctggtaagatgttttttgaggcagtggtagaaggtttaggatccaccatttcacagcatctctacaggcctccttctctagaagataagaaaaaggtagccttgtatatttttcttaacagattcttacagtgtaatctaaaagtctaaatatattatgtgtggtggtgattaattagcaaactcagcacagccttaagaaatgaagataaacctaaactgaaattcctcacatattaagataatcactaactcaaatgttaggaaaattttaattaacagtttaaatagttgactttaagtttcccattactgaattttgctcagctatccctaggaaggcctggaatagtcccagtttacaccagttagtgcggttttaatagggcctctttcactcaaggtgccctggcttggagaagatatatggtgaccctggtaaccaggacgtcagcattggtgttgtgtgtcctcatgattactattattgttattactgttatgatgacgatggtgatggaactccttttcattgagttcagcttgagaatgttagttgtgaatgcttcaatgactattttattatagaaggaaacatcaacccaaaccagcaatatggaggaaactactctcccatattactctctgatctttccagtaaatgcctgggaaattcttttccaagtgaggagggcaagaggagacccaaaatacaaagttggcacctttcaggtgggaggccagaataaagcaggaatatagggagggaaggatggtgagtctgaggagtgtcaggaagtcagtggggagatgtatcatttccatggtgcttctgggaagatagatctgaaattgccacttgctctgtggaaggagaggatccttgtttgtttttaaatgtggacttaaattgggtgcagctagctccttgagtttctggagtatcctgaaattatatgcttgccttttttgaatgttctgcagggaaattaaagagggtgctttactgttgccctgaaattttcaccatgcgccagcaggacattaacgacactgtcaggcttctcaaggagaagtgccttttcacggtacagcaagtcaccaagattttgcacagttgcccctctgttcttcgagaggacctgggtcaactggaatacaagtttcaggtgagaatgactgatagcgtgattagcgtagtttcaggtgagaatgactggtaatgggattagcgtagtttcaggtgagaatgactggtaccgtgattagtgtagtaacagcaagtttctcaggtttttcaaatgtagtgaaggtcagttatatggataagaagcctcggacacctcatatttgagtggaggaagtgaaagactagattctctgcatacatcagccaaagagaaatctttaatttctttactacagatcaaacctattcttcaacttttctgccattaataatgaatgatccagtcctattcttagagtctaagtggggactctgaaatagctaattttaaaatagctgaaaccttcctgtccttagaatctattttgcatgttgattttgaaaatgtaattttaacagttgtccgattttttggtaataattatgacaacttaggtcgaatttctagatgttttctgaatgttttgcctattctttccatattcatccttttccttccccatttaaagaaaaataccacctcttccttctgccccttctccctcctgccccttttccctcccacccctttatttcctgctccatgtttctcaggatgaatttgaaagtgttttgaaactgctggctgtcacacaaatgtcagtatcctagactgggtattcgctgttgtcaattaggcaattctttttgaatccttttgtacaacttaagtttttatggtttatagaatgataggtttcaatactctgtatctgggactcctaagtgtgtttgtgtcttccagtatgcatacttcaggatgggaattaagcatccagacattgtaaagagtgagtacttgcagtattcactaaccaagattaagcagagacacatttacctggagcgcctgggacggtaccaaacccctgataagaaggggcagacacagatccctaacccattgctcaaggacattctcagagtttcagaagctgagtttttggccaggacagcctgtacttctgttgaggagtttcaagtttttaagaagctcctggctcgggaggaggaggagtctgagagcagcacatctgatgacaaaagggcaagtctggatgaggatgaggatgacgatgatgaggaggacaatgatgaggatgacaatgatgaggatgacgatgatgaggacgacgacgaggcggaggacaatgatgaggatgaggacgacgacgaggaggaatagctgtgatggaaggactagagcgaaagggcccagagatatcaaggaagcttttcattctcttaaagcttttgggtcctttacttgaatcttctcaagttattttttattctaaaactggtctcttgatgaaaaaaattataagtcacctgagaggcagacagatcaaaccaaacaggaaacaggaaatgcatgtttgatctgttgtcacgtgtctgtggggagggccctgtcccatcctgaataagatacttatgttgagctattcacatcaaggggactcaatatatcaacaattggttttatttttttctcttttgaatatgttggtgataattccgtgacagttggaagatggggttcattcttccggttcaggaatcactatgtatttccttcttgtgataaaaataaaattacgagaaggcaatgtgaggttttagtacatcatagcactttattttatgaaaacatgtagcagattttccacaaaaatgcttatttttaatccaaaagtatattgcttcataatggtattcagtgcacagcagagtaaaagaagttaattcatgatgtactggttaattttgcatggcttcttaaggccagcaaaatgctggcagttttctttatctttgtgaagaacaggcccttcctgtttggggaagttggcttttatgtcagctcttggccagtggtcacttccaagcctggtgtctccggccctgtagtctgtagtgccagactgtgctggcctggagagtgctggggcaggtggaggccagggaatggtcccatacagttatctcccctgccctggttacagacagcttcgagaaccagaggagaagagcatagggtcatggagcaggtgggctgaagccagggccacagggagcaatccgtgaccccccaaggtgggtgtgggggggggggggggcgtgtcaccttagggaactcaatgagtccgaagaacaatttgaaatgttgggaaaagagaagaggaatttgatgtcagccggggtgatccctgagatagaggcctgtctctgatggcatgagctctaagagggtcctggaggattggtacatcctagaacattccagttagccctcttttaggggaaactggcataggattgatgcagaaggcatttttgatgatgggaccaaaattcaagtctccttggtagcattctaggatcaactagatcctaggatctggtagattgtaggattctagtgggtagaggccaggggtgctgtgaaacatcctgcagtgcacaggatggtcccacaagagaggatgatccggcccagaatgtcagtgctgagcctgagaaactcatctaaggcctggtccacaacagtaatgtgactgttcactcgtgacaacttcagatggtaaatggacttaggatcgtattattttatttaaaagaaaaataaggagctggtttttcagccgggttcctttcccctatgcactggaatacccctggtaggtgtgagctgcatgcaattgtggggattcagcactgaaatctaggtgcttttgttttctccagcagcctcgtcttacagcgtgactgcaaagaaaaagacttttgttttgcaaaagaaaagcagctcggtgactccgtccacatcgccacagttgagtcagatggcagtggcagtcctttgccagtggaaggagttcctgctaaggggaggtgcaggaggtgagctgatacctgagtggggcccttgcctgttgggttctctactggaggacagtgggcacagcaaagattcccttacttgtacctggcagcccacacgcaatggggaaaagggagagtttgtctttattgccttgcttggccataggcaaaactgtttggaaatgagacatttcactgtgccagtgttttcattttctcttccattgtggcatcccggtcactgccaccctccctagaacctaggctgttgttgtacccagtcggaggactaagtagaatcctcagtctgcacttggttagatgatcagtccatcccggtttcattagcagatgggtaattcagcaactcaggattgcttctttcattttgatacagaaatctttatgctcctgacagttttctgattctattattactaatttccttgggtggactttgagtattttcaaggaagccatttgagtttttaaaagaagccacatgggaaaagctgtggtggcctctttggaatgtttcaagaacgaactgtaattcctgagcaccaggaagtctttttacttgatatttaatgtggaaaacatcccaatgggcaagtcctgtgacagcacttgggactcaggagccagttcttgttgacacaaggcttctaagctaacactggagcatattagcatttgctgtgtggcaccaagcttgggactcaggagccagttcttgttgacacaaggcttctaagctaacactggagcatattagcatttgctgtgtggcaccaagcttgggactcaggagccagttcttgttgacacaaggcttctaagctaacactggagcatattagcatttgctgtgtggctgaggggcttgaggtcctagtagggagtagaaagtttcctagtaggattcacctacttttccagtgatatcactcgatcttagcatctgctagtaatgctgtagcttacatggacaaacagtgacaggtcccagggcggcaggaagtccgcagtacgcgtttgtgaacgtggtttctctcagttcacccagtgacccttcgctgagctcgagacccttcattgagctccaccttctgctctcaagtgggtctggagcctggggaacagctcgggagtacaggtgaaacttcgcgaattgcctgttccttctttctgaaaatgacaaattgcagaatacacagacacatgcacatgaaattttaataaagataaaaagcctaaaatatactctaactcttcaaaaaacatttttatgaaagaggaaaggaaggaggccctctttgtggctggaatgctggctctgagcagagtcagggtgacgcggcagggcgctggctttccagctgggtcagcggtcgtgaggctcaacacgagaggaggtggggtggctgctttggttgtaacattagcagggggaagacagctgcttagaagcatggtgggaagcagatgtggtgaagtgccgtactgttctgcttacaaagatggggatgtctaagatcgtgtttactacctgatagcctaaaacagtatcacttgagtcatggactaaaaggaaccttaaacattgtccagcccagcccaggtgtccatctctgttgcactgagacttgtaaggcgtccttgctgcttcgtggcagtgtgccttagctttccaagcaggggtctgaatagctttttccatgaaaattcaggggtctttctttgatacccttgtgacttgtcattcaggggatggcttccactgtttaaggctgaagcctaggtgatctcatagaacagggttcaccaaataaggcccatgggccaatttggccaccacctgttattgtaaataagtttttattggaacatagccgcagccattcaatgacatgcctgtggctgtgtctgcgctactgtagccacagggacctctggtctgcaaagctgaaaacgtttaccgtctgacccttgatagagaaaggctgccagtcgcgccgttgtctaaaaaagtctgaactccaccttagtgttaactagtccataggatggctcgtcgacctgcacgagcgtcataaacacgctggaggaccagagcaggggcggctgtgtctgcaacccggctttccttctgacatcacctggtctctgcccttcagcccctgcccccgtctctgttttggaagtggtccatcacagttccttctcaatttgttgggcctcgaagggagaattctttctctggctttggagtctaagaacaggtttctgcatactgcagaagcgtggctgactgacagcctcactgattccggggaatggcgagctgtcatctcatccgcagagacacagactacaccttcaggaactgcagcttgggtgagggcacaggctgcttaaacgcatcgcaggactcacaggtggttggtcccagaggggtctctcagggtgggctggtgtgtgcacaggcctggccatctgtcctctagaggcctgaggagagaggtcacagaggggactgactccagctaggaccttttctcagggtgtcctttttcatccagtttttagacctcatcttcctgggtgttagaaactcgtgaggttggtggagtgtaacaagaacgtcttaaatcctttgaagaaaaaacaaagtgaagcatgaggagaatgacaggcattcccactcctctttaaatgggctgcttcctgcttctcttagtggccctcagggcctctgtcacccagaggaccccacgttcttagagcaccaggattctaccatatggcagtgcacacggggaggaccccgcgttcttagagcaccaggattctaccatatggcagtgcacacggggaggggcagcctccaccgactacatccccatctttaggaacatgtgggctcagcattgcaacttttaaatgtgaaatcacagcctgttcctcttccctgccctcctccttccggtaacgactctgggtcttttctccaagggcacagctgtgtcaggttgctctgggttgaaatgaattctcgtgttgttcttggatgggtgtctgggtgcgtgtgtttctgtttcctgcttttttgtgtgttgtctccattatttcaagaataggtattctataagtcagtatttgataattagttgggggtttctgatttgtttttatgggagtggatgtgctaggcaagcatttaaaaagatacattaatatttcaggtgacttaccaccgtataaatatctcaaacccaaattatgtttgtggattcttaatcctagtacagttaggcactgcacgatgaaggaccgcgcgcatgacagtggtcccatgagattacagtggagctgaggtcatagccatcgtacagaattcttttttcttttttttttttttttgagacagagggtcttgctcagttgcctaagctgtagtatagtggcgcaatctcagcccactgcaacctctgccttccaagttcaagtgattttcctgactcagcctcttcagtagctgagattacaggtgcccaccaccatgtctgactaatttttgtatttttagtagagacagggtttcatcatgttggccaggctggtctcgaactcctggcctcaagtgatccgccggcctcggcctcccaaagtgctagaataattctttttgtgtttgtggtgatgctggtgtatacaaacctactgcactgccctgtgtatagaagtctagcacatacaattatgtagagtacataatacttgatgataatttgtgatgttactggtttacgtatttactatactcttcatcattattttagagtgtactccttctacttatgaaaaaaagttaactataaaatggcctcaggcaggtccttcaggaggtttccagaagaaggcatcattgtcacaggaggtggcagctccatgtgtgttactgggacacgatgtggaagtggaagaaggtgacatggatgatcctgcccctgtgtaggcataagccaatgtgtgtgtttgtgtcttagtttttaacaaaagttaaatagtaaaaaacaattaaaaattttaaaaacagagaaaagcactaaggacagaaaacaattttgaacatccgtacagtgtgtttgtattttaagctgttattaaaaagagttaaaaagtaaaaattaaaaatgtataaagtaaaaaagttacagtaagctaaggttaatttcttattgcaggactaatttattattgtgcaactgccagtcctgcgcattccagctacgctaagcgccctgcccaggtataccattttttatcttttatatctatttttactgtaggttttctacgtttagatacacacacacttggcactgtgttacgaccgcctacagtattcagtaacacgctgtggtgtgtagcccgggagcatgggctctgccacacagcctaggtgcgcagtacgcggtgccatctaggtttgttctaagtatgcgctatgatgttcgcccagatgaaattgcctcacaaagcatttctcagaatgcatctccattgttaagtgatgctcggctgtaggaaattgcttacaagcctggagtgtgcttagtgtgtgtgtctttggagggtgaggtgggagcgggaagtgattccctcgagtcaacaggaagtgaatgctgccggctactctcttatggagagactttccacatccgaagaggcagatgcatgcactctgtcatggccaactcagagctcaagttcctgccatgtgcggagctccggcccagacctttcccccaagggggtgtggacactcttcctttggtgtgtgtgagcctatatctgaaaagctgttttgcttctgtttgtttttaaaggttcctgaatgacatttctcctttatttttttaggcacgtaacaaaacatagacctgttttgaagtggcttgttacccaagggtgcctcactcatctgcgccaccaggaagatgaactgtgagggctcctataaggggcaggaagagcaaagctgtcctaggccaaccagagattcatctttcatgcagtgacatgttgataaaaaatgatggtcagtatgaaactggtaacaggttgtagatggctttctatggtatatcccagtctcttgcaaacgattgtgaagaatgccagtgttgtttaagattcggcagtttgtgtggggaggtgggggcaggatggggtttggttgccaaaagagtttgggaaatgctggcttaaacaaaggcgagaggaagttcctttcacgtcaggatttatgaatgcctatgagcccagtgtcagtgacgactttctagcggcggtcttcaacactttctaaatattaagcgatcaaggcccctgccccacttttagttccaacagaatgccgttcacaagatctgggaggcactctctcagccctctcctggagcccccggaatttctcagcagcccaggccctcccgctgcccgtggcccctcctcccaggtgccaggtggtcttccagcctctccaagggcccacccccctgcctcttcctcccactgcagctgatctaggggtttcttggccacatttcccttgagagagagtgggatttgccctatccacagagagcctcatttccacctgaaggtgtatttgtcagtggctagaccaggttcatgtctgtttccccttggggacttctgaaccttcctgcccgggagtctgtaacacagcagcacaggaccgcgcttcctttagcagtgctgagtaagcaggcagcggcactctgagatcccggggctgggcagtcgccccccacttcccagcagctctgtggtagtggggcgggagcagcagggacgtaccttaagatttctccagtgtctgactcttactttgtttcctgaaataattagagaaaagtcgtttaatgaaaaagagactgtgtaccttgaattctacagctacctcagtccaggctgcctgctgagatcctgtctttagctcacatacattccacggtgggggacaccattagtccagacaccgctgtggagattagcattttagtttgtgtgcgcccgcctggcttgaggcagtagtttaggaatgacaaggctagaaacctggctggctgtgagtcagagagagagaggatggacgtgggagaaagcaagcaaaagctaccctagggaagagccggtgacgtgcacaggccgagcagcacggctggtgagctgcaggctgcggccttgcccggacacttggtaatgccaaacaagtacgtgtggctactcattggtctatgaggacgatgacaggcttcgactctgtggtttctaaagcatataatattctcacgtacttctttcagcaaacgccaaacagtagtaattcttgtaactaccttgaaccctttgtggaaagaacctgggtgtgagtgaataaaaagtaaagagcgacgcgctatatcggccattaaatactcggggctgtccgtaacaccctgtgcttcccaattgtagcaccatgttctgtgtgaatatgcataaccagagtgaccccccccagcacccagcatgcccggctgtgcccctctgggtatgctcacatgcacatatatggacatacagtttcgtagcagaacgtggctgcccaggggctgcctatctgggcgagtagaccgcctggctcagcccacaggcctgcagcatcccatagcaccccgcccttgccccatcaccctgtgggctacatgcaggacacggcatgggcctgctccccagaggcacctgtttggggtcttcttgaggcttgtgctttcacagctctctttgaagcagatgtcttggtgaactcggtagactcttttatacctgttgtcacaagaaagctttgtaaaaccagacagtgaagcaaaatgttgccaactgcttaacctaggctatgtgaacccacagtaaacctgaaggtgtttgagggaaaaactgctattttctgaatgaaacgtgacctcctattgatgtattaaaatgtctaacataaaggtcatgtgatttgtaataaatttattgtggtacagtaatatgcataaaataaacccattttaatgtgcattctgatgagcactgacaaaggatatggtactaaaaataaaatgtgaaatgtcaaagacatgtcagtgctagaggcagccacctggccggaggcctggggaaggtatggcctcgcttttctgtttttctgggtatttcacagagaagtttgaggagtgttggggattcgggattcggatgtaggcattgtagaacaggagacccgatttcatctcctgcctcttccatttattaaccaggctactttgagcaagtctcttcaagttttaagcctcggttgcaggtaaaaatgggacctactcataccatctctcttacaagtttgtagataataatggatgggaaggcgttttgtcttttgttaaagttctcaaatgtcagagctgtttaaaagggaaatccaaggagttcagcaggcaaagctccaactcatatgctaagtctcatagaacctttaggatcgaaaacctgtggtaagacttccatttctggacatgaaagagtaacagaatctggaattaacctcccaatgtgaacaaccagagaactggacaaaatatagtaagtaactgtatgtcagatgttagaaaacagacaacacgagactgtaatccctgagagaggagaaacagatgagatgagtcctgtggtcagcctggaattcagcctagagaagtttttggatggcatcacagagaaaggggatccaagcagtggtcacactgagttgaggaaacagagattgaagttggggagacagaggcagctggaatttgtggggcagtactgaagaggagggaactatgcagaggaggaactccagaatctgtgtagggtccccttgggcctgtggttggaaataaagctgtgcatgcatagggtgaatccccacaaggcaaagaagaactactgaggagttgaacgatttccagagccagagtagagagatcttgtttattaggccatccatagaaaccccagacagggccaggtgcggtggctcactcctgtaataccagcactttgggaggccaaggcgggccgatcacttgaggtcaggagtttgaggccagcctggccaacatggtgaaaccctgtctctactaaaatacaaaaattagctgggcatggtggtgagtgcctgtaatcccagctacttgggagtctgaggcaggagaatagcttgaacccaggagggcggaggttgtagtgagctgagatcgctccactgcactccagcctgggcgacagagcaagacactgtctcaaaaaaaaaaaaaaaaaaaaaaaagaaaccgcagaaaggccatgccatagaactagggcaaaattaaccccagaataaaggctactccaaagccacctaaaacaagcctcagaaggatcaaactatactcagataatgccttgcagagaaaaaacattcttgaaaagaaaacaaacaaacaaacaaatccagcgtcagtaacataaaacttacaatgcccagcatccaataaaaaactataagacattcaagaatcatttgaataatcaaaaaagtgacccataacctagagaaaaataatcaaatagaataagacccagacatgagagtgatgacagaaatagcagatgaggaccttaaaatatctattataaatttgttccacatgttcagtgagctaaaggaaaatataaagataatgaagatagaaattggagcatctaagaaacaactaaatgaaacttctggagatgataaaacacagtattaataaaacttttgttgaacaggattaatggtagatgctgcagaagaaaagatcaatgaccttgagtgcatagcaatagaatctgtccaaaatgaaaagactgaaaaagttgagaagagctgcagtgacctgtgggacaatatcagtctaatacacgcataactggagtcccagaagtagaagaaatggagggacaggaaaaatatatgaagaaataatggcaaaaattttacgaagtttgacaaaattaaaacccagaaatacaagaagcttaaactccagagaatcaaaacgtagccataccgagaagcacatcataattaaattgtccaaaaacagtcataaagggaaaacataaaaggggcaggaagacacattccatacagtgtaacacaggtaagaatgactgcagtcttcttgtctggaactatgcaagccagaagacaaagccatgacaacttttaagtcatgaaagaaaaaaatataactgtcaatcaagaagtctatattcagcaaatatattcttcaaaaatgaaggtgaaaaaaaaatagtttcagacaaaagcagagagaattcatctcctgcagacctgtgctataggagatgttagagttaagttcttatggcaaagagaaatgataccagatggaatcctagatctacaaaaaggaatgaagagtgctggagtcggcaggcagatgtacaataaatacaaaatactttactttcaatatctaaaacaagataatttttgagtgcaaaaataacgtatagtgcagttcacagcatatgtggaaggaaaaagtctgataataattcaaaggatgggagggaagtggaagcttgatgtcagccgctgccatggatactgaagttgtctactagtgattaaaggtatgcggcgtgaagttgaagatgtgtatggtaaatcctagacactgctggccgggcacagtcactcacgcctgtaatcccagcactttgggagggcaaggtgggtggatcacctgaggtcatgagtttgagaccagcctggccaacatggtgaaaccctgtctctacgtaaactttgtctctactaaaaatacaaaaattagcagggtgtggtggcaggcgcctgtaatcccagctactcggggggctgaggcaggagaattgcttgaacccaggaggcagaggttgcgatgagccaagatcgcaccatcgcactccagcctgggggacaagagggagactttgtctcaaaaaaaaaaaaaaaaaaatcctagacgctgccatcatattgaactcgtacaatagtaattaagggtacattgtgttaaggtgaagatgtgtatggcaaatcccagagcaacctctaaacaataaacctaagaagtataaccagtaagcccatagtggagacaaaatggaatcctaaaaagtaatccaaaattaggcaggaaaaaagaaaaaaggaacaaaaagcaggtgggaaaaatagaaaacaaatagtaatatggcagtttaaatccaaccacatcagccattatgtggaaggtagtaaatggtctaaatactccaataaaaaccagactgtcagactagatatccagcaagacccacctctatgttaaatactagaaagtcacttgaaatatgcagataggttaaaagtgaaaggatagaatgctttcaggaagtgaagggtcttcttgttggatacttggtggtcaccagcaggcactggtgtaactaagcacagcgggaagatggcagatactgtggattcggactctcactgcatagaatccgaattcagtgggctgtcaacacggcttcccaaatcccaacacagattagtatctcatatgtgttcctgctacatattacacctggcttcatgtccaagctctaatgaagcttctacccttgcccgtctacatcccattctccacagagcatccaaagtagtgtaatcgaacatgtcactcttctgctcagaacccttcagtagctcctccccatttcatgccggacaaacaccagagtccttctgtgggtctccatggccccgagggttccctgtccctcacctctcaccactctccacttctcccccaacatgccagggacactcctgacttggggccctggtaactgtcctctggctctggaatgtccatccctcctccatgtctgttcagcatcgccctccccaggaggctgccctcttgctgcaccagccctgcccatccccagcaggctctcctggtctcgtcctgtcatctcgtcctttttccctttgcactcaccacctgccacaccacacaccacactctcactgctgtctgttgtctgtcccctcatctgcaatgaacgggtcctgaaggcagggctttggtctgctctgttctgatgtgtgctgagtatctagaacagtgcccggcacacagcaggtactcagtaagtcatctgttgactaaatggacagtgcccggcacacagcaggtgctcagtaagtcatctgttgactaaatggactgtgtgaccgacagagtcatagagtgttagcaagaaaggacctaagagatgggctgggcatctctccctccacagcccattttggagatggggggcctaaggccacatcatgagttaatggcagaactggggccggcattctcatgagctgtttgtttttccagggggctctgaggaagagaagagaggaaggtcacatcagttggctctgccatccagtggggactgggctgatgtgtgggaaggaaggcctgggggcctggggaccaggagcctgcgttcttctcagcccctgctcctgagctgcatggacttggggcagttattcggtttttctgcctcagctgcctaatttgtgacatggagggaatcgatggtcaaagcaagtcccttctgtgactgcagccatcgtccctcctcagggttagctgggtagctttgagacagcactttgaggagtcaagaacacacgacaaatgcggtaaggcggaggacagaaaccaacttacacgtggtgacagacgcctccctcccagactggaaaggcctttgtctcggagaacagccttgtgcaggggcgggacacctttatacaggc

SEQ ID NO: 1625 - DNA, 389 bp, Homo sapiens
agctggcttcctctaaggccggggtgggttggtattgtgggggtggagagtcccttctcctgacaccgctctggctgggtcagggagccctccgaagctgtgcctcgcatgctgtggctgttctgacccccgtgatgggcagcacctctcatcctggtgcttggggcagcagcgcagcccctgggggctcaggggtcagccccgtgcaccagactccctgtctggcacctcatcgtttggaggctcccgtggcaaacccagctgtggcccagcagtcctaggctgaggcacaggctgtgttggaaggggcgccctgaggccaagccccgacttaccgagctcgcagcgtctgcctttgaaccctggcccgcagtcacagctgtgggcgt

SEQ ID NO: 1626 - DNA, 506 bp, Homo sapiens
ttttttttttttttttttgagaagtactttcgcttttgttgcccaggctgcagtacaatggcgtgatcttggctcactgcaacctccgcctcccaggttcaagtgattctcctgcctcagcctcctgagtagctgacactacaggtgcccaccaccatgcctggctaatttttgtatttttagtagagatggggtttcaccatgttttccaggctggtctcaaacccctgacctcaggtgatctgcccacctcggcctcccaaagtgctgggattacaggcgtgagccaccacacccgggctcatgtcaatttttcatagtaatccccatgtcccagctgtcattttatttctagagctagacaaactgttcaggttccttgattctttccagggagttggggtggctcatgggattttcttaggcttttggtgtagcattaacacaatttattgtgagatgttgacagttgagtattttgagaagaaaattacattataaaaaac

SEQ ID NO: 1627 - DNA, 4796 bp, Homo sapiens
gaagaagatccttttattgcttttgtacaagaccagacaggatctcatttgttaaacgtggtaccaattgggtgtcttaacacaggagcagaacttcctagagcagaatgatgatggtagatctgaaagtggctgcgtacttggaccctcagatcagggctttgtgggagaccaaggggcctgcaagagagagctccggtcagagtaaaaaatctcctcaaatggactgtctcgatcctaagagctcttgctggcacttccggaatttcacctatgatgaagcaggtggaccccgtgaggctgtcagcaaacttcaagaattatgtcatctatggctgaagccagagatccactcaaaagagcagatactggaactgctggtgctggagcagttcctgactattctgcccagggagacacagacccagatgcagaagcaccatccacagagcattgaggaggctgtggctctggtagaacacttgcagagggaatctggtcaaacatggaatggggtgagaagaaagattcctgacatgtacagtgaaataggatgcaggtggatatagtagagatggtggcagttagttgagaaattagatggattaggtaggtcattgtttggttttttttttaaggacagttaaggtgggacttgaaactacaggcccacagaaaagttcacaggtttcagagattgtggtagatacttccctggccttagagaaagagagttgcttttgccctctttggagccagggtgaattgagggtgttgggcctagtctggcttggccaaggagacaggacttaagtacttagaaacagaataaaaggtaataaagagtcagggaggctggatgcagtggctcacacctgtaatctcagcactttaggaggctgaggcgggtagatcacctgaggtcaggagttcaagaccagcctggacagcatggtggaaccctctctctacaaaaataaacaaattagctgggcatgatgaccggtgcctgtaatcccggctatcctcgaggctgaggagggagaatcatttgaacctgggaggttgcagtgagccgagatcgcaccattgcactccagcctgggcaacacagcaagactccatctcacaaaaaaaaaaaaacaaaaaaaacaaaaaaaaaacgggccgggtgcagtgactcacacctgtaattccagcactttgagaggccaaggcagacagatcccctgagcccagcctgggcaacatggtgaaaccccgtctctacaaaaaacatgaaaattagccaggcatggtggcacacacctgtggtcccagttacttgggaggctgagtcaggagaatcacctgagcccaggaggtggaggttgcagtgagctgagatggcaccattgcactcccttgggtgacagagtgagaacctgtcaaaaaaaaaaaaaaaaggcagatccacaaggagaacacaggaaaacaaggacacttaaagaaaaggagaaattggccaggttcggtggctcatgcctatatttcgaacactttagggggtcgcggtgggaggactgcttgagaccagcctggggaacatagtgtgaccttgttgctatgaaaaaaaaaaagaaaataagccaggctgatggcacatgcctctagtcccagcttcacaagaggttgaggtgagagaattgcttgacccagaagtttgaggctacagtgagttattattgcagcattgtactctggcctgggcaacagagtgagaccttgtctcttaaaaaaaaaaatgttttaggccaggcgtggtggctcacatctgtgatctcagcactttgggaggctgaggcgggcggatcacaaggtcaggagttcaaaaccagcctgaccaacatgctgaaaccctgtctctactaaaaatacataaactagctgagcatggtggcgtgtgcccgtaatcccagctactcagaaggctgaggcaggagaatggcttgaactcgggaggcagaggctgcagtgagctgagattgcaccactgcactccagccagggcaactgagcgagactccatgtgaaaaaaaaaatgtttttaaaaattaggaaaaatccagcctgggcaacatggtgaagctcagtctctacaaaaaatacaaaaatcagctgggcatggtggcgtgtgcctgtagtcccagccactcgggaggctgaggtgggaggatcacctgagcctggggaggatgagactgcagtgagccatgattgtaccactgtaccccagcctgggtgacagagtgagacccccgtctcaaaacaaaacaaacaaacaaaaaaaacaactaggggaagactgcacaagaaaagaaaacatagaaaaaagggaaacaaagatttggaaaaaagaaaaatcccaacagaatagccaaggacaggaaatgcactgatgggtaatgtcctccctatagtagatgaaagtctctactgccttcccttaatgcttgttccttggctctgctgacaagttgggagccagggtatgaacttggtgggtggcgacacatctgctgacctcgggtctgctgggaagaatacagggcaggacctatgtttggtgtcagaatcatctggaggtaggttggagccactccccttttttctccattctatccccattctctgaaaaccttcgctggctatagggataatcaggctgacaggaaaacttttaaattcatttatttgaattttagagaaaactagaagacagaaaaccacaactgtgggattgaagtcaacagaaaaggcctgacaagacagtattagaatgagtggcctgcctggctgggcacaatggctcacacctataatcccagcactttgggaggctgaggtgggcagattacctgagtttgggagtttgagaccagcttgaccaacatgaagaaaccccgtctctactaaaaatgcaaaaattagccaggcgtggtggtgcatacctgtaatcccagctacttggaaggctgaggcaggagaatcacttgaacccaggaggcagaggtagcagtgagccgagattatgcctttgcaccccagcctgggcaacaagagcaaaactcatctcaaaaaaaaaaaaaaaaatgagtgggctgcccaaccctgccagtggcctgacctagaccgtatacagaggagtagaagctgctgtgttaaagggctggcaggcaccacagtttgtttcctttcaccctagttttctcatatttgtgtatagtcatttgtggagcattggtggcccagtatctctttaagcctttttttgtcattttttttagtgtcttatactacccacaatgtgggctgtacacctgtcgctctgcctccacccccacaaaccaaaagtaagttctgtggtaacaaggatgggaattatttctaggttgcagtccatgagctgggaaaggaggcagtgctcttgggagaaacagcagaggcctcaagtttcgggctgaagccaacagagtcccaaccagtgggcgtatcccaagatgaagaattttggaatacatacgagggtctgcaagaacagctcagcaggaatactcataaagagactgagcctgtgtatgagaggggtaaggagcttcatgataattttcttctcctgggagctgtgataatagtttattcacccaaaatgtcatgggcattttttgaataccctgctctgtggatttgtaaaaccagccttgatagcaactatgatgtccttccaggcagcagtagaaatgccaactgtggatgaaagtgggagtaggcctagagaacagaaatatctaaaccacagaactcttggtaataacagtgtgaactctgttccttagactagtggagaggaaggaaagaaatggagtgggaaggcttggggccacttcatccttgtaaaatacagaaggaattgagatcagatgggctgttagtggcagaatgtgaaaacagttgtgtaccaggaaaaacataataaaagacaaaaaacttcatctcctaccatacagtggagtccctgagtacttcattttaagatatctttaatttttgcctaactcagaaaaatatgagaggaaaaagggatttcccttttatttctctgatgaaaactgaggaaacatttagttggggaactagttctaggggctggtggatatttgattcttatttatgaagagactgcttcaggcatcacacacaccacacgtgtaaaggtgtcccatctgtacttaaaaagtcaggatcagtgttttagaaatgagctcaggatgtttatagataaaagagatttcttctggctcttttccccccacagctgtgcctactcaacagattctagcttttcctgagcaaacaaacaccaaagactggacagtgacacctgagcacgtcttgcctgagtcccaggtgagctgtgctttccagctgttgagggctacctttctctgctatgtatgattaatactgtccaggaggggttcagaggtgtgttagtcccgggtgttctctgggcaactgggtacctcccaggctgtgggctgacgccttttctcctttttttctgccttctcacttaaaaaaatcatgttcttttaattcctttatcgcctggccaattcatagccaggtggctaggctgcttctgtacagtggcaggttctgagctgaagtccattctcttctttagagcttgttgacatttgaagaagtggccatgtatttttcccaggaagaatgggagttattggatcccactc

SEQ ID NO: 1628 - DNA, 10519 bp, Homo sapiens
gaagaagatccttttattgcttttgtacaagaccagacaggatctcatttgttaaacgtggtaccaattgggtgtcttaacacaggagcagaacttcctagagcagaatgatgatggtagatctgaaagtggctgcgtacttggaccctcagatcagggctttgtgggagaccaaggggcctgcaagagagagctccggtcagagtaaaaaatctcctcaaatggactgtctcgatcctaagagctcttgctggcacttccggaatttcacctatgatgaagcaggtggaccccgtgaggctgtcagcaaacttcaagaattatgtcatctatggctgaagccagagatccactcaaaagagcagatactggaactgctggtgctggagcagttcctgactattctgcccagggagacacagacccagatgcagaagcaccatccacagagcattgaggaggctgtggctctggtagaacacttgcagagggaatctggtcaaacatggaatggggtgagaagaaagattcctgacatgtacagtgaaataggatgcaggtggatatagtagagatggtggcagttagttgagaaattagatggattaggtaggtcattgtttggttttttttttaaggacagttaaggtgggacttgaaactacaggcccacagaaaagttcacaggtttcagagattgtggtagatacttccctggccttagagaaagagagttgcttttgccctctttggagccagggtgaattgagggtgttgggcctagtctggcttggccaaggagacaggacttaagtacttagaaacagaataaaaggtaataaagagtcagggaggctggatgcagtggctcacacctgtaatctcagcactttaggaggctgaggcgggtagatcacctgaggtcaggagttcaagaccagcctggacagcatggtggaaccctctctctacaaaaataaacaaattagctgggcatgatgaccggtgcctgtaatcccggctatcctcgaggctgaggagggagaatcatttgaacctgggaggttgcagtgagccgagatcgcaccattgcactccagcctgggcaacacagcaagactccatctcacaaaaaaaaaaaaaacaaaaaaaacaaaaaaaaaacgggccgggtgcagtgactcacacctgtaattccagcactttgagaggccaaggcagacagatcccctgagcccagcctgggcaacatggtgaaaccccgtctctacaaaaaacatgaaaattagccaggcatggtggcacacacctgtggtcccagttacttgggaggctgagtcaggagaatcacctgagcccaggaggtggaggttgcagtgagctgagatggcaccattgcactcccttgggtgacagagtgagaacctgtcaaaaaaaaaaaaaaaaggcagatccacaaggagaacacaggaaaacaaggacacttaaagaaaaggagaaattggccaggttcggtggctcatgcctatatttcgaacactttagggggtcgcggtgggaggactgcttgagaccagcctggggaacatagtgtgaccttgttgctatgaaaaaaaaaaagaaaataagccaggctgatggcacatgcctctagtcccagcttcacaagaggttgaggtgagagaattgcttgacccagaagtttgaggctacagtgagttattattgcagcattgtactctggcctgggcaacagagtgagaccttgtctcttaaaaaaaaaaatgttttaggccaggcgtggtggctcacatctgtgatctcagcactttgggaggctgaggcgggcggatcacaaggtcaggagttcaaaaccagcctgaccaacatgctgaaaccctgtctctactaaaaatacataaactagctgagcatggtggcgtgtgcccgtaatcccagctactcagaaggctgaggcaggagaatggcttgaactcgggaggcagaggctgcagtgagctgagattgcaccactgcactccagccagggcaactgagcgagactccatgtgaaaaaaaaaatgtttttaaaaattaggaaaaatccagcctgggcaacatggtgaagctcagtctctacaaaaaatacaaaaatcagctgggcatggtggcgtgtgcctgtagtcccagccactcgggaggctgaggtgggaggatcacctgagcctggggaggatgagactgcagtgagccatgattgtaccactgtaccccagcctgggtgacagagtgagacccccgtctcaaaacaaaacaaacaaacaaaaaaaacaactaggggaagactgcacaagaaaagaaaacatagaaaaaagggaaacaaagatttggaaaaaagaaaaatcccaacagaatagccaaggacaggaaatgcactgatgggtaatgtcctccctatagtagatgaaagtctctactgccttcccttaatgcttgttccttggctctgctgacaagttgggagccagggtatgaacttggtgggtggcgacacatctgctgacctcgggtctgctgggaagaatacagggcaggacctatgtttggtgtcagaatcatctggaggtaggttggagccactccccttttttctccattctatccccattctctgaaaaccttcgctggctatagggataatcaggctgacaggaaaacttttaaattcatttatttgaattttagagaaaactagaagacagaaaaccacaactgtgggattgaagtcaacagaaaaggcctgacaagacagtattagaatgagtggcctgcctggctgggcacaatggctcacacctataatcccagcactttgggaggctgaggtgggcagattacctgagtttgggagtttgagaccagcttgaccaacatgaagaaaccccgtctctactaaaaatgcaaaaattagccaggcgtggtggtgcatacctgtaatcccagctacttggaaggctgaggcaggagaatcacttgaacccaggaggcagaggtagcagtgagccgagattatgcctttgcaccccagcctgggcaacaagagcaaaactcatctcaaaaaaaaaaaaaaaaatgagtgggctgcccaaccctgccagtggcctgacctagaccgtatacagaggagtagaagctgctgtgttaaagggctggcaggcaccacagtttgtttcctttcaccctagttttctcatatttgtgtatagtcatttgtggagcattggtggcccagtatctctttaagcctttttttgtcattttttttagtgtcttatactacccacaatgtgggctgtacacctgtcgctctgcctccacccccacaaaccaaaagtaagttctgtggtaacaaggatgggaattatttctaggttgcagtccatgagctgggaaaggaggcagtgctcttgggagaaacagcagaggcctcaagtttcgggctgaagccaacagagtcccaaccagtgggcgtatcccaagatgaagaattttggaatacatacgagggtctgcaagaacagctcagcaggaatactcataaagagactgagcctgtgtatgagaggggtaaggagcttcatgataattttcttctcctgggagctgtgataatagtttattcacccaaaatgtcatgggcattttttgaataccctgctctgtggatttgtaaaaccagccttgatagcaactatgatgtccttccaggcagcagtagaaatgccaactgtggatgaaagtgggagtaggcctagagaacagaaatatctaaaccacagaactcttggtaataacagtgtgaactctgttccttagactagtggagaggaaggaaagaaatggagtgggaaggcttggggccacttcatccttgtaaaatacagaaggaattgagatcagatgggctgttagtggcagaatgtgaaaacagttgtgtaccaggaaaaacataataaaagacaaaaaacttcatctcctaccatacagtggagtccctgagtacttcattttaagatatctttaatttttgcctaactcagaaaaatatgagaggaaaaagggatttcccttttatttctctgatgaaaactgaggaaacatttagttggggaactagttctaggggctggtggatatttgattcttatttatgaagagactgcttcaggcatcacacacaccacacgtgtaaaggtgtcccatctgtacttaaaaagtcaggatcagtgttttagaaatgagctcaggatgtttatagataaaagagatttcttctggctcttttccccccacagctgtgcctactcaacagattctagcttttcctgagcaaacaaacaccaaagactggacagtgacacctgagcacgtcttgcctgagtcccaggtgagctgtgctttccagctgttgagggctacctttctctgctatgtatgattaatactgtccaggaggggttcagaggtgtgttagtcccgggtgttctctgggcaactgggtacctcccaggctgtgggctgacgccttttctcctttttttctgccttctcacttaaaaaaatcatgttctgttaattcctttatcgcctggccaattcatagccaggtggctaggctgcttctgtacagtggcaggttctgagctgaagtccattctcttctttagagcttgttgacatttgaagaagtggccatgtatttttcccaggaagaatgggagttattggatcccactcagaaggccctctacaatgatgtaatgcaggaaaactatgagactgtcatctctctaggtaaagattttcccttccctttatgtagttgagtactctattcttggcttactgagaaggaaccccagtgaggggtgtcttactgttccaggagctggttgattctcatctagatggtataggggagggtgtaggtagtgtatccagatcacctgtggagctttttccaaatgtacatgccgattgcttatcccacattgagtcctttatcctttccttctcttttccaccaaacttcctcttctgtgtcttacttatctcagtaaggggcacattcattatccagtggctcaaggcatacaaagtaacagttttcctttattctgatcttgtcatcataccccactgttaattcattagcaagttttcttagctttactttgacatatcctgactgcaacaatgtctcatcttcttgcactgttagcatcctggtgtaagccagtgtcatcttgaaccaggcatacatgcgtagctttttaacaggtgcgcctgcatctccttgtgcccttccacagtctgttttctatacagaagctagattgatcttttaaaaacctaatcagatcatgacatttcctttcctcaaaagcatgtggtcacttacattcagaaaaaaaagtctgatattaccagggctccaggacactctacagtctggttcctgctcatctgtctgccctcatttgctactgaagcccttgctcagtcctcaccagccacttagctagtctccttgctgttaattgaatttgtcaagttcatttttaccctcttgtttcattttatttggcacactgggcttcctgaatacttcattttcaaattgagtacatctaagttttgctcaactcagaaaaatgtatatcatgcaaggggaaaaaacgctatatatatatatctttttattaactttcctcttgaaaactgaggataatcatctggggaaccggttctaggggctggtagacacttggttctaatttacaaagaaccaagtggttaccatacacactcttaaaaaggtgtcctatctttccagaaagaatcaggattttctgtattttagaaatgagctaaggatgatcatagaaacaagagaaatatcctctggctcttttccacccacagctgtgcctgctcaacagattttagtctttcctgagcagacaaacaccaaagactggacagtggcacctgagctcctcttgcctcagtcccagttgagctgtgctttccagcagtgtagggctacctgagcatgaccttatctgcctttccctgctgcccaagacccacactgcccagcatgtgccctgaggcatgttagccccagaggttctaccctggacaattaggcttggcccagagggaactgggtacctcctaggctgtttgctgatcccttggctccttttcttctgccttcgcccccgtgggcccccgcctttttttttcttaaatcgtattctgttaatttctttagcacctggcctaccatgcagttcatacgcagttaggctgcttctgcagtggcaagttcagagctgaagtccattctcttctttagagcttgttgacatttgaagaagtggccatatatttttctcaggaagaattggagttactggattacactcagaaggccctctacaatgatgtaatgcaggaaaactgtaagactgtcatttgtctaggtaaagattctcccttctttttgtgtagaagttgagcaatctgttctcagtttactgagaatgaacctctgtgagagggtctcagtgttccaggagctggttgattctcaactagatagtgtagcggagggtgtaggtggtgtatccagatcacctggggagcttttccagatgtacgtgctcattccttgtcctacgtggagatcttgatcccttccctttccctttccccaaaccttctccatcatgtttttcccatctcagtaaggggcatcagcattatccagttgctcagggcaaacaaagtactgtcatgtttttttttttttttttttttgagatggagcctcgctctgtcgcccaggctggagtgcagtggtgcgatctcagctcagtgcaagctctgcctcccgggttcatgccattctcctgcgtcagcctcccaagtagctgagactacaggtgcccgccaccatgcccagctaattttttttgtatttttttagtagagatagggtttcatcatgttaaccaggatggtctccatctcctgaccttgtgatccacctgccttggcctcccaaagtgctgggattataggcgtgagccaccgtgcccagctagtactgtcatcttttaccctgatcttgccatcataccccactgttaattcattagcaagttttcttagctctactttgacatatcctgactgcaaccatgtttcagccccttgcactgccagcatcctgatctaagccagtgtcatcttgaagcagatcaatgtcagtagctttctaacaggtccccctgccttcgctcttgtcctcccacagtctgttttctacacagaaccccaactgattttttgaaaacctgatcagatcgttgcatttccttgtttcagaagcctgtggttacttcctaaccatatttggagaaaaatctaaacttcttaccaaggcctcaggaccctccatggtctggctcctatggagttctttgcacatgtgtcctgctactggtgcgcttgtgcactcagtccttagccacactggttgtctttctgttacttgaactcgccaggctcatttctacttttcctttgccttgcatacttttctgccatgtgacaaaactcacttttaggtttctgctcaagtattactttctcaaagaggtgtcccacaagaccttatctaaaatagctttacaggagcagaatcttaaatactctttaccgtgatttaattttctttaaaacatttatcactccctgacattattttgtttattgattgattgtgccatccctctactgtaatgtaaagtccgtgaaatcaggggtcttcttcactactatatccctagccctcgagcagtgcctaacacaccatagccactcaatacatgtttgttgaatgaatgagtgagagagtttcataccttgtaatccgtaattagagaaacttcaccaagtgattttggtctatttcttctacctgcatatgaaccagtaatctataggaatggtagaaatctatcctagttgagggccagtggctaaggaataaaggctaaataaaaagtagctgtaattataatagtaatcacttgtgcttatgatactcaagtcagcgtccttcacattggctttgccatacctggtcttatccaggctgagtccttctgaagagttaataagaccagcttatattccctgcaacttctggagcttggttcccccttggttggatatagggtattgatggcaaaagagagagaacatgtactggattcccattccctatatccttttcattgatccaccgtagatttatttcttagtctctgctttgcatagctacctataagtataacatagtataaacgtgatacttaatcttggagtctatccatttaaccatttggagtaacaaattgtaaaatgtctttggtcatcctgaaacagtctgggattagtggaccagttcactgttaagttaccagtccttgacctcattttgtccatttgacagcattgtttgtgctccccaaacctaaagtgatctcctgtctagagcaaggggaagagccatgggttcaagtatccccggagtttaaggatagtgccggaaaatctcctacaggtaaatataccatgggaagtggagaaatgtgccttgatgtgaacttttgcaagggcttaacattttaagattttgttccttttttttttaatcattgaatttttctttttattcctgtgatttgcttgttctgggatacagatgtgtgattatgtttattccaacagggttaaagctcaaaaacgacactgaaaatcatcagcctgtgtctctttctgacttagaaatacaagcatcagcaggcgtcatatcaaaaaaggccaaagtaaaagttccccagaaaacagcaggcaaagaaaatcattttgatatgcacagagtgggaaaatggcaccaagattttccagtgaagaaaagaaagaaactttcaacctggaaacaagagctgctcaaacttatggatcgtcacaagaaagattgtgcaagagagaagccttttaaatgtcaggaatgtgggaaaaccttcagagttagctctgaccttattaagcaccaaagaattcacactgaagagaaaccctataaatgtcaacagtgtgataagaggtttagatggagttcagatcttaataagcacttaacaacacaccaaggaataaaaccatataaatgttcatggtgtgggaaaagcttcagtcaaaatacaaatttacatacacaccaaagaactcatacaggagaaaagcccttcacatgtcatgaatgtggaaaaaaattcagtcagaactcccaccttattaaacaccggagaacccacacaggtgagcagccatatacttgtagcatatgcaggagaaacttcagcaggcggtcaagccttcttagacaccagaaactccacctgtgaagagaagcttgtccagtgtcctcattctgaagacattcaccaaatggagcttggcactaaaatttatgtaaaagaaaaatcacaaaccttgaaaaattttacatcagaaaatgggataaacatacatttcacagaaaataatcaagacttgctctgcagccactcagtagtcttctgtggtcacagaagtaaacattgttggctttgtattgatctctccagtcatttttgaacacatccaatagaaacattggcagcatggtcttccaaaacaaaaagcagtaacatgcatgtttaattgcataccattctcttcacagtagcaggcttaccaatttccatagtctcatgaggccgaaatgaattacaatgtaaagtgttccaggaaccaaattggattttctttcttttgtcattggacacggtttgcaaagttggacatcacttgagttccttcttaaacttttcggcaacttctcttggatcctgttatcacagttttttactgtgatgaaatcttgttaaccaccactagggaatctccagatgaactattaatgcactgtcttatgcctctcattggtgatgtttggaaaatagaagacatctctaatggaatcatgggggaaacgggttggaatttgtagccatggaatatatattagatgtaaagaattttctgcaataaaagaaactagacttgttaatccctgccttgcaatgtcagtaggataaagcagctataaaaattagtacttgcccaaggcctgaaagagaattagtgggaattaagatcaacttctcagttttgtttgtttactttttaattggcttttctttgttgttaagaatgagagacttaatttccatgggagttggagtgtgtgtgctgcaggcaggatcctgtggctcatttggcatggagacctggacatgtagtcagcaggagacggttccctaaataaaagatt

(The sequence listing continues in the following parts.)
